United States Patent Application Publication US 2011/0183924 A1 - sequence listing, part 76

SEQ ID NO: 275875 - DNA, 3520 bp, Homo sapiens
cggggcacttcgggagggcggttgtggcactcggttgaggaggaatgcgcttcccggcgtcttgcccgccttctctccatcgatcggtccccgcgctgccggcacctgctgccgcttaaagcttgaaaatcagcttcctaaagccattcccgatggccttcgatgggaaagaatgccatatggctgaattcattatgggggataagaaatatgtcagtgtgcgcggaggggaacctgttaatacgttcaaatttaagagtagttttcagatgcttcaagtgttgtgaacagagacttgtttggattatgcatttctcagctagactaaataaatgctagcaatggatacgtgcaaacatgttgggcagctgcagcttgctcaagaccattccagcctcaaccctcagaaatggcactgtgtggactgcaacacgaccgagtccatttgggcttgccttagctgctcccatgttgcctgtggaagatatattgaagagcatgcactcaagcactttcaagaaagcagtcatcctgttgcattggaggtgaatgagatgtacgttttttgttacctttgtgatgattatgttctgaatgataacgcaactggagacctgaagttactacgacgtacattaagtgccatcaaaagtcaaaattatcactgcacaactcgtagtgggaggtttttacggtccatgggtacaggtgatgattcttatttcttacatgacggtgcccaatctctgcttcaaagtgaagatcaactgtatactgctctttggcacaggagaaggatactaatgggtaaaatctttcgaacatggtttgaacaatcacccattggaagaaaaaagcaagaagaaccatttcaggaaaaaatagtagtaaaaagagaagtaaagaaaagacggcaggaattggagtatcaagttaaagcagaattggaaagtatgcctccaagaaagagtttacgtttacaagggctcgctcagtcgaccataatagaaatagtttctgttcaggtgccagcacaaacgccagcatcaccagcaaaagataaagtactctctacctcagaaaatgaaatatctcaaaaagtcagtgactcctcagttaaacgaaggccaatagtaactcctggtgtaacaggattgagaaatttgggaaatacttgctatatgaattctgttcttcaggtgttgagtcatttacttatttttcgacaatgttttttaaagcttgatctgaaccaatggctggctatgactgctagcgagaagacaagatcttgtaagcatccaccagtcacagatacagtagtatatcaaatgaatgaatgtcaggaaaaagatacaggttttgtttgctccagacaatcaagtctgtcatcaggactaagtggtggagcatcaaaaggtagaaagatggaacttattcagccaaaggagccaacttcacagtacatttctctttgtcatgaattgcatactttgttccaagtcatgtggtctggaaagtgggcgttggtctcaccatttgctatgctacactcagtgtggagactcattcctgcctttcgtggttacgcccaacaagacgctcaggaatttctttgtgaacttttagataaaatacaacgtgaattagagacaactggtaccagtttaccagctcttatccccacttctcaaaggaaactcatcaaacaagttctgaatgttgtaaataacatttttcatggacaacttcttagtcaggttacatgtcttgcatgtgacaacaaatcaaataccatagaacctttctgggacttgtcattggagtttccagaaaggtatcaatgcagtggaaaagatattgcttcccagccatgtctggttactgaaatgttggccaaatttacagaaactgaagctttagaaggaaaaatctacgtatgtgaccagtgtaactcaaagcgtagaaggttttcctccaaaccagttgtactcacagaagcccagaaacaacttatgatatgccacctacctcaggttctcagactgcacctcaaacgattcaggtggtcaggacgtaataaccgagagaagattggtgttcatgttggctttgaggaaatcttaaacatggagccctattgctgcagggagaccctgaaatccctcagaccagaatgctttatctatgacttgtccgcggtggtgatgcaccatgggaaaggatttggctcagggcactacactgcctactgctataattctgaaggagggttctgggtacactgcaatgattccaaactaagcatgtgcactatggatgaagtatgcaaggctcaagcttatatcttgttttatacccaacgagttactgagaatggacattctaaacttttgcctccagagctcctgttggggagccaacatcccaatgaagacgctgatacctcgtctaatgaaatccttagctgatccaaagacaatggggttttcttcctgtgatttatatatatactttttaaaagactgatgtaccattttaaacttcattttttcttgtgaatcagtgtatactacatttatacattttatatctaacaattttttttttttacaaagtataaatgtatatatcaactgaaggtaactacttttttcatatttggagttttaaacttttggtgtttacctcagactgatgttacctcttttatatttttatgtcttaattggctcggatgatgaacttgtgcaatcttctaccaacaaagttcaagtggcatcattttatatacatgtatctttttcaggtattttctatacaaattcttaatagatggaaaattagactctactttggtcactaatagtctttcatttgtatattgaagttaccttgccccttggagttattgaagtgacatgtcaaggtatcacctaaatattcttcagtcacactcactggtatttctgaggctttgtgtgttaacaggccttgtaattgacattattttggttaatgtaaccccaaaattgctttagtaattgctctttggcatagtcaaactataaatgaaaatggcagctttacaaatagtatatttaagtgaactctggaactatggacatgaaaaaaatgatggctgggatttatgatttttgtctggcagcaaacaggtttgtccagaagtctaataattaagcagtcataaaaagtctgaatttagtaaaccagtgtatgatgttattcaaatagtttaccttgggtatgagttcattttataatgtctgatgacattagatctcttaaaactttatgtattttttttagttcaaaggaatagagtcttgaagagaaaaaattatagggcagaaaagataagtgttcaaaattggcaactggactattattatgtctagcatctcattctaaataactaaagcttgatttactcttgctaggattatgtgactactaggtaggagcctcttaaaacactggccctgagcattaaaaaaaa

SEQ ID NO: 275876 - DNA, 574 bp, Homo sapiens
cacccaactatctataaactagccatggccatccccttatgagcgggcgcagtgattataggctttcgctctaagattaaaaatgccctagcccacttcttaccacaaggcacacacacatatatatcttcaaaaattctatttttcagtgtaatctagaccttaatacctggttattgacctgaagatatatactttctaccagcaggttacagattcaaaatgaaacctgaaaagtatttaaactgataatgtgatattaataacattaaagtttatgtgttatctaaattagatatgattgggcacagtggtcaaaatatactgcaaaatttaggtttatggtcaccttttttggaatcagggttgtttgctcttatatctgactgtttgacatttgttctcaattctccatctcagaagaaggcttttttcttttttgatttgtataaattttaggggtatgagtatagttttgttacatggctatattatgtaggtagtgaagtctgggcttttagtgtatccatcaccggaataatgtacattatattcattgaggtaattttttttt

SEQ ID NO: 275877 - DNA, 409 bp, Homo sapiens
ataagtcattctcaaaactcaacctctgtttaacctttaaaagagcatttgagaaagaataataagacgtaattctgccaaggtgcggcctgaccctgagtaaatcattcaacttctgttggatgatttcctcatgtgaaagatgaacagtattgtgctggaagctaaggttccctcctactctaaatgtttaaaattctgtatcagtggactgtgaaaggaaaaatagatggataataccagagttggaaagtgtgagagtttatctgtttacattaaaaacaactataatgatgcagcaacctgtgatgatacccaacggaacaatgcaaaaaaatgtcagttttataatatgtatgtatttctttagccacacaaaataaaattttgtttctagtccttattaaga

SEQ ID NO: 275878 - DNA, 336 bp, Homo sapiens
gagtgctagtgctggtctagacaaagatgtcaagtggcagatgacacctcaaaaagcctattagcaaagtactacactgtgcttacctttcaagaatgatttcctcatgggtgactttgttccacatttttggatttctccatataactgattttaatcatcctgatgaaaatatatctaaactttaatgaatactttcctgcctaccttttagatagtcactgaacagaattccaacagattttcatgaatatcagttattgttataatgtagtggtcccctctgggattcccaagatgggatgaactatttcggacatggcagaagtgtttctc

SEQ ID NO: 275879 - DNA, 758 bp, Homo sapiens
cagcaggtcggggctgggcatgagattgttcacttctgacaagctcccaaatgatgctattataacaccggtcatctaggaactacttcggtaactaggcgatagaccacttccaagtcagaggagaaggcctggagaagccttctctgtggtccagcctcatagaacggcaatcctagggtcagagtgccctacaagctacaggagccccaaggaggaggatagtggcttagaagagaggtgctctcctggaggtatacaccaatttaacaagtgggcgtctcccagtaaaaattttcttaggggaaaggggggagtcaagctgtaggtgttggctccctaaaacaactcaccacctcagaattagctcccaggagcagaaaccaacgtcctgctgccacacttctctagactcaatcagctctgccccacccactccacaaaagctctctgccgcgtcttcctctaggggagaggtgactgcaggctgggagactccccagctgtgactcagaccgacggaatcaaatctgttcccccaggctcagcattcaccagatcctgacctccccctctgaccagccccaacccacctttccaagccccacctctcagtccatgggccacccctcgcccaccccacttccctgtctctggctcatcttcagatgtgtccctagctcccaacccgtccaagcgcagccgagtttctcggtccacatcgcctcgatattcccacagcatctgtggtctctctt

SEQ ID NO: 275880 - DNA, 411 bp, Homo sapiens
aaaaataaataaataaataaaatgattttgaggccactgagaaaagtggggcccctagtaatttgtaacagcctcccactccctatcaagaggaggtggtagaccgagattctaaattgaaaaatgaaggccgggtgcggtggctcacgcctgtaatcccagtgctttgggaggccgaggcgggtggatcacaaaatcaggagatcgagaccatcctggctaacacggtgaaaccctgtctctactaaaaatacgaaaaattagctgggcgtggtggcgggcgcctgtagtcccagctactcgggaggctgaggcaggagaatggtgtgaacccgggaggcggagcatgcagtgagccgagatcgcaccactgcactccagcctgagcgacagagcaagactctgtctcaa

SEQ ID NO: 275881 - DNA, 1737 bp, Homo sapiens
acacacacccctgattccagaaacacaacaggagctgactcaaaagggagtgtctggtgcaggcatgcagggaggaagaatgactctgagcttgaccattcaacttcgaaactttaacatcaatggatcagcacacactggtgtacggtctgctatgcatgcagccctgtgctaggcaaaagaagtatcagaccaggaactgacagcctcactgcaacaggaagagaggcttcacacaataagcgtttcattcaaccaggctggacctgtgcttattgagttgaacatcactgagcacaaaatgcaagccagacaccataagagctgtaaggatgataaagatgtctttctaccctcgagagctctaagtgtggtcaggagagaaacacatgcaaagattatgctggctggaaggaaatgctggaatgaaggtggaagcattctattcatctaaaagcaccggtaattaacgatgctaataaatgtataatccctttgtaaacatctcttcacaaggtcataaagaaggaagactgaatgaaggacgccaggctttcattttagaattaattttgtcattgaatgcactcactgcattatttgatagagtacttttgcatttgaagtagtacatttgccttctaccatctcattaacattgctttcaacagaatcagaaataacacaaaccactgcagggtaattttgaatgctcatttgactatgcagtgacatcaagtggcgagttgaggaatgatcatatgctgtgtgagaactccgtgtcaaaaattccatggagccaggctagacaccacatttggcactttcagctgtttagatttcagagaattaaaaggaaatggtcaccgacctgcctttgatagtacccgtataccccttcccaccataagaaaccagcgttccttagagaaatggctaattctagctctagggcaagaaatgctaagatgtgctcaaaacatctcattataccagcaagccagggagccatcaacgactactggagctgtgtcaaaaggaccaacaaaccaacttgaagaggctcccgctggccaacagtggggcaattagagcatcaataagaataatatctgtaacaaactgaaacgtatcaaatatgtttaaattcatatgtttataattacactcaaaaaacgaagatgcagaccactttaccttgaggatgttacagaatgaaattatcattctgaaaactggtaaataaagagaaggtatcaagtaagcatgtatctggctttttctatatgaaataaaggaagccaaatagtaaacgaggggaagtttctctttactgaaatattgcaggtaattaaagaagaaggagaaacagagaacattatcgttttatggcctctaatggaacaagacatctaggcaatgatgaactatggtcaccaacatcactcaatcagggacaatcagacactgtgggcccctgaaggaagtaaacaccaccacgtaggaaatattctcaccaaaacttcaaaaacttgaatctgatctagtctttagtttcaactactaatttacaggcaatacggggctcagagggatgtggtaaaatgtcacggaaatataatcagcaaaatccagtacagataataagaagacaaatgatccacagatggaaaggaagaatgtaaagttgtgttggtaaagaaattcacagattaataaaagcttaaaaatgtacca

SEQ ID NO: 275882 - DNA, 765 bp, Homo sapiens
gcacgaggctctgtcgcccaggctggagtgcagtggcgcgatctcggctcactgcatcctccgtttcctgggttcaagtgattctcctgccttggcctcccgagtagctgggattacaggtgcatgccaccacgcccggctagttttttatatttttggtagagacggggttttaccatgttggccaggcttgtcttgaactcttgacctcaagtaatctgcctgcctctgcctcccaaagggctgggattacaggtgtgagccaccacacccagcccctgaatatatgtatttcgacagaggactgctgaagaccccaaaccagtgtctggtttcaaggtgcttgtgatctggctctccctttcttacccacctgtacttccttcacatctccaggctctatggtttagcctccttggttttcccactggctcacaaaaaaaataagttcccaagtgctcacctctgtccctgtccgaaactgccttgtgcttgattcccatttatcctatttttgacccaaattcattccctccctgtaggattttcttcaccttatctcctctatgactcttcctgccttccctcatcattctagacctcgctgatcaccttccaccaggaactatacaagacttggggtctgttctgttcaaaattacagaaaccctattttctgcctattagttaacttatgaatacatattaagtaataatgaattgaaataaatgaataataaatgtctcaatttctgttatatgaat

SEQ ID NO: 275883 - DNA, 618 bp, Homo sapiens
caggtgaccatcaggtgatggtcaggcggctgttagtctgtcgctctaaaataataattggtcgcagccggtgctagggaaagacaggctcccagtagatagaaaacacctgaaacgggtgataagcagcttcccggtaagatcttagcagttgggcgagtgtactcaagcatgagcactaacaggcagaatgccagagtttaactggtatatgaccttctagggacattcgactgataagggaagaacgcctcacgtgagcatgtgtacaactcctgcatgcgtacaaacacactgcgcatgctcccctcccaggcgctggcaggccacacactgcgcatgctcccctcccaggtgctggcaggccacacactgcgcatgctcccctcccaggtgctggcaggccactgcgcaagtgtggacagcctacaccaagggaagagtcaggggagaaggaacacaagactccggaagcatgccagcgtataaaaccgtaagtcaaaggtcagactgtccagtgggtgatctctcaagtcgcccgcttggcctcttccaagtgtactttacttcctttcattcctgctctaaaactttttaataaactttcattcctgctct

SEQ ID NO: 275884 - DNA, 2252 bp, Homo sapiens
tagagatgttgtgcaaacagcaggccagaagcttgctccttagaatcctaatatctaaatggtgggtgaagaaagaggaccggtcaaaggacagtgagaaggggctgagaagcagaaggaaacccagcagagagtgagatggagaatgtcatcactcagggagtcctaaaattcactccgggaaaacccccaattctttacatttattcccaggcagactgaaatgctggtaatgcagataaaattttccctattgcttcatcgtagaatccttttactggaaaacaaacaaactgggtgggctatgggaacagatacatgagttctcctctctgctaatttaaccaaccacactgactcccatcacagaactgcacaaacaagccagaaactgaaccctacccggaatcccctggtgtatgaagggagcctagctctggctgactctgcttgtgttcacagacactttgcctcattggttcgtgcctcagcttccaatctggacatggagcacaataacagtgggcccactgctctccgaattcctgcgcgcacttgaagggagtgtctggtgcaggcatgcagggaggaagaatgactctgagcttgaccattcaacttcgaaactttaacatcaatggatcagcacacactggtgtacggtctgctatgcatgcagccctgtgctaggcaaaagaagtatcagaccaggaactgacagcctcactgcaacaggaagagaggcttcacacaataagcgtttcattcaaccaggctggacctgtgcttattgagttgaacatcactgagcacaaaatgcaagccagacaccataagagctgtaaggatgataaagatgtctttctaccctcgagagctctaagtgtggtcaggagagaaacacatgcaaagattatgctggctggaaggaaatgctggaatgaaggtggaagcattctattcatctaaaagcaccggtaattaacgatgctaataaatgtataatccctttgtaaacatctcttcacaaggtcataaagaaggaagactgaatgaaggacgccaggctttcattttagaattaattttgtcattgaatgcactcactgcattatttgatagagtacttttgcatttgaagtagtacatttgccttctaccatctcattaacattgctttcaacagaatcagaaataacacaaaccactgcagggtaattttgaatgctcatttgactatgcagtgacatcaagtggcgagttgaggaatgatcatatgctgtgtgagaactccgtgtcaaaaattccatggagccaggctagacaccacatttggcactttcagctgtttagatttcagagaattaaaaggaaatggtcaccgacctgcctttgatagtacccgtataccccttcccaccataagaaaccagcgttccttagagaaatggctaattctagctctagggcaagaaatgctaagatgtgctcaaaacatctcattataccagcaagccagggagccatcaacgactactggagctgtgtcaaaaggaccaacaaaccaacttgaagaggctcccgctggccaacagtggggcaattagagcatcaataagaataatatctgtaacaaactgaaacgtatcaaatatgtttaaattcatatgtttataattacactcaaaaaacgaagatgcagaccactttaccttgaggatgttacagaatgaaattatcattctgaaaactggtaaataaagagaaggtatcaagtaagcatgtatctggctttttctatatgaaataaaggaagccaaatagtaaacgaggggaagtttctctttactgaaatattgcaggtaattaaagaagaaggagaaacagagaacattatcgttttatggcctctaatggaacaagacatctaggcaatgatgaactatggtcaccaacatcactcaatcagggacaatcagacactgtgggcccctgaaggaagtaaacaccaccacgtaggaaatattctcaccaaaacttcaaaaacttgaatctgatctagtctttagtttcaactactaatttacaggcaatacggggctcagagggatgtggtaaaatgtcacggaaatataatcagcaaaatccagtacagataataagaagacaaatgatccacagatggaaaggaagaatgtaaagttgtgttggtaaagaaattcacagattaataaaagcttaaaaatgtacca

SEQ ID NO: 275885 - DNA, 1128 bp, Homo sapiens
tagagatgttgtgcaaacagcaggccagaagcttgctccttagaatcctaatatctaaatggtgggtgaagaaagaggaccggtcaaaggacagtgagaaggggctgagaagcagaaggaaacccagcagagagtgagatggagaatgtcatcactcagggagtcctaaaattcactccgggaaaacccccaattctttacatttattcccaggcagactgaaatgctggtaatgcagataaaattttccctattgcttcatcgtagaatccttttactggaaaacaaacaaactgggtgggctatgggaacagatacatgagttctcctctctgctaatttaaccaaccacactgactcccatcacagaactgcacaaacaagccagaaactgaaccctacccggaatcccctggtgtatgaagggagcctagctctggctgactctgcttgtgttcacagacactttgcctcattggttcgtgcctcagcttccaatctggacatggagcacaataacagtgggcccactgctctccgaattcctgcgcgcacttgaagggagtgtctggtgcaggcatgcagggaggaagaatgactctgagcttgaccattcaacttcgaaactttaacatcaatggatcagcacacactggtgtacggtctgctatgcatgcagccctgtgctaggcaaaagaagtatcagaccaggaactgacagcctcactgcaacaggaagagaggcttcacacaataagcgtttcattcaaccaggctggacctgtgcttattgagttgaacatcactgagcacaaaatgcaagccagacaccataagagctgtaaggatgataaagatgtctttctaccctcgagagctctaagtgtggtcaggagagaaacacatgcaaagattatgctggctggaaggaaatgctggaatgaaggtggaaggtacatccagaatgttctgggggtgaggaatagcgaatgatgggttctgacttagaacatgaagggaaggtattaagaaagaggtgatattaagcatttattgagcatctctactttttttgtgtatgtgaccttgtttggaaatacaatatctcttcttgatgctggcaaaaaa

SEQ ID NO: 275886 - DNA, 2364 bp, Homo sapiens
caggtgaccatcaggtgatggtcaggcggctgttagtctgtcgctctaaaataataattggtcgcagccggtgctagggaaagacaggctcccagtagatagaaaacacctgaaacgggtgataagcagcttcccggtaagatcttagcagttgggcgagtgtactcaagcatgagcactaacaggcagaatgccagagtttaactggtatatgaccttctagggacattcgactgataagggaagaacgcctcacgtgagcatgtgtacaactcctgcatgcgtacaaacacactgcgcatgctcccctcccaggcgctggcaggccacacactgcgcatgctcccctcccaggtgctggcaggccacacactgcgcatgctcccctcccaggtgctggcaggccactgcgcaagtgtggacagcctacaccaagggaagagtcaggggagaaggaacacaagactccggaagcatgccagcgtataaaaccacttgggacagaactggagtcagagataccaatttgggaaggagaaggatctagtgacagaaacttgggagtgcccagtggacactttgcctcattggttcgtgcctcagcttccaatctggacatggagcacaataacagtgggcccactgctctccgaattcctgcgcgcacttgaagggagtgtctggtgcaggcatgcagggaggaagaatgactctgagcttgaccattcaacttcgaaactttaacatcaatggatcagcacacactggtgtacggtctgctatgcatgcagccctgtgctaggcaaaagaagtatcagaccaggaactgacagcctcactgcaacaggaagagaggcttcacacaataagcgtttcattcaaccaggctggacctgtgcttattgagttgaacatcactgagcacaaaatgcaagccagacaccataagagctgtaaggatgataaagatgtctttctaccctcgagagctctaagtgtggtcaggagagaaacacatgcaaagattatgctggctggaaggaaatgctggaatgaaggtggaagcattctattcatctaaaagcaccggtaattaacgatgctaataaatgtataatccctttgtaaacatctcttcacaaggtcataaagaaggaagactgaatgaaggacgccaggctttcattttagaattaattttgtcattgaatgcactcactgcattatttgatagagtacttttgcatttgaagtagtacatttgccttctaccatctcattaacattgctttcaacagaatcagaaataacacaaaccactgcagggtaattttgaatgctcatttgactatgcagtgacatcaagtggcgagttgaggaatgatcatatgctgtgtgagaactccgtgtcaaaaattccatggagccaggctagacaccacatttggcactttcagctgtttagatttcagagaattaaaaggaaatggtcaccgacctgcctttgatagtacccgtataccccttcccaccataagaaaccagcgttccttagagaaatggctaattctagctctagggcaagaaatgctaagatgtgctcaaaacatctcattataccagcaagccagggagccatcaacgactactggagctgtgtcaaaaggaccaacaaaccaacttgaagaggctcccgctggccaacagtggggcaattagagcatcaataagaataatatctgtaacaaactgaaacgtatcaaatatgtttaaattcatatgtttataattacactcaaaaaacgaagatgcagaccactttaccttgaggatgttacagaatgaaattatcattctgaaaactggtaaataaagagaaggtatcaagtaagcatgtatctggctttttctatatgaaataaaggaagccaaatagtaaacgaggggaagtttctctttactgaaatattgcaggtaattaaagaagaaggagaaacagagaacattatcgttttatggcctctaatggaacaagacatctaggcaatgatgaactatggtcaccaacatcactcaatcagggacaatcagacactgtgggcccctgaaggaagtaaacaccaccacgtaggaaatattctcaccaaaacttcaaaaacttgaatctgatctagtctttagtttcaactactaatttacaggcaatacggggctcagagggatgtggtaaaatgtcacggaaatataatcagcaaaatccagtacagataataagaagacaaatgatccacagatggaaaggaagaatgtaaagttgtgttggtaaagaaattcacagattaataaaagcttaaaaatgtacca

SEQ ID NO: 275887 - DNA, 2283 bp, Homo sapiens
caggtgaccatcaggtgatggtcaggcggctgttagtctgtcgctctaaaataataattggtcgcagccggtgctagggaaagacaggctcccagtagatagaaaacacctgaaacgggtgataagcagcttcccggtaagatcttagcagttgggcgagtgtactcaagcatgagcactaacaggcagaatgccagagtttaactggtatatgaccttctagggacattcgactgataagggaagaacgcctcacgtgagcatgtgtacaactcctgcatgcgtacaaacacactgcgcatgctcccctcccaggcgctggcaggccacacactgcgcatgctcccctcccaggtgctggcaggccacacactgcgcatgctcccctcccaggtgctggcaggccactgcgcaagtgtggacagcctacaccaagggaagagtcaggggagaaggaacacaagactccggaagcatgccagcgtataaaaccacactttgcctcattggttcgtgcctcagcttccaatctggacatggagcacaataacagtgggcccactgctctccgaattcctgcgcgcacttgaagggagtgtctggtgcaggcatgcagggaggaagaatgactctgagcttgaccattcaacttcgaaactttaacatcaatggatcagcacacactggtgtacggtctgctatgcatgcagccctgtgctaggcaaaagaagtatcagaccaggaactgacagcctcactgcaacaggaagagaggcttcacacaataagcgtttcattcaaccaggctggacctgtgcttattgagttgaacatcactgagcacaaaatgcaagccagacaccataagagctgtaaggatgataaagatgtctttctaccctcgagagctctaagtgtggtcaggagagaaacacatgcaaagattatgctggctggaaggaaatgctggaatgaaggtggaagcattctattcatctaaaagcaccggtaattaacgatgctaataaatgtataatccctttgtaaacatctcttcacaaggtcataaagaaggaagactgaatgaaggacgccaggctttcattttagaattaattttgtcattgaatgcactcactgcattatttgatagagtacttttgcatttgaagtagtacatttgccttctaccatctcattaacattgctttcaacagaatcagaaataacacaaaccactgcagggtaattttgaatgctcatttgactatgcagtgacatcaagtggcgagttgaggaatgatcatatgctgtgtgagaactccgtgtcaaaaattccatggagccaggctagacaccacatttggcactttcagctgtttagatttcagagaattaaaaggaaatggtcaccgacctgcctttgatagtacccgtataccccttcccaccataagaaaccagcgttccttagagaaatggctaattctagctctagggcaagaaatgctaagatgtgctcaaaacatctcattataccagcaagccagggagccatcaacgactactggagctgtgtcaaaaggaccaacaaaccaacttgaagaggctcccgctggccaacagtggggcaattagagcatcaataagaataatatctgtaacaaactgaaacgtatcaaatatgtttaaattcatatgtttataattacactcaaaaaacgaagatgcagaccactttaccttgaggatgttacagaatgaaattatcattctgaaaactggtaaataaagagaaggtatcaagtaagcatgtatctggctttttctatatgaaataaaggaagccaaatagtaaacgaggggaagtttctctttactgaaatattgcaggtaattaaagaagaaggagaaacagagaacattatcgttttatggcctctaatggaacaagacatctaggcaatgatgaactatggtcaccaacatcactcaatcagggacaatcagacactgtgggcccctgaaggaagtaaacaccaccacgtaggaaatattctcaccaaaacttcaaaaacttgaatctgatctagtctttagtttcaactactaatttacaggcaatacggggctcagagggatgtggtaaaatgtcacggaaatataatcagcaaaatccagtacagataataagaagacaaatgatccacagatggaaaggaagaatgtaaagttgtgttggtaaagaaattcacagattaataaaagcttaaaaatgtacca

SEQ ID NO: 275888 - DNA, 1658 bp, Homo sapiens
caggtgaccatcaggtgatggtcaggcggctgttagtctgtcgctctaaaataataattggtcgcagccggtgctagggaaagacaggctcccagtagatagaaaacacctgaaacgggtgataagcagcttcccggtaagatcttagcagttgggcgagtgtactcaagcatgagcactaacaggcagaatgccagagtttaactggtatatgaccttctagggacattcgactgataagggaagaacgcctcacgtgagcatgtgtacaactcctgcatgcgtacaaacacactgcgcatgctcccctcccaggcgctggcaggccacacactgcgcatgctcccctcccaggtgctggcaggccacacactgcgcatgctcccctcccaggtgctggcaggccactgcgcaagtgtggacagcctacaccaagggaagagtcaggggagaaggaacacaagactccggaagcatgccagcgtataaaaccacactttgcctcattggttcgtgcctcagcttccaatctggacatggagcacaataacagtgggcccactgctctccgaattcctgcgcgcacttgaagaatcagaaataacacaaaccactgcagggtaattttgaatgctcatttgactatgcagtgacatcaagtggcgagttgaggaatgatcatatgctgtgtgagaactccgtgtcaaaaattccatggagccaggctagacaccacatttggcactttcagctgtttagatttcagagaattaaaaggaaatggtcaccgacctgcctttgatagtacccgtataccccttcccaccataagaaaccagcgttccttagagaaatggctaattctagctctagggcaagaaatgctaagatgtgctcaaaacatctcattataccagcaagccagggagccatcaacgactactggagctgtgtcaaaaggaccaacaaaccaacttgaagaggctcccgctggccaacagtggggcaattagagcatcaataagaataatatctgtaacaaactgaaacgtatcaaatatgtttaaattcatatgtttataattacactcaaaaaacgaagatgcagaccactttaccttgaggatgttacagaatgaaattatcattctgaaaactggtaaataaagagaaggtatcaagtaagcatgtatctggctttttctatatgaaataaaggaagccaaatagtaaacgaggggaagtttctctttactgaaatattgcaggtaattaaagaagaaggagaaacagagaacattatcgttttatggcctctaatggaacaagacatctaggcaatgatgaactatggtcaccaacatcactcaatcagggacaatcagacactgtgggcccctgaaggaagtaaacaccaccacgtaggaaatattctcaccaaaacttcaaaaacttgaatctgatctagtctttagtttcaactactaatttacaggcaatacggggctcagagggatgtggtaaaatgtcacggaaatataatcagcaaaatccagtacagataataagaagacaaatgatccacagatggaaaggaagaatgtaaagttgtgttggtaaagaaattcacagattaataaaagcttaaaaatgtacca

SEQ ID NO: 275889 - DNA, 1576 bp, Homo sapiens
caggtgaccatcaggtgatggtcaggcggctgttagtctgtcgctctaaaataataattggtcgcagccggtgctagggaaagacaggctcccagtagatagaaaacacctgaaacgggtgataagcagcttcccggtaagatcttagcagttgggcgagtgtactcaagcatgagcactaacaggcagaatgccagagtttaactggtatatgaccttctagggacattcgactgataagggaagaacgcctcacgtgagcatgtgtacaactcctgcatgcgtacaaacacactgcgcatgctcccctcccaggcgctggcaggccacacactgcgcatgctcccctcccaggtgctggcaggccacacactgcgcatgctcccctcccaggtgctggcaggccactgcgcaagtgtggacagcctacaccaagggaagagtcaggggagaaggaacacaagactccggaagcatgccagcgtataaaaccttctctctctgtgacctgtaatttgagggtgacaaaaaagaacttcccatgaaagaacaaacaaacatgacaccacctgggaccattgaagttggatttcccctggtaaggtctgatgttataccctttaatcatctttgttgggttctgccaagcctccccaaacttcccacacttctcattagtggatcagtgggtatccttgctagagactgaccgattgtgggtacaatggcacggttgttcttgctgaccacacatctgtttatacagtaccatgattgtttcttgagcaaacaaaagcaaagacagtgcaacgaaaacacaaaaagttttatcttctagtaagaactatgagaagtattttcaggaaagattgactctgcaattctgccacaaaactcagtgatgtgattatgcctcaccaacaagcaatggaaaacttttatgggaaaaagtgtgtagtatcaatttccaacttttggtcaactgaactgaaaagaatcaatggatgtatttatctgaacaggatttaatttgaatgcgcaactagccacagattacagctcaaaaaaagtgtatgtacttaaaaggaagcttatgtgaatttttttgagcctggtgaacattatgtgtgctgtacaatatataaaataacatcatcattacatattagaaataaaatgtgagaaatcagatgcctattaagacacaaaaattgatgtaaaactatgatattgggttttggataatagcccagatgtttcagaaaaggaattaatgagttttgacatatttccagataattaaaattagccactatttcccccaggttgttggggtccaagcatccttgttgccatggataatgtattttattccttaacaaagtggagtcaggtggcttgaatcaaaatatgacccagaaattattatgaaaatgtcacataagcaagttactttctttctcctaatgatcacacatctgagtctttactcagaattaggatataatggctcttcctctcgctttttgtaaaccttgaaggattttaaatagtaaatgttttgaaaagttgaaat

SEQ ID NO: 275890 - DNA, 1124 bp, Homo sapiens
caggtgaccatcaggtgatggtcaggcggctgttagtctgtcgctctaaaataataattggtcgcagccggtgctagggaaagacaggctcccagtagatagaaaacacctgaaacgggtgataagcagcttcccggtaagatcttagcagttgggcgagtgtactcaagcatgagcactaacaggcagaatgccagagtttaactggtatatgaccttctagggacattcgactgataagggaagaacgcctcacgtgagcatgtgtacaactcctgcatgcgtacaaacacactgcgcatgctcccctcccaggcgctggcaggccacacactgcgcatgctcccctcccaggtgctggcaggccacacactgcgcatgctcccctcccaggtgctggcaggccactgcgcaagtgtggacagcctacaccaagggaagagtcaggggagaaggaacacaagactccggaagcatgccagcgtataaaaccttctctctctgtgacctgtaatttgagggtgacaaaaaagaacttcccatgaaagaacaaacaaacatgacaccacctgggaccattgaagttggatttcccctggtaaggtctgatgttataccctttaatcatctttgttgggttctgccaagcctccccaaacttcccacacttctcattagtggatcagtgggtatccttgctagagactgaccgattgtgggtacaatggcacggttgttcttgctgaccacacatctgtttatacagtaccatgattgtttcttgagcaaacaaaagcaaagacagtgtagagacggggtttcactatgttggccaagctggtctcagactcctgacctcgtgatctgcccgccttggcctcccaaagtgctgggattacaggattttcttcaccttatctcctctatgactcttcctgccttccctcatcattctagacctcgctgatcaccttccaccaggaactatacaagacttggggtctgttctgttcaaaattacagaaaccctattttctgcctattagttaacttatgaatacatattaagtaataatgaattgaaataaatgaataataaatgtctcaatttctgttatatgaat

SEQ ID NO: 275891 - DNA, 164 bp, Homo sapiens
tagagactgaccgattgtgggtacaatggcacggttgttcttgctgaccacacatctgtttatacagtaccatgattgtttcttgagcaaacaaaagcaaagacagtggtaagttgtttccctactatcagctcatgacctaccataacacttaggacgtttca

SEQ ID NO: 275892 - DNA, 302 bp, Homo sapiens
ccttggctaactacagtttttcacatggaaatgaaacttacagtacacacttaacgtatcacagaatttttttctggatttcctgtcctgaagcatgaagtgtactagaaaccaattcttcctgcgctacttgtggaatctttcttactggatcataatcttactttactttatacaatagatgcttaatcagtgcctttaataggaagttggaaactccaaatccaatcaacaaggctttgattctgcctcctaagtactacccagatcacagacaatccaaatatcagaactaggggtct

SEQ ID NO: 275893 - DNA, 189 bp, Homo sapiens
gttgcggtgagccgagatcctgccatcacactccagcctgggcaacaagagcaaaactccatctcaaaaacaaaacaaaatgaacccatcagtctgttaactcatctacagcataaatgtctttactactcgatggttttctactctgtcaacctcatgtctgtccccttctctgggtctacttatttt

SEQ ID NO: 275894 - DNA, 512 bp, Homo sapiens
agatgaaaaatattaaggtagttgaaaagggtcaagtgttatgaaaatgacttggctttgtcttcaggattcttttaattaggacctgtgataagtcatctgaatgtcctttgtaaaatgttaaggaaaagtataatatatatggtcatagtttccatgtgtgtaaagacgcgagactgcttagctttcccagtttgcttccattgttaaaatactgattctgactagagttgaaatcttgatgtgtcctatggattgaatcgtatctcaaggccttggagtagatgagacctttgaaagagcccttgagaagatgataattctcccaagattatctttgaaaatacgtgggtgttatttaagtgaggttgtaatctcgtagagtgtaattgtggagtaaatgaaaattaggctgggcgcaatgctgtagtcccaactacttgggaggttcacttgagccctggagtttgagtccagcctgggcaacatagttaaacccctgtctctttaaa

SEQ ID NO: 275895 - DNA, 655 bp, Homo sapiens
ttcaggatggagagaggttgggagggagggaaagaggtcaaagaggcagagaaaaaagaagaggtagacattgagaatgagtccacaagtacatgagagagaaggatagaaacaaagattctctctgagactacgtgaccacttggagaccctgcccaggcaggaggcaaatgaggtcattaaatccatctgcgcagatgggaggctctctggggaaagttatatgcaaagtgtcatgatgcaatgaggtgaaatctacttgcgttagttcaggtggggactcaagcaggaactgcactgtgctctttggaaagatagattatctcctggatggggaagacactcactctgttgggctcttcctatcagtttgcagaaaggaaagctggccaaggtcacagagcacatgaaggaacgaactggcaactgtattgaactcagttctctcacttgttcgtatgctaaaatctgcttcccaggtccttcaaatttggtgcaaaaccaccatgcgatctattccctactcaggattccaagcctcccagaaggtggtctagcttccctgagacatgctttttgttttcatcattgcctactaaagtcaaagtgaccagtatgtgcagagacttatgttttctcaaaagacacttccaca

SEQ ID NO: 275896 - DNA, 553 bp, Homo sapiens
acaggcatagtttcagttaggtaagaagaataagttctacagatacctgtagaacattatgtagaacaaatgctgtacaacattgtgcctgtaggtaacattactctactatatacttacaaatttgataagaagatagatctcatgttatttgttcttgctgcagttaaagaacaaagaaatagcaaaatgcatgtgttgatatttgaattcagaacttagatcactttccaatctttgtgtgttactttcagagtcaattactggctaggtgtgatggcttatgcctgtaattccagcattttgggagattgaggcaggtgggaggattgcttgagcccagaagtttgagacgagtctggccagcatagtgagactctctatctaaaaaaataaaaaaggaaaattagtggggcatgatggaacatgcctacagtcccacctactcaggaggctgaggcagaaagatcccttgagcccaggagtttgggactgaagtgagctgggatctcactattgcactgtagcctgggcaacaggtgagaccctatca

SEQ ID NO: 275897 - DNA, 354 bp, Homo sapiens
ctcatggccagtaaataatgaaaatataggattactaatcaaagaaatgcaaattaaaatcagagctgggcatggtggctcacgcctgtaatcccagcagtttgggaggcccaggcgggcagatcacctgaggttgggagtttgagaccagcctgaccaacatggagaaaccctgtctctactaaaaatacaaaattaggcgggcatgatggtgcatgcctgtaatcccaactactcgggatgctgaggcaggagaaccgcttgaacccgggaggcggaggttgtggggagctgagatcgtgccattgcactccagcctgggcaacaggagtgaaactccatctcaaaaaaaaa

SEQ ID NO: 275898 - DNA, 794 bp, Homo sapiens
attccattttgaggaatggggaaggctattctaaagaagaaaaaaaatgggacaggttttctgggtagatctgcaagtctggctttaagagcacaaggaggaaaagtaacaaaagggctggactactgtaaaagttacaaatacgtagttagaccaatagatctatatagtcaggtttttgtcatgtaatttattaactattacagaaacacaactaagaatatcaagtatttctctggctcttgatagaaaaaaaaaatcagctgacttaatcctttgctgtcaaaagagttggcgtttcctgttctgggtgctactgccaaacgttctggtgcttagaggtgggatgcacgacgtcaaccaccgacttatcaatgcagccggctgtgtgtcacaattggccgttaccttaagcactgagccacacgggattagttcagccatttcaagaggtacatttaacgtcggcagttctgctttactaaaatgcagtagaggtactcttctgtcccttccgtttatagttctctgagagagttatattttttggttttgttttgtgttttcttttgaattttatatcttgtatttatccctgaacatgttttgtacttttttttttttaagaaaaggaattattttgtgtatatatagacacttgcatgatatactgtagtcaatgttcggttcctcgaaaggtcttgctgctgtcaggtgttatacactccatccatcataactgtatgaaacacatttcatatgtaaataaacgtgggacatttgaaaaaaatatt

SEQ ID NO: 275899 - DNA, 807 bp, Homo sapiens
gttcttaagtaggctcttttttctctaaattacagaatagcaaactaactcctaagcaagatgagtcagtgtctatgaccttgcctctttcttcctttttagtatcctcaccaaccttccctctgttgacttttgtaatccaggaatttggaactacttatgacttagtgccttggcataatcacatgccatagatgaacatgttcaagactcagttcaaatttaactttctgtgaagccctacctgacttccctaggcaggtattttctccatgcctatagtatattgaaactttttctgttaaaataacataacatttcaattacacacacacaacctgtctcttccactgaacttctctctccccctttgtattctcagtgtctagctacacataataggactttgataaatatttttgaatgaaggtaatagaaaacccgaacttctctatatttgtgtactttcacaaacaaaggcttagaattccacatgaaagtccacatgaggtaagtgtgcattcatgagcatgtgtgcactctgggcaaaccaacagaagataaacagcaaggaagagcagttgttttgtgaaaaataatcatctgttagctgtaaatcagaaatattggccaaatcagaattcttgtttctaaaatgaggcttctaaaattttcacataactgccaaactcttatttgtaattcttaaatatgccctaaagatcatctttctcttttatagacatttagtgtatacagtccacataaatacatatactgattacctacagacaataatgagacttc

SEQ ID NO: 275900 - DNA, 440 bp, Homo sapiens
actacctatcagggcagctcccccagtgccgagaccagctcggtcctggagaccctaacccagcggtgctagaggaattaaagatacacacagaaatatagaggtgtggagtgggaaatcaggcgtctcacagccttcagagctgagagcctccaacagagatttacccacgtgtttattcacagcaagccagtgataagcacagtttctacagattatagattaaaagtaccccttagggaaacaaagggatgggccaaaataaaggggtgggtttggctagttatctgcagcaggggcatgtccttaagtcacagatggctcatgctattgtttgtggtttaagaacgcctttaagcggttttctgccctgggtgggccaggtgttccttgcccttattccggtaaacccacaacctcccagcgtgggcatcatggcc

SEQ ID NO: 275901 - DNA, 151 bp, Homo sapiens
ccacaggctcctaaagtgctgggattataggcgtgagccaccacacctggcctggaatagcatttgctttagaatattctctgtctctctctctctctctggcctggaatagcatttgctttagaatattctctctctctttttttatttt

SEQ ID NO: 275902 - DNA, 304 bp, Homo sapiens
ctactcaggaggctgaggcaggagaatcacttgagtgcaggaggtggcggttgcagtgagccgagatcgcgccactgcactctagcctgggttacagagcgagactctgtctcaaaaaagaaagaaagaaaaaaaaaagaagtaaatgaggggactcgagtctacttgatggttagtattaattgtaataatataaagaatctcatggctgagaaccatagtttgactaggaaatctaaatggcttcaaaaaaccctccccatggatctttgctttgaaaagagaaatttccaaacatgcgaat

SEQ ID NO: 275903 - DNA, 472 bp, Homo sapiens
cgaggatgagttgtcagctctgaaacagtcctgtgctcccaggagaaatccctggctcctcatttcttccgtcttctacttcctcttccatcccacccctggcctcagcctcaccagccttgctgctttcccgctgggttccctccctgcctccagctgtgtttcactccacataaatatgaccaccctccttccctgattaaaaccattcatggatctgggcgccgtggctcatgcctataatcccagcactttgggagccgatgtgggtggatcacctgagtcaggagttttaagaccagcctggccaacatggtgaaaccccgtctctactaaaaatacaaaaaaaatttagccgggcatggtggcacgtgcctgtaatcccagctatttgggaggctgagacaggagaatcacttgaaccttgaagcgaggttgcagtgagctgagatggcgccactgcactcctgcc

SEQ ID NO: 275904 - DNA, 437 bp, Homo sapiens
tgcattttatgcaaggttaaagaagttttcagtgctggctagtgaaatgggggttagatgccctgtctatactacatgtttaatcaatgtaatcttaaaatgagatgaccttgtagccaagcattttttctttcctttataagcaatattaactatattaaatcaagaaagctaatagtttttcgtatttctcaataaccattaagttcaaacattggaagagtttaatattttacatgaaaaatccacaggcaataattttaagtgacttagaaaatatttaccgtattttaaccttaaatgactgtgtatgtgtgtgtgtgcctatgtatgtgtatgtatgtttataatctagtagttctcaaggagtattggagaaagaatatgtgatcacatgtagtttataaaagctctcgtgttttttgaaagacaaattt

SEQ ID NO: 275905 - DNA, 1503 bp, Homo sapiens
aaagaaacaaaattgggatgttcgggttggagagttagcaggggcatctccaggagggtcctgccccccaccccaaagccggcctcagggagttccaggcgttcccacactccccaggcaggacggtggacgcagcgcagacaggaagctccccgagataacgctgcggccgggcggcctgatttgctgggctgtctgatggcccgggccgaggcttctccctgcgcctgggactgcggccgcctctctaaatagcagccatgaggcgcctgggggcagtgtcctcgcgggccagcgacgggcaggacgccccgttcgcctagcgcgtgctcaggagttggtgtcctgcctgcgctcaggatgagggggaatctggccctggtgggcgttctaatcagcctggccttcctgtcactgctgccatctggacatcctcagccggctggcgatgacgcctgctctgtgcagatcctcgtccctggcctcaaaggggatgcgggagagaagggagacaaaggcgcccccggacggcctggaagagtcggccccacgggagaaaaaggagacatgggggacaaaggacagaaaggcagtgtgggtcgtcatggaaaaattggtcccattggctctaaaggtgagaaaggagattccggtgacataggaccccctggtcctaatggagaaccaggcctcccatgtgagtgcagccagctgcgcaaggccatcggggagatggacaaccaggtctctcagctgaccagcgagctcaagttcatcaagaatgctgtcgccggtgtgcgcgagacggagagcaagatctacctgctggtgaaggaggagaagcgctacgcggacgcccagctgtcctgccagggccgcgggggcacgctgagcatgcccaaggacgaggctgccaatggcctgatggccgcatacctggcgcaagccggctggcccgtgtcttcatcggcatcaacgacctggagaaggagggcgccttcgtgtactctgaccactcccccatgcggaccttcaacaagtggcgcagcggtgagcccaacaatgcctacgacgaggaggactgcgtggagatggtggcctcgggcggctggaacgacgtggcctgccacaccaccatgtacttcatgtgtgagtttgacaaggagaacatgtgagcctcaggctggggctgcccattgggggccccacatgtccctgcagggttggcagggacagagcccagaccatggtgccagccagggagctgtccctctgtgaagggtggaggctcactgagtagagggctgttgtctaaactgagaaaatggcctatgcttaagaggaaaatgaaagtgttcctggggtgctgtctctgaagaagcagagtttcattacctgtattgtagccccaatgtcattatgtaattattacccagaattgctcttccataaagcttgtgcctttgtccaagctatacaataaaatctttaagtagtgcagta

SEQ ID NO: 275906 - DNA, 1727 bp, Homo sapiens
  misc_feature (1526)..(1526): n is a, c, g, or t
aaagaaacaaaattgggatgttcgggttggagagttagcaggggcatctccaggagggtcctgccccccaccccaaagccggcctcagggagttccaggcgttcccacactccccaggcaggacggtggacgcagcgcagacaggaagctccccgagataacgctgcggccgggcggcctgatttgctgggctgtctgatggcccgggccgaggcttctccctgcgcctgggactgcggccgcctctctaaatagcagccatgaggcgcctgggggcagtgtcctcgcgggccagcgacgggcaggacgccccgttcgcctagcgcgtgctcaggagttggtgtcctgcctgcgctcaggatgagggggaatctggccctggtgggcgttctaatcagcctggccttcctgtcactgctgccatctggacatcctcagccggctggcgatgacgcctgctctgtgcagatcctcgtccctggcctcaaaggggatgcgggagagaagggagacaaaggcgcccccggacggcctggaagagtcggccccacgggagaaaaaggagacatgggggacaaaggacagaaaggcagtgtgggtcgtcatggaaaaattggtcccattggctctaaaggtgagaaaggagattccggtgacataggaccccctggtcctaatggagaaccaggcctcccatgtgagtgcagccagctgcgcaaggccatcggggagatggacaaccaggtctctcagctgaccagcgagctcaagttcatcaagaatgctgtcgccggtgtgcgcgagacggagagcaagatctacctgctggtgaaggaggagaagcgctacgcggacgcccagctgtcctgccagggccgcgggggcacgctgagcatgcccaaggacgaggctgccaatggcctgatggccgcatacctggcgcaagccggctggcccgtgtcttcatcggcatcaacgacctggagaaggagggcgccttcgtgtactctgaccactcccccatgcggaccttcaacaagtggcgcagcggtgagcccaacaatgcctacgacgaggaggactgcgtggagatggtggcctcgggcggctggaacgacgtggcctgccacaccaccatgtacttcatgtgtgagtttgacaaggagaacatgtgagcctcaggctggggctgcccattgggggccccacatgtccctgcagggttggcagggacagagcccagaccatggtgccagccagggagctgtccctctgtgaagggtggaggctcactgagtagagggctgttgtctaaactgagaaaatggcctatgcttaagaggaaaatgaaagtgttcctggggtgctgtctctgaagaagcagagtttcattacctgtattgtagccccaatgtcattatgtaattattacccagaattgctcttccataaagcttgtgcctttgtccaagctatacaataaaatctttaagtagtgcagtaaacaaaaacaaaaaaaaaaaaanaaacccggggcaaaacacagagcgcgacaacaagcgcagaaacgcgcacatggggcaatgcgggtcctgaaccaagattgtgtccaaggggaaaccgcggcccaaaaggagcgcaaaatcgaaagcaggcaccgtagacccgcgaagcacaggcacccaaagacaacggcaaggaacacgaaagaggccaacaccacaaaa

SEQ ID NO: 275907 - DNA, 1431 bp, Homo sapiens
aaagaaacaaaattgggatgttcgggttggagagttagcaggggcatctccaggagggtcctgccccccaccccaaagccggcctcagggagttccaggcgttcccacactccccaggcaggacggtggacgcagcgcagacaggaagctccccgagataacgctgcggccgggcggcctgatttgctgggctgtctgatggcccgggccgaggcttctccctgcgcctgggactgcggccgcctctctaaatagcagccatgaggcgcctgggggcagtgtcctcgcgggccagcgacgggcaggacgccccgttcgcctagcgcgtgctcaggagttggtgtcctgcctgcgctcaggatgagggggaatctggccctggtgggcgttctaatcagcctggccttcctgtcactgctgccatctggacatcctcagccggctggcgatgacgcctgctctgtgcagatcctcgtccctggcctcaaaggagacatgggggacaaaggacagaaaggcagtgtgggtcgtcatggaaaaattggtcccattggctctaaaggtgagaaaggagattccggtgacataggaccccctggtcctaatggagaaccaggcctcccatgtgagtgcagccagctgcgcaaggccatcggggagatggacaaccaggtctctcagctgaccagcgagctcaagttcatcaagaatgctgtcgccggtgtgcgcgagacggagagcaagatctacctgctggtgaaggaggagaagcgctacgcggacgcccagctgtcctgccagggccgcgggggcacgctgagcatgcccaaggacgaggctgccaatggcctgatggccgcatacctggcgcaagccggctggcccgtgtcttcatcggcatcaacgacctggagaaggagggcgccttcgtgtactctgaccactcccccatgcggaccttcaacaagtggcgcagcggtgagcccaacaatgcctacgacgaggaggactgcgtggagatggtggcctcgggcggctggaacgacgtggcctgccacaccaccatgtacttcatgtgtgagtttgacaaggagaacatgtgagcctcaggctggggctgcccattgggggccccacatgtccctgcagggttggcagggacagagcccagaccatggtgccagccagggagctgtccctctgtgaagggtggaggctcactgagtagagggctgttgtctaaactgagaaaatggcctatgcttaagaggaaaatgaaagtgttcctggggtgctgtctctgaagaagcagagtttcattacctgtattgtagccccaatgtcattatgtaattattacccagaattgctcttccataaagcttgtgcctttgtccaagctatacaataaaatctttaagtagtgcagta

SEQ ID NO: 275908 - DNA, 1393 bp, Homo sapiens
aggctgtgcagctctggctgggggcttttttccggctgtgttagccctgctgtggaaagcaagtggactgtcctgcagcccagacaagcccagtggcctttgtgcttttaattgtgataaatgtacctgctttagaaaatgtttaattatgttggaagcaacttaaactgttggatgcctacggctctctcagaagtttggtgaaagtggctttggccctgactttgtggtagcgtgtgtgggtttgtgagtggaaccttcagctttaggttggaaacggtggctgtggagagctggacttttggctgtggaggtcacgtccctgcccaatgtggtgggtgcctccgagtccctacggttgtcttccctgcgccctgccagggatgcgggagagaagggagacaaaggcgcccccggacggcctggaagagtcggccccacgggagaaaaaggagacatgggggacaaaggacagaaaggcagtgtgggtcgtcatggaaaaattggtcccattggctctaaaggtgagaaaggagattccggtgacataggaccccctggtcctaatggagaaccaggcctcccatgtgagtgcagccagctgcgcaaggccatcggggagatggacaaccaggtctctcagctgaccagcgagctcaagttcatcaagaatgctgtcgccggtgtgcgcgagacggagagcaagatctacctgctggtgaaggaggagaagcgctacgcggacgcccagctgtcctgccagggccgcgggggcacgctgagcatgcccaaggacgaggctgccaatggcctgatggccgcatacctggcgcaagccggctggcccgtgtcttcatcggcatcaacgacctggagaaggagggcgccttcgtgtactctgaccactcccccatgcggaccttcaacaagtggcgcagcggtgagcccaacaatgcctacgacgaggaggactgcgtggagatggtggcctcgggcggctggaacgacgtggcctgccacaccaccatgtacttcatgtgtgagtttgacaaggagaacatgtgagcctcaggctggggctgcccattgggggccccacatgtccctgcagggttggcagggacagagcccagaccatggtgccagccagggagctgtccctctgtgaagggtggaggctcactgagtagagggctgttgtctaaactgagaaaatggcctatgcttaagaggaaaatgaaagtgttcctggggtgctgtctctgaagaagcagagtttcattacctgtattgtagccccaatgtcattatgtaattattacccagaattgctcttccataaagcttgtgcctttgtccaagctatacaataaaatctttaagtagtgcagta

SEQ ID NO: 275909 - DNA, 294 bp, Homo sapiens
ctgtcactggctgcccggctgttgcagttcccatcactgtttattccttcctctgtgtaggagttggtgtcctgcctgcgctcaggatgagggggaatctggccctggtgggcgttctaatcagcctggccttcctgtcactgctgccatctggacatcctcagccggctggcgatgacgcctgctctgtgcagatcctcgtccctggcctcaaaggtaaccgctccctggactctgggctgctgggcagtggcctccgggccagctgagagactcccatgcaactgcgcagtt

SEQ ID NO: 275910 - DNA, 1582 bp, Homo sapiens
aaagaaacaaaattgggatgttcgggttggagagttagcaggggcatctccaggagggtcctgccccccaccccaaagccggcctcagggagttccaggcgttcccacactccccaggcaggacggtggacgcagcgcagacaggaagctccccgagataacgctgcggccgggcggcctgatttgctgggctgtctgatggcccgggccgaggcttctccctgcgcctgggactgcggccgcctctctaaatagcagccatgaggcgcctgggggcagtgtcctcgcgggccagcgacgggcaggacgccccgttcgcctagcgcgtgctcaggagttggtgtcctgcctgcgctcaggatgagggggaatctggccctggtgggcgttctaatcagcctggccttcctgtcactgctgccatctggacatcctcagccggctggcgatgacgcctgctctgtgcagatcctcgtccctggcctcaaaggggatgcgggagagaagggagacaaaggcgcccccggacggcctggaagagtcggccccacgggagaaaaagcagtcacagccagtcgtgacagcttctgacatctccaaaaggaagtgcacctcgtcctttgtagaaatgggatcacagggagacatgggggacaaaggacagaaaggcagtgtgggtcgtcatggaaaaattggtcccattggctctaaaggtgagaaaggagattccggtgacataggaccccctggtcctaatggagaaccaggcctcccatgtgagtgcagccagctgcgcaaggccatcggggagatggacaaccaggtctctcagctgaccagcgagctcaagttcatcaagaatgctgtcgccggtgtgcgcgagacggagagcaagatctacctgctggtgaaggaggagaagcgctacgcggacgcccagctgtcctgccagggccgcgggggcacgctgagcatgcccaaggacgaggctgccaatggcctgatggccgcatacctggcgcaagccggctggcccgtgtcttcatcggcatcaacgacctggagaaggagggcgccttcgtgtactctgaccactcccccatgcggaccttcaacaagtggcgcagcggtgagcccaacaatgcctacgacgaggaggactgcgtggagatggtggcctcgggcggctggaacgacgtggcctgccacaccaccatgtacttcatgtgtgagtttgacaaggagaacatgtgagcctcaggctggggctgcccattgggggccccacatgtccctgcagggttggcagggacagagcccagaccatggtgccagccagggagctgtccctctgtgaagggtggaggctcactgagtagagggctgttgtctaaactgagaaaatggcctatgcttaagaggaaaatgaaagtgttcctggggtgctgtctctgaagaagcagagtttcattacctgtattgtagccccaatgtcattatgtaattattacccagaattgctcttccataaagcttgtgcctttgtccaagctatacaataaaatctttaagtagtgcagta

SEQ ID NO: 275911 - DNA, 1704 bp, Homo sapiens
aaagaaacaaaattgggatgttcgggttggagagttagcaggggcatctccaggagggtcctgccccccaccccaaagccggcctcagggagttccaggcgttcccacactccccaggcaggacggtggacgcagcgcagacaggaagctccccgagataacgctgcggccgggcggcctgatttgctgggctgtctgatggcccgggccgaggcttctccctgcgcctgggactgcggccgcctctctaaatagcagccatgaggcgcctgggggcagtgtcctcgcgggccagcgacgggcaggacgccccgttcgcctagcgcgtgctcaggagttggtgtcctgcctgcgctcaggatgagggggaatctggccctggtgggcgttctaatcagcctggccttcctgtcactgctgccatctggacatcctcagccggctggcgatgacgcctgctctgtgcagatcctcgtccctggcctcaaaggggatgcgggagagaagggagacaaaggcgcccccggacggcctggaagagtcggccccacgggagaaaaaggagacatgggggacaaaggacagaaaggcagtgtgggtcgtcatggaaaaattggtcccattggctctaaaggtgagaaaggagattccggtgacataggaccccctggtcctaatggagaaccaggcctcccatgtgagtgcagccagctgcgcaaggccatcggggagatggacaaccaggtctctcagctgaccagcgagctcaagttcatcaagaatgctgtcgccggtgtgcgcgagacggagagcaagatctacctgctggtgaaggaggagaagcgctacgcggacgcccagctgtcctgccagggccgcgggggcacgctgagcatgcccaaggacgaggctgccaatggcctgatggccgcatacctggcgcaagccggctggcccgtgtcttcatcggcatcaacgacctggagaaggagggcgccttcgtgtactctgaccactcccccatgcggaccttcaacaagtggcgcagcggtgagcccaacaatgcctacgacgaggaggactgcgtggagatggtggcctcgggcggctggaacgacgtggcctgccacaccaccatgtacttcatgtgtgagtttgacaaggagaacatgtgagcctcaggctggggctgcccattgggggccccacatgtccctgcagggttggcagggacagagcccagaccatggtgccagccagggagctgtccctctgtgaagggtggaggctcactgagtagagggctgttgtctaaactgagaaaatggcctatgcttaagaggaaaatgaaagtgttcctggggtgctgtctctgaagaagcagagtttcattacctgtattgtagccccaatgtcattatgtaattattacccagaattgctcttccataaagcttgtgcctttgtccaagctatacaataaaatctttaagtagtgcagtagttaagtccaaatagtggcaatggggtcttgaattactaccttttaatttctatatggaaaagaactcactttgaccaacacttctgtaaattacattacaatataggttccttcacactattatccatgtaaaaacaattttgctttgcttcaaacccagatttcaggaaaacaacaacaaaattctccaaactttacta

SEQ ID NO: 275912 - DNA, 1582 bp, Homo sapiens
aaagaaacaaaattgggatgttcgggttggagagttagcaggggcatctccaggagggtcctgccccccaccccaaagccggcctcagggagttccaggcgttcccacactccccaggcaggacggtggacgcagcgcagacaggaagctccccgagataacgctgcggccgggcggcctgatttgctgggctgtctgatggcccgggccgaggcttctccctgcgcctgggactgcggccgcctctctaaatagcagccatgaggcgcctgggggcagtgtcctcgcgggccagcgacgggcaggacgccccgttcgcctagcgcgtgctcaggagttggtgtcctgcctgcgctcaggatgagggggaatctggccctggtgggcgttctaatcagcctggccttcctgtcactgctgccatctggacatcctcagccggctggcgatgacgcctgctctgtgcagatcctcgtccctggcctcaaagagatagttctgcaggtcaggcatgggtgagaaagtccctgaggctgcggtatctgaagcctccagagcagcatcttcaagggatgcgggagagaagggagacaaaggcgcccccggacggcctggaagagtcggccccacgggagaaaaaggagacatgggggacaaaggacagaaaggcagtgtgggtcgtcatggaaaaattggtcccattggctctaaaggtgagaaaggagattccggtgacataggaccccctggtcctaatggagaaccaggcctcccatgtgagtgcagccagctgcgcaaggccatcggggagatggacaaccaggtctctcagctgaccagcgagctcaagttcatcaagaatgctgtcgccggtgtgcgcgagacggagagcaagatctacctgctggtgaaggaggagaagcgctacgcggacgcccagctgtcctgccagggccgcgggggcacgctgagcatgcccaaggacgaggctgccaatggcctgatggccgcatacctggcgcaagccggctggcccgtgtcttcatcggcatcaacgacctggagaaggagggcgccttcgtgtactctgaccactcccccatgcggaccttcaacaagtggcgcagcggtgagcccaacaatgcctacgacgaggaggactgcgtggagatggtggcctcgggcggctggaacgacgtggcctgccacaccaccatgtacttcatgtgtgagtttgacaaggagaacatgtgagcctcaggctggggctgcccattgggggccccacatgtccctgcagggttggcagggacagagcccagaccatggtgccagccagggagctgtccctctgtgaagggtggaggctcactgagtagagggctgttgtctaaactgagaaaatggcctatgcttaagaggaaaatgaaagtgttcctggggtgctgtctctgaagaagcagagtttcattacctgtattgtagccccaatgtcattatgtaattattacccagaattgctcttccataaagcttgtgcctttgtccaagctatacaataaaatctttaagtagtgcagta

SEQ ID NO: 275913 - DNA, 536 bp, Homo sapiens
gaagtttaatttggaccttactcatccagtagaagatggaatttttgattctggaaattttgaaccttccctagtgaatatctagggttctcttccctagttttgcattttttctgttttaaaataggagcaatttctacgggagaaggttaatttctacgggagaaggttaaagtcaatggcaaaactggaaatctcgggaatgttgttcacattgaacgcttcaagaataaaatcacagttgtttctgagaaacagttctctaaaaggtatttgaaataccttaccaagaaataccttaagaagaacaatcttcgtgattggcttcgagtggttgcatctgacaaggagacctacgaacttcgttacttccagattagtcaagatgaagatgaatcagagtcggaggactaggcaaaggctccccttacagggctttgcttattaataaaataaatgaagtatacatgagaaataccaagaaattggcttttagtttatcagtgaataaaaaatattatactcttgaaaaaaaa

SEQ ID NO: 275914 - DNA, 450 bp, Homo sapiens
gaagtttaatttggaccttactcatccagtagaagatggaatttttgattctggaaattttgaacaatttctacgggagaaggttaaagtcaatggcaaaactggaaatctcgggaatgttgttcacattgaacgcttcaagaataaaatcacagttgtttctgagaaacagttctctaaaaggtatttgaaataccttaccaagaaataccttaagaagaacaatcttcgtgattggcttcgagtggttgcatctgacaaggagacctacgaacttcgttacttccagattagtcaagatgaagatgaatcagagtcggaggactaggcaaaggctccccttacagggctttgcttattaataaaataaatgaagtatacatgagaaataccaagaaattggcttttagtttatcagtgaataaaaaatattatactcttgaaaaaaaa

SEQ ID NO: 275915 - DNA, 466 bp, Homo sapiens
aaatcatctttggagaaaggcatagacatacctctcaggcgcttatccttaaccttggcaatggaaactttccacattgattgagacctgtctcagatacttttggttcacagaagtaaacgtcttttcccagctttcgtatattttgcgtgctccctttgattctgtcaggcttttattttattctttattagggtgggtctatttaggtttttgatcttattctaggacatgatctttacttctaaggcatggcttttctggagttataactgtaaggggtgctcagtaaggtatctctactgtggctctcagtaagaattccgacattttctgcactatgtaaactctgggtctacctttgttacaggtagttagacaggtatgagcgggacaggagagggctctccccccatccaccaggaatgtcgggtgatgatttggcagttatcacattgcctctcta

SEQ ID NO: 275916 - DNA, 447 bp, Homo sapiens
ctccagaatctcctggccaggttcaacctccaccattactgtgcattgtccaaatcttccttgcacttagcaccctggcgcatgtgtgtgtgatcacaggccagccagtgagtgtgcacttggaaagttcactcatccttaaaaccgtgaggcccagaacaaaaacaatcagatgttctgaaaagtatcagtgttaaatactgaagtatcttcttgttaaaatattcttcttgatctgtctctcatattcaatcattcactaactcaatttcagacatttattgagcacctactatgtgccagacattatgctcagcctacctgtcatggtctcttgaaaagaatcttctaaacctgcatcttaaaattacctttggggattgtgctgataatgtgtattcaagtcttgtggtgaacaggaggaaaaatatatcatcttacatttgc

SEQ ID NO: 275917 - DNA, 658 bp, Homo sapiens
ggaacataaatcaatgaattatgcctactaaatgttcagattttgacgtgaaagtcaactgaagagataagacaagaggaaagaaaacgagaggagtaacaagatgagtagaggtaggctttgaaggagcaggagggaagtgggcagcaacccttccacagtgaagaagagaatcagtgatgcagaggcattaaatagaacagatctgaggcttggcagagggagaggccaacaggagctccagacaagcctgggcaacttagcgagaccctgtctctacaaaaaaatttcaaaaataggtaggtgtggtgtcatgcacctgtagtcccagctactcaggaggctgaggcaggaagatcatttgagcccaggaggtcaaggcttcaggggactatgatctgcaccactgcactctagcctgggtgaccgagcaagaccttatctcaaaaaaaaaaaaaaaaaaaaaagagggggccaaaactgccacttcagtgcaccttgataattctcataggcactgctgagccttgcagaggaccacactttcagaatactgtaatggtgaaaccagtctatcagggaaattcctgcccatttctaatctgaaagatgccagtcaaacatccccccatccatgtgtgcagaataaactctaggg

SEQ ID NO: 275918 - DNA, 356 bp, Homo sapiens
gagataaggtcttgctcggtcacccaggctagagtgcagtggtgcagatcatagtcccctgaagccttgacctcctgggctcaaatgatcttcctgcctcagcctcctgagtagctgggactacaggtgcaagaccttatctcaaaaaaaaaaaaaaaaaaaaaagagggggccaaaactgccacttcagtgcaccttgataattctcataggcactgctgagccttgcagaggaccacactttcagaatactgtaatggtgaaaccagtctatcagggaaattcctgcccatttctaatctgaaagatgccagtcaaacatccccccatccatgtgtgcagaataaactctaggg

SEQ ID NO: 275919 - DNA, 505 bp, Homo sapiens
tgttctctctgcttagagagcacctagagaaaatctgtaagcaaataatcacaaaacaagggatgacacaatatatgtaaatgtaggatattacattaagtggaagaaggaagaaggtcattatttactttttctgggtgagagatgaaaacacttctgcaagagtatttccaatttcaccaaagtatggaaagatgtttatcctaataacaatactcagtaatggtatttgatttaatttcagcctagtacatgatttgattctaaaacaacatttccttagaatttcaatatctggaattctatagctcaatggttttggtgactattaatattttatatacttcttttgatagttttggggctaagtgaatcaaatctattcataactctaagttttcaaattctgaaatcttttagagttgtttagttaaaactggttcttttcttccagtttgttagcttaccaaatgagccaaaataaagaaaaaacaaaaatttattt

SEQ ID NO: 275920 - DNA, 1295 bp, Homo sapiens
gcacctcaggggcttttctctaaggctattctgtttctccaggcaagagtctccagttctctgctgggggtgtctgcttggctccagtgttctgggagccctgtaggggatggtcactagggagggacagtcgcccaccttccacaacgtgaacctgtactgcttcccccatttctggtgaagattctcccccatatccactccagtctcttatgtaggtaggtgagggggctgggggtcagaccagaaaaaagtcccctgttaaagaaaaaaaattattcaatgatcctttttttttttttgagacgaagtttcgctcttgttgcccaggctggagtgcagtggcgccatctcggctcaccgcaacctctgcctccttgttcaagcgattctcctgcctcagcctcccgagtagctgggattacaggcatgtgccaccatgcccggctaattttgtatttttagtagagacaagatttcaccatgttggtcaggctggcctcgaactccctacctcaggtgatctgcccgccttggcctcccaaagtgctgggattacaggcgtgagccactgcacccagccctcaatgatactttttaaagcatgctgaggaagaacatattcaggagcatggcaggcacagggaccactgcactggggccttatagttaaggggagagactgggctctgaatacagcatgggccagtgggaatctatagccaaggggcagggtgagcatcagtgggtggaaaatcccagaggaaacatcagtggtgaagggggattctggttgaaccaatctaacaggattccaactgaagacaggcctcagcgtaaccagacattgcctgggggtggtgcagggaaggagcctcaagagtgatcagttatcaagggttctggctaaactgacttagcagggttctttactgaaactggattttacaaggacgtgcatatatgggcacctaggagaaggttccggagcctaaggctggaccaagcacagcatcttcatcagccctaccagccccttccctggtgcgtgctgcctctgaggtctgagtcccctgggttctgaggcaggacctggccacttctcaccacgctgctttctctgccctgtcatttaccctcctccatccttgtccattgtcttccagagctgcacttcctccatctctgctattgcctcctcccctgctccctttttcctgttgggatttcacctttaatggggcttcagcagggcagggacataagcacatgttttcattacaccatgtgacacc

SEQ ID NO: 275921 - DNA, 2916 bp, Homo sapiens
tgtgtccccacccaaatctcaacttgaattgtaccttccagaattcccacaggacccagggggaggtaattgaatcaagggggctggtctttcccatgctattcttgtgatagtgaataagtctcacgagatctgatggttttatcaggggtttctgcttttgctgcttcttcatttttctcttgctgctgccatgtaagaaatgcctttcacctcctgccatgattctgaggcctccccagccaggtggaactataagtccaattaaacctctttttgttcccagtctcaggtatgtctttatcagcagcatgaaaatggactaatagtaccagtagagtggggcattgctgaaaagatacccgaaaatgtggaagcaactttggaactgggtgttgaaataatctggagggctcagaagaagataggaaaatgtaggaaagtttggaacctcctagagactgtgaatggcattgacaaaaatactgatagtgatatgaacaataaggtccaggctgaggtggtctcagatggagatgaagaccttgttgggaactgaagtaaaggtgacccttgttatgttttagcaaggagactggcagcatttcacccttgccctagagatttgtggaacttagagcttgagagagatgacttagggtatctggtggaataaatttctaagcagcaaagcattcaaaaggtgacttgggtgctgttaaaaacattctgttttaaaagggaaacaagagcataaatgtggaaaatctgcagcctgatgatgcagtagaaaagaaaaacccattttttttaaggagaaattcaagctggctgcagaaatttgcataagcagcaaggagcctaatgttaatccccaagaccatggggaaaatgtctccaggtcatgtcagagaccttcatggcagcccctcccatcacaggcccagaggcccaggaggaaaaagtggttttgtgggctgggcccagggtctctgtgctgtgtgcagcctagggacttggtgccctgtgtcccagctgctccagccatggctgaaaggagccaacatagagcttgggctgtggcttcagagggtagaggccccaagcattggcagcttccatgtgatgttgagcctgtgggtgcagagatgtcaagaattgagatttgggaacctctgcctagatttcagaatatatatggaaacacctggatgtccaggcaaaagtttgctgcaggggcagagccctcatggggaacctctcctagggcagtgtggaagggaaatgtggggcagagcccccacacagagtccctgttggggcactgcctagtggagctgtgagaagaaggccacagtcccagaacggtagaccccagaatggtagaccccagaatggtagatcaaccaccaacttgcatcttgtgcctggaaaagctacagacactcaacatcagcctgagaaagcagccaggagggaggctgtactctgcaaagccacaggggcggagctgcacaagaccatgggaacctatctcttgcatcagcatgacctgaatgtgagacatggagtcaaaggagatcattatggagctttaaaatttgactgccccactggatttcagacttgcatggaccctgtaacccctttgttttggccaatttctctcatttggaacagctgtatttacccaatacctgtaccccccattgtatctaggaggtaactagcttgcttttacaggcttgtaagtggaagggacttgccttgtctcagatgagactttggactgtggacttttgggttaatgctgaaatgagttaagactttggggaactgttgggaaggaatgattggttttgaaatgtgaggattatgaaatttggaggagcccagggaggaatgatatggtttggctgtgtccccacccaaatctcaacttgaattgtatctcccagaattcccacatgttgtgggagggacgcagtgggaggtaattgaatcatggaggccagtcttttctgtgctattctcgtgataataagtcccacaagatctggtgggtttatgaagagtttctgcttttgcttcttcctcattttgctcttgatgccaccacgtaagaagtaccttttgcctcccacctgattttgaggcctccccagccatgtggaactgtaagtccaattaaaccctttttgtttccagtctcagatatgtctttatcagcagcatggaaacgaactaatacaatcatagtttttaaaaaccaatctaaatgtaactattgaacatgattagctgtttcatccctagtagagtgacagaaggaaacatccatagacaggagtaataagaaaccagctaaacttctaaaccatttttaaaggatgcgtgtgagctggcataacctacctactctttcctatgggcctctactgagagcatggaggtaatacatctaatacactgaagaccagggcaagagagctggaagaaatccctcttaagcactccaggccttcactgagtatgaggtgctggtctccaaaggcagagggcaaggcaaggcagagagggatctcctggggcacagacaactgacaaaagaaacacttggattgttgtataagaggagtgagctttgtaaataccacgttagctggcctgctgtggaacagaatgcctatgaatgacagtagtcaggtagtggatgaacactgatctgagagcctgtaaaagaaactctttggaatgataatgtcatctagacctttgatacgcaaagtgtgattcctggacagatgtattggctttacctggcagcttgttggaaatgtaaaacctcaggcctcaccccagacctactgaattatttatattaattaaaattaaataatttttatttcaacaaaa

SEQ ID NO: 275922 - DNA, 3116 bp, Homo sapiens
  misc_feature (1099)..(1099): n is a, c, g, or t
  misc_feature (1319)..(1319): n is a, c, g, or t
  misc_feature (2220)..(2220): n is a, c, g, or t
  misc_feature (2343)..(2343): n is a, c, g, or t
  misc_feature (2405)..(2405): n is a, c, g, or t
agactctggccgcggcgattcaatatatccggaagcaactgtcatggctgctgtcagtgagggcccgtaatggagatcgagtcaagggttgcccagggacacttaagagccttcggcttcaaggaggcctctcaaaggacaaaggatgagactgcctggcggcagagtgccccccacaatcgtaggaactgtgtcgccgcgcttcccgttaacttgccgctaagtttttctagaaaagtcgcccttcttgccaggggtgtcctatagactttgtcatggagtgaaacagaaacaaatatatgcatgactcttggccagtgattctcaacctcggctgcacattggcatcaactggggaaccttcaaagctcctggcatgtgggttccaccctcagagattgtgatgtaatgcactgacagtcaaattgggaacaactgtaaattggctcagttcattcatcttttactgctgtacagaagatttcattgtataagtacttcacaactcatgtactgatttctagttgatgaactgtttcaaatttttgttatttcaagcaattctctaatgaatgttgttgtacttgtctccccgtgaatgttcctctggggtatatactgagaagtttgaattggcacatcaaaggttgagcatcttcccctttaccaggtattatcaacatatcgttttccaaagcatttacagaaatgtgtgctcccaccacttctctgcctctttgacaacactcagtatgatcacacattttttttttgccaattttatgcatgtgaaataattttattgttttagttgtttatttatcttagagaaaaggtcttgcagtaggctcctaggctggagtgcagtggtgcgatcgtggctcactgtaacctcagcctcctgggctcggacagtcctctcgcctaggcgtcctgagtggctgggactacacttgcgcatcatcaccatgcccgggtagttcttttgtttttatttttagagacagggtcttgctgtgctgcccaggctggtctcgaactcctggcctcaagtgatcctcatggcttgaccgccccaagtgttgggattacaggcatnagccaccatgtccagcaattgttttattgttttaaattgtatttacttgattatgagtgaggtttagcatgtaagttactgcttctatgaattgtcttttgcctaatttttctattgttcttttgctctctcttatcctttctctctctctccctccctccctctgggctcctgtctcctcatttgtggactgtgcaattgctgacaccctgcacagctnggccctcaatccagaaacagctgttgacatggtatttctagtgccttcccaaagtaatactgagtacatcacagatccattagccaacccatgtagtgattgagttacttcttggtctcctgtaccctgagccccagacagtgagtctatagctttccttcccatctcctttcaaaaacagggaagtaaagtagccccaccacagtccctgtctttaaaaagtgatgcttgctctggttctctggctttcatgaagcattttcagatcttgctgccatccctgctccagcctactcactgctagtgtttctgtcctgtttctattccgtgagacaactatcatggttgggagtccagaaagctttttgtcaatttttctacttgatccttaccatagatatggcgcaggagggctaggtcagagttagaacttactacacatcttgaacattatatgttatgttttatggtgaaaaaattttaaattctattttagcatctaaatttgcatttaagatgtcactttcttctcaatttattttttctgcaagtaggggaaagagcctgtgagctggatggcagagaaaactagtttttaaattaatattgccaaatatttcagtaaccaaccaactataaaacataataagagctgtcacaattagtaaagattagaagcaatggtaactctcatacagacacccctgggaaaatatgatttacctgtatgctttgtatttttgttccttgaacgttttttggaagcaactgcttccagaaactttcctttgaatagtcaaaaaatacagccattggtgtattattttgttgaatattaaaccagacctatgaaaacattaatataacattagtgtaggtccataggaacacaaggcccatngttggtaaggaaggagcaaaattttacagtcttactactcaatgaagtggcagaatcccagcggggttctgaggcaggagataaagagattctagggtttcatgatcattagactacctcaanggttctcatccttgaaggcactacacaatcacctggaggagctttagtgataaaagattgcnccggccccatgccctagggaatctgatagactatctatatttaaagttccccaggtgattctagtgtgtagccagggtgactctagaggagataactcaagattttttttccccatatacttacatttctatcatcaaacaaacaatctacactttttaagggacaaaacgggtcaaactgcttataacattggccagttgatggattccaaagcaaatattcattagtttcttgagttactacataagccacatgcccctgtatgagaaaaaagaaagtaatttttggtggatttaaataatttctatatatggaaattatactgtgatgattctaatttttaaagccttttttagtggagtgtagtggcttgtacctgtggtcccggctctttgggaggctgaggtgggagggtcacttgagcccaggagtttgagaccagcctgggcaacatagggaaaccctgtatctatcacaaaaaaatttttttaaaatttgctgggcacagcggcacacacacctgtagtcccagctacttgggaggctgaggtgggaggatcgcttgagcctggggagttgagactgcaatgagctgtgataatgccgctgccctgtggcttgggtgacagggtgagatcctgtctcaataacaaacaaacaacaaaaataaataaaagcctttttgagggcttttacattttctttgaaat

SEQ ID NO: 275923 - DNA, 892 bp, Homo sapiens
tttttttttatatttcagaagaagtttattaagaggttttaggctttaagcatatgtgaaaagcaaaaattacattttaaagtatataatttgcattttccaccttctcaatgccaatgaaatattctaggagactctataagataaccaattgattttctactactcccaaattttaactttgtaatttaaagaggaataggcaaatagagctgctgtggttctggttctccctgcaggatgaagggggcctgcaaaatgtctcctacttccattctagtcattcagcaaggtgccttcctctggatgcactgtctgtatacttttgccatgttgcatcacataatgattctgcccaccttcaccatttgactgtcagtaaaagaatgtatgtgctcatttcttcttttattatagcgcagtgctcttcatgaagtctgaatcttgtttcatttgtgattgtaattagcacttgcttcttcaagactggctaaatgatgataatcagtgaagttctgtgatgggcacatggatgtgtattatatttttctactttggttaatatttgaatattccaataagttttaaaataacttgtttgtttctgttattagaatggcctgtccagaagacagccaaatacatccttcaaacagacttcactgcaggagacagagtggattcatcctgtattctccatgtagacttccatcttcatgagtactccaagaagatggttcagttgactattgcaaaggtaaaaatccaagagatacagatacagaataggacagagagacatatttttaagctattgattacaattatggtatgcctatagattgcagaaccgaggagaaagggaacattatgatttaccatcaagaaaaac

SEQ ID NO: 275924 - DNA, 812 bp, Homo sapiens
aaactaggctaggtacgaggctggtgttccgtaatggagatcgagtcaagggttgcccagggacacttaagagccttcggcttcaaggaggcctctcaaaggacaaaggatgagactgcctggcggcagagtgccccccacaatcgtaggaactgtgtcgccgcgcttcccgttaacttgccgctaagtttttctagaaaagtcgcccttcttgccaggggtgtcctatagactttgtcatggagtgaaacagaaacaaataatggcctgtccagaagacagccaaatacatccttcaaacagacttcactgcaggagacagagtggattcatcctgtattctccatgtagacttccatcttcatgagtactccaagaagatggttcagttgactattgcaaagatcaccgccagatgcaaaaaaccaccgctaagcattttgtaaaatgctgagacatatttgagcaactcttgatgaaggccctgaccacatttctttcatgttctagacaaaatacctggagagaatggcaagcttccaggctcttgctcagcctttcttctcccttgtcagtgcagtcagggataagcatctatttttaattaatagtatttcttaagaatgaaaacaccattcacttttgcaactgtcaacttaagtacagctgctgttttgagctatgtcttttataatcggagtggattccatacctctcatccctggattttcatcttgtggcactggatgttgaatggctcaagtgcctctgataagaaaaaaattgtgcttcaagtttatgaataagtagga

SEQ ID NO: 275925 - DNA, 457 bp, Homo sapiens
tgcagcagagctccacaaaagtgcgggaatgtctgacagggaagaatcagagaaaccttcaccagcagcccgacattcacctggacggacagtgcacttttcttacgtctgggcagggaaggcagggcggggcacagacaactgacaaaagaaacacttggattgttgtataagaggagtgagctttgtaaataccacgttagctggcctgctgtggaacagaatgcctatgaatgacagtagtcaggtagtggatgaacactgatctgagagcctgtaaaagaaactctttggaatgataatgtcatctagacctttgatacgcaaagtgtgattcctggacagatgtattggctttacctggcagcttgttggaaatgtaaaacctcaggcctcaccccagacctactgaattatttatattaattaaaattaaataatttttatttcaacaaaa

SEQ ID NO: 275926 - DNA, 654 bp, Homo sapiens
agactctggccgcggcgattcaatatatccggaagcaactgtcatggctgctgtcagtgagggcccgtaatggagatcgagtcaagggttgcccagggacacttaagagccttcggcttcaaggaggcctctcaaaggacaaaggatgagactgcctggcggcagagtgccccccacaatcgtaggaactgtgtcgccgcgcttcccgttaacttgccgctaagtttttctagaaaagtcgcccttcttgccaggggtgtcctatagactttgtcatggagtgaaacagaaacaaatgtgagttaatcattaacatttcctagtggttaaaattactttttaagcgcttaactgtgtattttttagattgaagatttcaaatgaaattttgatttgactgaaatatttaatatgtgatgagttgatattaaaatacagaagattactatttttatagaaacaataatgtagaaactaatatttgaagcaggtttactccacatactgtgttataatttaaattttcacttaaactctcaaaatcagaagagctgacctagtaaggcttaaacctctaaaacttgtggttttaacaaggcttaatatacgtagttataatagtttttaaaaaaattgttatcaagttcctcaggt

SEQ ID NO: 275927 - DNA, 479 bp, Homo sapiens
agactctggccgcggcgattcaatatatccggaagcaactgtcatggctgctgtcagtgagggcccgtaatggagatcgagtcaagggttgcccagggacacttaagagccttcggcttcaaggaggcctctcaaaggacaaaggatgagactgcctggcggcagagtgccccccacaatcgtaggaactgtgtcgccgcgcttcccgttaacttgccgctaagtttttctagaaaagtcgcccttcttgccaggggtgtcctatagactttgtcatggagtgaaacagaaacaaatatgcagcaacagaaccagagttgtcatcaagcctctttgggtctttgttccatggtggtccacagaagaaaggaaattataactaaagctcctattactgtgttctattttagatttaaggtttaaaaccatcatattatgcctatgccaggagattctaagctcatgtgttgtgaagaatc

SEQ ID NO: 275928 - DNA, 594 bp, Homo sapiens
cttcacttagaataatggtctccagtttcattcagaattttggcaattgtgaaattgtggctggctggtaaaaaagtgtggaatggcctgtccagaagacagccaaatacatccttcaaacagacttcactgcaggagacagagtggattcatcctgtattctccatgtagacttccatcttcatgagtactccaagaagatggttcagttgactattgcaaagattggtttagagtatatatttcaccaagttctggccagcaggatctgaaaagatgtcagttggcacttctgcaaaatgtgtgtgcaagagatgtgtgcaaggaaaaccttaaacatctttcctgctttggctttgcatgtgaaagaaaatatgatgcttggatgtctgattccaaaatggcggcatggaagcaagctggcttcatgccccccaaccacagacaaccagaaacaaatgtacagcactgagattatcaccagcaatatcccagaaatcaaatatgaagatgagacagttcctggggccacaaagaagtgaaaaaactccaagcagacgggaagataatcaaacttccacatccatgtcacct

SEQ ID NO: 275929 - DNA, 409 bp, Homo sapiens
caggacccagagggagcggagcacgcgcctttgggaatcttcggtgcgccaagtctgttcgccgccggggtctatcacccccgcccctcgcctctgcccgtgagcgtcagctggcttggctttttcagaggaaacagagactctcagacatgaatactgtgacactgaccaccaggccaacttaacatcagcagatatcctgtctcagatgaagaggtatgtttgatttatttcttttttttttttctatctacagatgatccaatatatgtcctagatcccattcattctgtctcctctggggccttatttcatcatttaaccctccctttttatcttcagtataccctttccccacctccctcccctggctttatctgccctatccaacaaaacaaaaacaaaaaga

SEQ ID NO: 275930 - DNA, 3430 bp, Homo sapiens
  misc_feature (1413)..(1413): n is a, c, g, or t
  misc_feature (1633)..(1633): n is a, c, g, or t
  misc_feature (2534)..(2534): n is a, c, g, or t
  misc_feature (2657)..(2657): n is a, c, g, or t
  misc_feature (2719)..(2719): n is a, c, g, or t
agactctggccgcggcgattcaatatatccggaagcaactgtcatggctgctgtcagtgagggcccgtaatggagatcgagtcaagggttgcccagggacacttaagagccttcggcttcaaggaggcctctcaaaggacaaaggatgagactgcctggcggcagagtgccccccacaatcgtaggaactgtgtcgccgcgcttcccgttaacttgccgctaagtttttctagaaaagtcgcccttcttgccaggggtgtcctatagactttgtcatggagtgaaacagaaacaaatggattcccaagagctttgaatgaagacatttaagattacttctagtaaccttgcttgtcaaacccatggtggatgtaattaaccatctgtgctcgtaaatcaggaaactgcaaaactgtgagaacactccgacgtcaattgagtatctacatctaacgtaacactggctcatagtgggaaatcaataaatatcacctgaatgaacaagagaatgattatacattaaacaaacaagagcctcatcttgaaatagattattctccccctaggaggcatcaatgctttggtcacagctttgggatgggcaaagcaagatatgcatgactcttggccagtgattctcaacctcggctgcacattggcatcaactggggaaccttcaaagctcctggcatgtgggttccaccctcagagattgtgatgtaatgcactgacagtcaaattgggaacaactgtaaattggctcagttcattcatcttttactgctgtacagaagatttcattgtataagtacttcacaactcatgtactgatttctagttgatgaactgtttcaaatttttgttatttcaagcaattctctaatgaatgttgttgtacttgtctccccgtgaatgttcctctggggtatatactgagaagtttgaattggcacatcaaaggttgagcatcttcccctttaccaggtattatcaacatatcgttttccaaagcatttacagaaatgtgtgctcccaccacttctctgcctctttgacaacactcagtatgatcacacattttttttttgccaattttatgcatgtgaaataattttattgttttagttgtttatttatcttagagaaaaggtcttgcagtaggctcctaggctggagtgcagtggtgcgatcgtggctcactgtaacctcagcctcctgggctcggacagtcctctcgcctaggcgtcctgagtggctgggactacacttgcgcatcatcaccatgcccgggtagttcttttgtttttatttttagagacagggtcttgctgtgctgcccaggctggtctcgaactcctggcctcaagtgatcctcatggcttgaccgccccaagtgttgggattacaggcatnagccaccatgtccagcaattgttttattgttttaaattgtatttacttgattatgagtgaggtttagcatgtaagttactgcttctatgaattgtcttttgcctaatttttctattgttcttttgctctctcttatcctttctctctctctccctccctccctctgggctcctgtctcctcatttgtggactgtgcaattgctgacaccctgcacagctnggccctcaatccagaaacagctgttgacatggtatttctagtgccttcccaaagtaatactgagtacatcacagatccattagccaacccatgtagtgattgagttacttcttggtctcctgtaccctgagccccagacagtgagtctatagctttccttcccatctcctttcaaaaacagggaagtaaagtagccccaccacagtccctgtctttaaaaagtgatgcttgctctggttctctggctttcatgaagcattttcagatcttgctgccatccctgctccagcctactcactgctagtgtttctgtcctgtttctattccgtgagacaactatcatggttgggagtccagaaagctttttgtcaatttttctacttgatccttaccatagatatggcgcaggagggctaggtcagagttagaacttactacacatcttgaacattatatgttatgttttatggtgaaaaaattttaaattctattttagcatctaaatttgcatttaagatgtcactttcttctcaatttattttttctgcaagtaggggaaagagcctgtgagctggatggcagagaaaactagtttttaaattaatattgccaaatatttcagtaaccaaccaactataaaacataataagagctgtcacaattagtaaagattagaagcaatggtaactctcatacagacacccctgggaaaatatgatttacctgtatgctttgtatttttgttccttgaacgttttttggaagcaactgcttccagaaactttcctttgaatagtcaaaaaatacagccattggtgtattattttgttgaatattaaaccagacctatgaaaacattaatataacattagtgtaggtccataggaacacaaggcccatngttggtaaggaaggagcaaaattttacagtcttactactcaatgaagtggcagaatcccagcggggttctgaggcaggagataaagagattctagggtttcatgatcattagactacctcaanggttctcatccttgaaggcactacacaatcacctggaggagctttagtgataaaagattgcnccggccccatgccctagggaatctgatagactatctatatttaaagttccccaggtgattctagtgtgtagccagggtgactctagaggagataactcaagattttttttccccatatacttacatttctatcatcaaacaaacaatctacactttttaagggacaaaacgggtcaaactgcttataacattggccagttgatggattccaaagcaaatattcattagtttcttgagttactacataagccacatgcccctgtatgagaaaaaagaaagtaatttttggtggatttaaataatttctatatatggaaattatactgtgatgattctaatttttaaagccttttttagtggagtgtagtggcttgtacctgtggtcccggctctttgggaggctgaggtgggagggtcacttgagcccaggagtttgagaccagcctgggcaacatagggaaaccctgtatctatcacaaaaaaatttttttaaaatttgctgggcacagcggcacacacacctgtagtcccagctacttgggaggctgaggtgggaggatcgcttgagcctggggagttgagactgcaatgagctgtgataatgccgctgccctgtggcttgggtgacagggtgagatcctgtctcaataacaaacaaacaacaaaaataaataaaagcctttttgagggcttttacattttctttgaaat

SEQ ID NO: 275931 - DNA, 3259 bp, Homo sapiens
  misc_feature (1242)..(1242): n is a, c, g, or t
  misc_feature (1462)..(1462): n is a, c, g, or t
  misc_feature (2363)..(2363): n is a, c, g, or t
  misc_feature (2486)..(2486): n is a, c, g, or t
  misc_feature (2548)..(2548): n is a, c, g, or t
agactctggccgcggcgattcaatatatccggaagcaactgtcatggctgctgtcagtgagggcccgtaatggagatcgagtcaagggttgcccagggacacttaagagccttcggcttcaaggaggcctctcaaaggacaaaggatgagactgcctggcggcagagtgccccccacaatcgtaggaactgtgtcgccgcgcttcccgttaacttgccgctaagtttttctagaaaagtcgcccttcttgccaggggtgtcctatagactttgtcatggagtgaaacagaaacaaatggattcccaagagctttgaatgaagacatttaagattacttctagtaaccttgcttgtcaaacccatggtggatgtaattaaccatctgtgctcgtaaatcaggaaactgcaaaactgtgagaacactccgacgtcaattgagatatgcatgactcttggccagtgattctcaacctcggctgcacattggcatcaactggggaaccttcaaagctcctggcatgtgggttccaccctcagagattgtgatgtaatgcactgacagtcaaattgggaacaactgtaaattggctcagttcattcatcttttactgctgtacagaagatttcattgtataagtacttcacaactcatgtactgatttctagttgatgaactgtttcaaatttttgttatttcaagcaattctctaatgaatgttgttgtacttgtctccccgtgaatgttcctctggggtatatactgagaagtttgaattggcacatcaaaggttgagcatcttcccctttaccaggtattatcaacatatcgttttccaaagcatttacagaaatgtgtgctcccaccacttctctgcctctttgacaacactcagtatgatcacacattttttttttgccaattttatgcatgtgaaataattttattgttttagttgtttatttatcttagagaaaaggtcttgcagtaggctcctaggctggagtgcagtggtgcgatcgtggctcactgtaacctcagcctcctgggctcggacagtcctctcgcctaggcgtcctgagtggctgggactacacttgcgcatcatcaccatgcccgggtagttcttttgtttttatttttagagacagggtcttgctgtgctgcccaggctggtctcgaactcctggcctcaagtgatcctcatggcttgaccgccccaagtgttgggattacaggcatnagccaccatgtccagcaattgttttattgttttaaattgtatttacttgattatgagtgaggtttagcatgtaagttactgcttctatgaattgtcttttgcctaatttttctattgttcttttgctctctcttatcctttctctctctctccctccctccctctgggctcctgtctcctcatttgtggactgtgcaattgctgacaccctgcacagctnggccctcaatccagaaacagctgttgacatggtatttctagtgccttcccaaagtaatactgagtacatcacagatccattagccaacccatgtagtgattgagttacttcttggtctcctgtaccctgagccccagacagtgagtctatagctttccttcccatctcctttcaaaaacagggaagtaaagtagccccaccacagtccctgtctttaaaaagtgatgcttgctctggttctctggctttcatgaagcattttcagatcttgctgccatccctgctccagcctactcactgctagtgtttctgtcctgtttctattccgtgagacaactatcatggttgggagtccagaaagctttttgtcaatttttctacttgatccttaccatagatatggcgcaggagggctaggtcagagttagaacttactacacatcttgaacattatatgttatgttttatggtgaaaaaattttaaattctattttagcatctaaatttgcatttaagatgtcactttcttctcaatttattttttctgcaagtaggggaaagagcctgtgagctggatggcagagaaaactagtttttaaattaatattgccaaatatttcagtaaccaaccaactataaaacataataagagctgtcacaattagtaaagattagaagcaatggtaactctcatacagacacccctgggaaaatatgatttacctgtatgctttgtatttttgttccttgaacgttttttggaagcaactgcttccagaaactttcctttgaatagtcaaaaaatacagccattggtgtattattttgttgaatattaaaccagacctatgaaaacattaatataacattagtgtaggtccataggaacacaaggcccatngttggtaaggaaggagcaaaattttacagtcttactactcaatgaagtggcagaatcccagcggggttctgaggcaggagataaagagattctagggtttcatgatcattagactacctcaanggttctcatccttgaaggcactacacaatcacctggaggagctttagtgataaaagattgcnccggccccatgccctagggaatctgatagactatctatatttaaagttccccaggtgattctagtgtgtagccagggtgactctagaggagataactcaagattttttttccccatatacttacatttctatcatcaaacaaacaatctacactttttaagggacaaaacgggtcaaactgcttataacattggccagttgatggattccaaagcaaatattcattagtttcttgagttactacataagccacatgcccctgtatgagaaaaaagaaagtaatttttggtggatttaaataatttctatatatggaaattatactgtgatgattctaatttttaaagccttttttagtggagtgtagtggcttgtacctgtggtcccggctctttgggaggctgaggtgggagggtcacttgagcccaggagtttgagaccagcctgggcaacatagggaaaccctgtatctatcacaaaaaaatttttttaaaatttgctgggcacagcggcacacacacctgtagtcccagctacttgggaggctgaggtgggaggatcgcttgagcctggggagttgagactgcaatgagctgtgataatgccgctgccctgtggcttgggtgacagggtgagatcctgtctcaataacaaacaaacaacaaaaataaataaaagcctttttgagggcttttacattttctttgaaat

SEQ ID NO: 275932 - DNA, 3387 bp, Homo sapiens
tttttttttatatttcagaagaagtttattaagaggttttaggctttaagcatatgtgaaaagcaaaaattacattttaaagtatataatttgcattttccaccttctcaatgccaatgaaatattctaggagactctataagataaccaattgattttctactactcccaaattttaactttgtaatttaaagaggaataggcaaatagagctgctgtggttctggttctccctgcaggatgaagggggcctgcaaaatgtctcctacttccattctagtcattcagcaaggtgccttcctctggatgcactgtctgtatacttttgccatgttgcatcacataatgattctgcccaccttcaccatttgactgtcagtaaaagaatgtatgtgctcatttcttcttttattatagcgcagtgctcttcatgaagtctgaatcttgtttcatttgtgattgtaattagcacttgcttcttcaagactggctaaatgatgataatcagtgaagttctgtgatgggcacatggatgtgtattatatttttctactttggttaatatttgaatattccaataagttttaaaataacttgtttgtttctgttattagaatggcctgtccagaagacagccaaatacatccttcaaacagacttcactgcaggagacagagtggattcatcctgtattctccatgtagacttccatcttcatgagtactccaagaagatggttcagttgactattgcaaagtctcaggtatgtctttatcagcagcatgaaaatggactaatagtaccagtagagtggggcattgctgaaaagatacccgaaaatgtggaagcaactttggaactgggtgttgaaataatctggagggctcagaagaagataggaaaatgtaggaaagtttggaacctcctagagactgtgaatggcattgacaaaaatactgatagtgatatgaacaataaggtccaggctgaggtggtctcagatggagatgaagaccttgttgggaactgaagtaaaggtgacccttgttatgttttagcaaggagactggcagcatttcacccttgccctagagatttgtggaacttagagcttgagagagatgacttagggtatctggtggaataaatttctaagcagcaaagcattcaaaaggtgacttgggtgctgttaaaaacattctgttttaaaagggaaacaagagcataaatgtggaaaatctgcagcctgatgatgcagtagaaaagaaaaacccattttttttaaggagaaattcaagctggctgcagaaatttgcataagcagcaaggagcctaatgttaatccccaagaccatggggaaaatgtctccaggtcatgtcagagaccttcatggcagcccctcccatcacaggcccagaggcccaggaggaaaaagtggttttgtgggctgggcccagggtctctgtgctgtgtgcagcctagggacttggtgccctgtgtcccagctgctccagccatggctgaaaggagccaacatagagcttgggctgtggcttcagagggtagaggccccaagcattggcagcttccatgtgatgttgagcctgtgggtgcagagatgtcaagaattgagatttgggaacctctgcctagatttcagaatatatatggaaacacctggatgtccaggcaaaagtttgctgcaggggcagagccctcatggggaacctctcctagggcagtgtggaagggaaatgtggggcagagcccccacacagagtccctgttggggcactgcctagtggagctgtgagaagaaggccacagtcccagaacggtagaccccagaatggtagaccccagaatggtagatcaaccaccaacttgcatcttgtgcctggaaaagctacagacactcaacatcagcctgagaaagcagccaggagggaggctgtactctgcaaagccacaggggcggagctgcacaagaccatgggaacctatctcttgcatcagcatgacctgaatgtgagacatggagtcaaaggagatcattatggagctttaaaatttgactgccccactggatttcagacttgcatggaccctgtaacccctttgttttggccaatttctctcatttggaacagctgtatttacccaatacctgtaccccccattgtatctaggaggtaactagcttgcttttacaggcttgtaagtggaagggacttgccttgtctcagatgagactttggactgtggacttttgggttaatgctgaaatgagttaagactttggggaactgttgggaaggaatgattggttttgaaatgtgaggattatgaaatttggaggagcccagggaggaatgatatggtttggctgtgtccccacccaaatctcaacttgaattgtatctcccagaattcccacatgttgtgggagggacgcagtgggaggtaattgaatcatggaggccagtcttttctgtgctattctcgtgataataagtcccacaagatctggtgggtttatgaagagtttctgcttttgcttcttcctcattttgctcttgatgccaccacgtaagaagtaccttttgcctcccacctgattttgaggcctccccagccatgtggaactgtaagtccaattaaaccctttttgtttccagtctcagatatgtctttatcagcagcatggaaacgaactaatacaatcatagtttttaaaaaccaatctaaatgtaactattgaacatgattagctgtttcatccctagtagagtgacagaaggaaacatccatagacaggagtaataagaaaccagctaaacttctaaaccatttttaaaggatgcgtgtgagctggcataacctacctactctttcctatgggcctctactgagagcatggaggtaatacatctaatacactgaagaccagggcaagagagctggaagaaatccctcttaagcactccaggccttcactgagtatgaggtgctggtctccaaaggcagagggcaaggcaaggcagagagggatctcctggggcacagacaactgacaaaagaaacacttggattgttgtataagaggagtgagctttgtaaataccacgttagctggcctgctgtggaacagaatgcctatgaatgacagtagtcaggtagtggatgaacactgatctgagagcctgtaaaagaaactctttggaatgataatgtcatctagacctttgatacgcaaagtgtgattcctggacagatgtattggctttacctggcagcttgttggaaatgtaaaacctcaggcctcaccccagacctactgaattatttatattaattaaaattaaataatttttatttcaacaaaa

SEQ ID NO: 275933 - DNA, 3820 bp, Homo sapiens
tttttttttatatttcagaagaagtttattaagaggttttaggctttaagcatatgtgaaaagcaaaaattacattttaaagtatataatttgcattttccaccttctcaatgccaatgaaatattctaggagactctataagataaccaattgattttctactactcccaaattttaactttgtaatttaaagaggaataggcaaatagagctgctgtggttctggttctccctgcaggatgaagggggcctgcaaaatgtctcctacttccattctagtcattcagcaaggtgccttcctctggatgcactgtctgtatacttttgccatgttgcatcacataatgattctgcccaccttcaccatttgactgtcagtaaaagaatgtatgtgctcatttcttcttttattatagcgcagtgctcttcatgaagtctgaatcttgtttcatttgtgattgtaattagcacttgcttcttcaagactggctaaatgatgataatcagtgaagttctgtgatgggcacatggatgtgtattatatttttctactttggttaatatttgaatattccaataagttttaaaataacttgtttgtttctgttattagaatggcctgtccagaagacagccaaatacatccttcaaacagacttcactgcaggagacagagtggattcatcctgtattctccatgtagacttccatcttcatgagtactccaagaagatggttcagttgactattgcaaagtctcaggtatgtctttatcagcagcatgaaaatggactaatagtaccagtagagtggggcattgctgaaaagatacccgaaaatgtggaagcaactttggaactgggtgttgaaataatctggagggctcagaagaagataggaaaatgtaggaaagtttggaacctcctagagactgtgaatggcattgacaaaaatactgatagtgatatgaacaataaggtccaggctgaggtggtctcagatggagatgaagaccttgttgggaactgaagtaaaggtgacccttgttatgttttagcaaggagactggcagcatttcacccttgccctagagatttgtggaacttagagcttgagagagatgacttagggtatctggtggaataaatttctaagcagcaaagcattcaaaaggtgacttgggtgctgttaaaaacattctgttttaaaagggaaacaagagcataaatgtggaaaatctgcagcctgatgatgcagtagaaaagaaaaacccattttttttaaggagaaattcaagctggctgcagaaatttgcataagcagcaaggagcctaatgttaatccccaagaccatggggaaaatgtctccaggtcatgtcagagaccttcatggcagcccctcccatcacaggcccagaggcccaggaggaaaaagtggttttgtgggctgggcccagggtctctgtgctgtgtgcagcctagggacttggtgccctgtgtcccagctgctccagccatggctgaaaggagccaacatagagcttgggctgtggcttcagagggtagaggccccaagcattggcagcttccatgtgatgttgagcctgtgggtgcagagatgtcaagaattgagatttgggaacctctgcctagatttcagaatatatatggaaacacctggatgtccaggcaaaagtttgctgcaggggcagagccctcatggggaacctctcctagggcagtgtggaagggaaatgtggggcagagcccccacacagagtccctgttggggcactgcctagtggagctgtgagaagaaggccacagtcccagaacggtagaccccagaatggtagaccccagaatggtagatcaaccaccaacttgcatcttgtgcctggaaaagctacagacactcaacatcagcctgagaaagcagccaggagggaggctgtactctgcaaagccacaggggcggagctgcacaagaccatgggaacctatctcttgcatcagcatgacctgaatgtgagacatggagtcaaaggagatcattatggagctttaaaatttgactgccccactggatttcagacttgcatggaccctgtaacccctttgttttggccaatttctctcatttggaacagctgtatttacccaatacctgtaccccccattgtatctaggaggtaactagcttgcttttacaggcttgtaagtggaagggacttgccttgtctcagatgagactttggactgtggacttttgggttaatgctgaaatgagttaagactttggggaactgttgggaaggaatgattggttttgaaatgtgaggattatgaaatttggaggagcccagggaggaatgatatggtttggctgtgtccccacccaaatctcaacttgaattgtatctcccagaattcccacatgttgtgggagggacgcagtgggaggtaattgaatcatggaggccagtcttttctgtgctattctcgtgataataagtcccacaagatctggtgggtttatgaagagtttctgcttttgcttcttcctcattttgctcttgatgccaccacgtaagaagtaccttttgcctcccacctgattttgaggcctccccagccatgtggaactgtaagtccaattaaaccctttttgtttccagtctcagatatgtctttatcagcagcatggaaacgaactaatacaatcatagtttttaaaaaccaatctaaatgtaactattgaacatgattagctgtttcatccctagtagagtgacagaaggaaacatccatagacaggagtaataagaaaccagctaaacttctaaaccatttttaaaggatgcgtgtgagctggcataacctacctactctttcctatgggcctctactgagagcatggaggtaatacatctaatacactgaagaccagggcaagagagctggaagaaatccctcttaagcactccaggccttcactgagtatgaggtgctggtctccaaaggcagagggcaaggcaaggcagagagggatctcctggggcacagacaactgacaaaagaaacacttggattgttgtataagaggagtgagctttgtaaataccacgttagctggcctgctgtggaacagaatgcctatgaatgacagtagtcaggtagtggatgaacactgatctgagagcctgtaaaagaaactctttggaatgataatgtcatctagacctttgatacgcaaagtgtgattcctggacagatgtattggctttacctggcagcttgttggaaatgtaaaacctcaggcctcaccccagacctactgaattatttatattaattaaaattaaataatttttatttcaacaaaaaaaaaaaagggcggccgcccttttttttctgtttatttatgtttttatattttctttggttaacagtgtttttgctgaataaacaccccctcttgggagacgcgaccacatacggggggccatagggtgaggagccgggtttaaacactaataggagatattttgagactcttgcccaattgagacactaactatcggggcgggacaaacaatctgtattcccaaaaacttttggttagtccccacgacggcgaaaattgcagcttgggccgatgtgtgagatcggcaatttaccccgagaaatatagcccaacggcactcgtgaagaggagaataagatttgcgcaaaaaaaacgacgctgtgatcgcaaaaggatattcccagcaagggagaaaacgggtactccttcgaaaggccttcccgaaaacacag

SEQ ID NO: 275934 - DNA, 2734 bp, Homo sapiens
tttttttttatatttcagaagaagtttattaagaggttttaggctttaagcatatgtgaaaagcaaaaattacattttaaagtatataatttgcattttccaccttctcaatgccaatgaaatattctaggagactctataagataaccaattgattttctactactcccaaattttaactttgtaatttaaagaggaataggcaaatagagctgctgtggttctggttctccctgcaggatgaagggggcctgcaaaatgtctcctacttccattctagtcattcagcaaggtgccttcctctggatgcactgtctgtatacttttgccatgttgcatcacataatgattctgcccaccttcaccatttgactgtcagtaaaagaatgtatgtgctcatttcttcttttattatagcgcagtgctcttcatgaagtctgaatcttgtttcatttgtgattgtaattagcacttgcttcttcaagactggctaaatgatgataatcagtgaagttctgtgatgggcacatggatgtgtattatatttttctactttggttaatatttgaatattccaataagttttaaaataacttgtttgtttctgttattagaatggcctgtccagaagacagccaaatacatccttcaaacagacttcactgcaggagacagagtggattcatcctgtattctccatgtagacttccatcttcatgagtactccaagaagatggttcagttgactattgcaaagtctcaggtatgtctttatcagcagcatgaaaatggactaatagtaccagtagagtggggcattgctgaaaagatacccgaaaatgtggaagcaactttggaactgggtgttgaaataatctggagggctcagaagaagataggaaaatgtaggaaagtttggaacctcctagagactgtgaatggcattgacaaaaatactgatagtgatatgaacaataaggtccaggctgaggtggtctcagatggagatgaagaccttgttgggaactgaagtaaaggtgacccttgttatgttttagcaaggagactggcagcatttcacccttgccctagagatttgtggaacttagagcttgagagagatgacttagggtatctggtggaataaatttctaagcagcaaagcattcaaaaggtgacttgggtgctgttaaaaacattctgttttaaaagggaaacaagagcataaatgtggaaaatctgcagcctgatgatgcagtagaaaagaaaaacccattttttttaaggagaaattcaagctggctgcagaaatttgcataagcagcaaggagcctaatgttaatccccaagaccatggggaaaatgtctccaggtcatgtcagagaccttcatggcagcccctcccatcacaggcccagaggcccaggaggaaaaagtggttttgtgggctgggcccagggtctctgtgctgtgtgcagcctagggacttggtgccctgtgtcccagctgctccagccatggctgaaaggagccaacatagagcttgggctgtggcttcagagggtagaggccccaagcattggcagcttccatgtgatgttgagcctgtgggtgcagagatgtcaagaattgagatttgggaacctctgcctagatttcagaatatatatggaaacacctggatgtccaggcaaaagtttgctgcaggggcagagccctcatggggaacctctcctagggcagtgtggaagggaaatgtggggcagagcccccacacagagtccctgttggggcactgcctagtggagctgtgagaagaaggccacagtcccagaacggtagaccccagaatggtagaccccagaatggtagatcaaccaccaacttgcatcttgtgcctggaaaagctacagacactcaacatcagcctgagaaagcagccaggagggaggctgtactctgcaaagccacaggggcggagctgcacaagaccatgggaacctatctcttgcatcagcatgacctgaatgtgagacatggagtcaaaggagatcattatggagctttaaaatttgactgccccactggatttcagacttgcatggaccctgtaacccctttgttttggccaatttctctcatttggaacagctgtatttacccaatacctgtaccccccattgtatctaggaggtaactagcttgcttttacaggcttgtaagtggaagggacttgccttgtctcagatgagactttggactgtggacttttgggttaatgctgaaatgagttaagactttggggaactgttgggaaggaatgattggttttgaaatgtgaggattatgaaatttggaggagcccagggaggaatgatatggtttggctgtgtccccacccaaatggggcacagacaactgacaaaagaaacacttggattgttgtataagaggagtgagctttgtaaataccacgttagctggcctgctgtggaacagaatgcctatgaatgacagtagtcaggtagtggatgaacactgatctgagagcctgtaaaagaaactctttggaatgataatgtcatctagacctttgatacgcaaagtgtgattcctggacagatgtattggctttacctggcagcttgttggaaatgtaaaacctcaggcctcaccccagacctactgaattatttatattaattaaaattaaataatttttatttcaacaaaa

SEQ ID NO: 275935 - DNA, 3361 bp, Homo sapiens
tttttttttatatttcagaagaagtttattaagaggttttaggctttaagcatatgtgaaaagcaaaaattacattttaaagtatataatttgcattttccaccttctcaatgccaatgaaatattctaggagactctataagataaccaattgattttctactactcccaaattttaactttgtaatttaaagaggaataggcaaatagagctgctgtggttctggttctccctgcaggatgaagggggcctgcaaaatgtctcctacttccattctagtcattcagcaaggtgccttcctctggatgcactgtctgtatacttttgccatgttgcatcacataatgattctgcccaccttcaccatttgactgtcagtaaaagaatgtatgtgctcatttcttcttttattatagcgcagtgctcttcatgaagtctgaatcttgtttcatttgtgattgtaattagcacttgcttcttcaagactggctaaatgatgataatcagtgaagttctgtgatgggcacatggatgtgtattatatttttctactttggttaatatttgaatattccaataagttttaaaataacttgtttgtttctgttattagaatggcctgtccagaagacagccaaatacatccttcaaacagacttcactgcaggagacagagtggattcatcctgtattctccatgtagacttccatcttcatgagtactccaagaagatggttcagttgactattgcaaagtctcaggtatgtctttatcagcagcatgaaaatggactaatagtaccagtagagtggggcattgctgaaaagatacccgaaaatgtggaagcaactttggaactgggtgttgaaataatctggagggctcagaagaagataggaaaatgtaggaaagtttggaacctcctagagactgtgaatggcattgacaaaaatactgatagtgatatgaacaataaggtccaggctgaggtggtctcagatggagatgaagaccttgttgggaactgaagtaaaggtgacccttgttatgttttagcaaggagactggcagcatttcacccttgccctagagatttgtggaacttagagcttgagagagatgacttagggtatctggtggaataaatttctaagcagcaaagcattcaaaaggtgacttgggtgctgttaaaaacattctgttttaaaagggaaacaagagcataaatgtggaaaatctgcagcctgatgatgcagtagaaaagaaaaacccattttttttaaggagaaattcaagctggctgcagaaatttgcataagcagcaaggagcctaatgttaatccccaagaccatggggaaaatgtctccaggtcatgtcagagaccttcatggcagcccctcccatcacaggcccagaggcccaggaggaaaaagtggttttgtgggctgggcccagggtctctgtgctgtgtgcagcctagggacttggtgccctgtgtcccagctgctccagccatggctgaaaggagccaacatagagcttgggctgtggcttcagagggtagaggccccaagcattggcagcttccatgtgatgttgagcctgtgggtgcagagatgtcaagaattgagatttgggaacctctgcctagatttcagaatatatatggaaacacctggatgtccaggcaaaagtttgctgcaggggcagagccctcatggggaacctctcctagggcagtgtggaagggaaatgtggggcagagcccccacacagagtccctgttggggcactgcctagtggagctgtgagaagaaggccacagtcccagaacggtagaccccagaatggtagaccccagaatggtagatcaaccaccaacttgcatcttgtgcctggaaaagctacagacactcaacatcagcctgagaaagcagccaggagggaggctgtactctgcaaagccacaggggcggagctgcacaagaccatgggaacctatctcttgcatcagcatgacctgaatgtgagacatggagtcaaaggagatcattatggagctttaaaatttgactgccccactggatttcagacttgcatggaccctgtaacccctttgttttggccaatttctctcatttggaacagctgtatttacccaatacctgtaccccccattgtatctaggaggtaactagcttgcttttacaggcttgtaagtggaagggacttgccttgtctcagatgagactttggactgtggacttttgggttaatgctgaaatgagttaagactttggggaactgttgggaaggaatgattggttttgaaatgtgaggattatgaaatttggaggagcccagggaggaatgatatggtttggctgtgtccccacccaaatctcaacttgaattgtatctcccagaattcccacatgttgtgggagggacgcagtgggaggtaattgaatcatggaggccagtcttttctgtgctattctcgtgataataagtcccacaagatctggtgggtttatgaagagtttctgcttttgcttcttcctcattttgctcttgatgccaccacgtaagaagtaccttttgcctcccacctgattttgaggcctccccagccatgtggaactgtaagtccaattaaaccctttttgtttccagtctcagatatgtctttatcagcagcatggaaacgaactaatacaatcatagtttttaaaaaccaatctaaatgtaactattgaacatgattagctgtttcatccctagtagagtgacagaaggaaacatccatagacaggagtaataagaaaccagctaaacttctaaaccatttttaaaggatgcgtgtgagctggcataacctacctactctttcctatgggcctctactgagagcatggaggtaatacatctaatacactgaagaccagggcaagagagctggaagaaatccctcttaagcactccaggcccttaccagacaccaagcctgccagcaccttgatcttgggcttcttggcctccagaactgtgagaaaagtaatttctgttctttatattataaattaccaagtttgtcacattctgttacagccacacaaaacagactaagacatctggtaacacaggcaagtatgatcattaacttttcatggtcccttcagacacagtgtgtcttcaaaaactttcttaaaagttcctgtagctttaatggtaacttcagcagcctcactgagactggaggccgtatagatatggggcagatatctccctaggatggaaacaattctacctacacaaatgtcatagtaccaggcttcttggtaagtctatttaggcg

SEQ ID NO: 275936 - DNA, 3104 bp, Homo sapiens
caggacccagagggagcggagcacgcgcctttgggaatcttcggtgcgccaagtctgttcgccgccggggtctatcacccccgcccctcgcctctgcccgtgagcgtgtgagttgtagcgtaccctggggtctgttctggaggaggcctgagagcggggttgcctggggcgtgggtctctcatccctctcgtcctggtgaagaagaagagtatacccagcggcagctggcttggctttttcagaggaaacagagactctcagacatgaatactgtgacactgaccaccaggccaacttaacatcagcagatatcctgtctcagatgaagagaatggcctgtccagaagacagccaaatacatccttcaaacagacttcactgcaggagacagagtggattcatcctgtattctccatgtagacttccatcttcatgagtactccaagaagatggttcagttgactattgcaaagtctcaggtatgtctttatcagcagcatgaaaatggactaatagtaccagtagagtggggcattgctgaaaagatacccgaaaatgtggaagcaactttggaactgggtgttgaaataatctggagggctcagaagaagataggaaaatgtaggaaagtttggaacctcctagagactgtgaatggcattgacaaaaatactgatagtgatatgaacaataaggtccaggctgaggtggtctcagatggagatgaagaccttgttgggaactgaagtaaaggtgacccttgttatgttttagcaaggagactggcagcatttcacccttgccctagagatttgtggaacttagagcttgagagagatgacttagggtatctggtggaataaatttctaagcagcaaagcattcaaaaggtgacttgggtgctgttaaaaacattctgttttaaaagggaaacaagagcataaatgtggaaaatctgcagcctgatgatgcagtagaaaagaaaaacccattttttttaaggagaaattcaagctggctgcagaaatttgcataagcagcaaggagcctaatgttaatccccaagaccatggggaaaatgtctccaggtcatgtcagagaccttcatggcagcccctcccatcacaggcccagaggcccaggaggaaaaagtggttttgtgggctgggcccagggtctctgtgctgtgtgcagcctagggacttggtgccctgtgtcccagctgctccagccatggctgaaaggagccaacatagagcttgggctgtggcttcagagggtagaggccccaagcattggcagcttccatgtgatgttgagcctgtgggtgcagagatgtcaagaattgagatttgggaacctctgcctagatttcagaatatatatggaaacacctggatgtccaggcaaaagtttgctgcaggggcagagccctcatggggaacctctcctagggcagtgtggaagggaaatgtggggcagagcccccacacagagtccctgttggggcactgcctagtggagctgtgagaagaaggccacagtcccagaacggtagaccccagaatggtagaccccagaatggtagatcaaccaccaacttgcatcttgtgcctggaaaagctacagacactcaacatcagcctgagaaagcagccaggagggaggctgtactctgcaaagccacaggggcggagctgcacaagaccatgggaacctatctcttgcatcagcatgacctgaatgtgagacatggagtcaaaggagatcattatggagctttaaaatttgactgccccactggatttcagacttgcatggaccctgtaacccctttgttttggccaatttctctcatttggaacagctgtatttacccaatacctgtaccccccattgtatctaggaggtaactagcttgcttttacaggcttgtaagtggaagggacttgccttgtctcagatgagactttggactgtggacttttgggttaatgctgaaatgagttaagactttggggaactgttgggaaggaatgattggttttgaaatgtgaggattatgaaatttggaggagcccagggaggaatgatatggtttggctgtgtccccacccaaatctcaacttgaattgtatctcccagaattcccacatgttgtgggagggacgcagtgggaggtaattgaatcatggaggccagtcttttctgtgctattctcgtgataataagtcccacaagatctggtgggtttatgaagagtttctgcttttgcttcttcctcattttgctcttgatgccaccacgtaagaagtaccttttgcctcccacctgattttgaggcctccccagccatgtggaactgtaagtccaattaaaccctttttgtttccagtctcagatatgtctttatcagcagcatggaaacgaactaatacaatcatagtttttaaaaaccaatctaaatgtaactattgaacatgattagctgtttcatccctagtagagtgacagaaggaaacatccatagacaggagtaataagaaaccagctaaacttctaaaccatttttaaaggatgcgtgtgagctggcataacctacctactctttcctatgggcctctactgagagcatggaggtaatacatctaatacactgaagaccagggcaagagagctggaagaaatccctcttaagcactccaggccttcactgagtatgaggtgctggtctccaaaggcagagggcaaggcaaggcagagagggatctcctggggcacagacaactgacaaaagaaacacttggattgttgtataagaggagtgagctttgtaaataccacgttagctggcctgctgtggaacagaatgcctatgaatgacagtagtcaggtagtggatgaacactgatctgagagcctgtaaaagaaactctttggaatgataatgtcatctagacctttgatacgcaaagtgtgattcctggacagatgtattggctttacctggcagcttgttggaaatgtaaaacctcaggcctcaccccagacctactgaattatttatattaattaaaattaaataatttttatttcaacaaaa

SEQ ID NO: 275937 - DNA, 3413 bp, Homo sapiens
agactctggccgcggcgattcaatatatccggaagcaactgtcatggctgctgtcagtgagggcccgtaatggagatcgagtcaagggttgcccagggacacttaagagccttcggcttcaaggaggcctctcaaaggacaaaggatgagactgcctggcggcagagtgccccccacaatcgtaggaactgtgtcgccgcgcttcccgttaacttgccgctaagtttttctagaaaagtcgcccttcttgccaggggtgtcctatagactttgtcatggagtgaaacagaaacaaatgaggtaaagcaaggtggctggatagaatcctccagcaatcatctgcactgcaggaacaacaaattgaacaactatccacataagaagcaccttcacaagaaccaaaaatcagcagctggcttggctttttcagaggaaacagagactctcagacatgaatactgtgacactgaccaccaggccaacttaacatcagcagatatcctgtctcagatgaagagatggagtctcgcactgtcgccccagttggagtgtaatggtgcgatctcggctcactgcaagctccgcctcccgggttcatgccattctcctgcctcagcctcctgagtagctggaactacagaatggcctgtccagaagacagccaaatacatccttcaaacagacttcactgcaggagacagagtggattcatcctgtattctccatgtagacttccatcttcatgagtactccaagaagatggttcagttgactattgcaaagtctcaggtatgtctttatcagcagcatgaaaatggactaatagtaccagtagagtggggcattgctgaaaagatacccgaaaatgtggaagcaactttggaactgggtgttgaaataatctggagggctcagaagaagataggaaaatgtaggaaagtttggaacctcctagagactgtgaatggcattgacaaaaatactgatagtgatatgaacaataaggtccaggctgaggtggtctcagatggagatgaagaccttgttgggaactgaagtaaaggtgacccttgttatgttttagcaaggagactggcagcatttcacccttgccctagagatttgtggaacttagagcttgagagagatgacttagggtatctggtggaataaatttctaagcagcaaagcattcaaaaggtgacttgggtgctgttaaaaacattctgttttaaaagggaaacaagagcataaatgtggaaaatctgcagcctgatgatgcagtagaaaagaaaaacccattttttttaaggagaaattcaagctggctgcagaaatttgcataagcagcaaggagcctaatgttaatccccaagaccatggggaaaatgtctccaggtcatgtcagagaccttcatggcagcccctcccatcacaggcccagaggcccaggaggaaaaagtggttttgtgggctgggcccagggtctctgtgctgtgtgcagcctagggacttggtgccctgtgtcccagctgctccagccatggctgaaaggagccaacatagagcttgggctgtggcttcagagggtagaggccccaagcattggcagcttccatgtgatgttgagcctgtgggtgcagagatgtcaagaattgagatttgggaacctctgcctagatttcagaatatatatggaaacacctggatgtccaggcaaaagtttgctgcaggggcagagccctcatggggaacctctcctagggcagtgtggaagggaaatgtggggcagagcccccacacagagtccctgttggggcactgcctagtggagctgtgagaagaaggccacagtcccagaacggtagaccccagaatggtagaccccagaatggtagatcaaccaccaacttgcatcttgtgcctggaaaagctacagacactcaacatcagcctgagaaagcagccaggagggaggctgtactctgcaaagccacaggggcggagctgcacaagaccatgggaacctatctcttgcatcagcatgacctgaatgtgagacatggagtcaaaggagatcattatggagctttaaaatttgactgccccactggatttcagacttgcatggaccctgtaacccctttgttttggccaatttctctcatttggaacagctgtatttacccaatacctgtaccccccattgtatctaggaggtaactagcttgcttttacaggcttgtaagtggaagggacttgccttgtctcagatgagactttggactgtggacttttgggttaatgctgaaatgagttaagactttggggaactgttgggaaggaatgattggttttgaaatgtgaggattatgaaatttggaggagcccagggaggaatgatatggtttggctgtgtccccacccaaatctcaacttgaattgtatctcccagaattcccacatgttgtgggagggacgcagtgggaggtaattgaatcatggaggccagtcttttctgtgctattctcgtgataataagtcccacaagatctggtgggtttatgaagagtttctgcttttgcttcttcctcattttgctcttgatgccaccacgtaagaagtaccttttgcctcccacctgattttgaggcctccccagccatgtggaactgtaagtccaattaaaccctttttgtttccagtctcagatatgtctttatcagcagcatggaaacgaactaatacaatcatagtttttaaaaaccaatctaaatgtaactattgaacatgattagctgtttcatccctagtagagtgacagaaggaaacatccatagacaggagtaataagaaaccagctaaacttctaaaccatttttaaaggatgcgtgtgagctggcataacctacctactctttcctatgggcctctactgagagcatggaggtaatacatctaatacactgaagaccagggcaagagagctggaagaaatccctcttaagcactccaggccttcactgagtatgaggtgctggtctccaaaggcagagggcaaggcaaggcagagagggatctcctggggcacagacaactgacaaaagaaacacttggattgttgtataagaggagtgagctttgtaaataccacgttagctggcctgctgtggaacagaatgcctatgaatgacagtagtcaggtagtggatgaacactgatctgagagcctgtaaaagaaactctttggaatgataatgtcatctagacctttgatacgcaaagtgtgattcctggacagatgtattggctttacctggcagcttgttggaaatgtaaaacctcaggcctcaccccagacctactgaattatttatattaattaaaattaaataatttttatttcaacaaaa

SEQ ID NO: 275938 - DNA, 3070 bp, Homo sapiens
agactctggccgcggcgattcaatatatccggaagcaactgtcatggctgctgtcagtgagggcccgtaatggagatcgagtcaagggttgcccagggacacttaagagccttcggcttcaaggaggcctctcaaaggacaaaggatgagactgcctggcggcagagtgccccccacaatcgtaggaactgtgtcgccgcgcttcccgttaacttgccgctaagtttttctagaaaagtcgcccttcttgccaggggtgtcctatagactttgtcatggagtgaaacagaaacaaataatggcctgtccagaagacagccaaatacatccttcaaacagacttcactgcaggagacagagtggattcatcctgtattctccatgtagacttccatcttcatgagtactccaagaagatggttcagttgactattgcaaagtctcaggtatgtctttatcagcagcatgaaaatggactaatagtaccagtagagtggggcattgctgaaaagatacccgaaaatgtggaagcaactttggaactgggtgttgaaataatctggagggctcagaagaagataggaaaatgtaggaaagtttggaacctcctagagactgtgaatggcattgacaaaaatactgatagtgatatgaacaataaggtccaggctgaggtggtctcagatggagatgaagaccttgttgggaactgaagtaaaggtgacccttgttatgttttagcaaggagactggcagcatttcacccttgccctagagatttgtggaacttagagcttgagagagatgacttagggtatctggtggaataaatttctaagcagcaaagcattcaaaaggtgacttgggtgctgttaaaaacattctgttttaaaagggaaacaagagcataaatgtggaaaatctgcagcctgatgatgcagtagaaaagaaaaacccattttttttaaggagaaattcaagctggctgcagaaatttgcataagcagcaaggagcctaatgttaatccccaagaccatggggaaaatgtctccaggtcatgtcagagaccttcatggcagcccctcccatcacaggcccagaggcccaggaggaaaaagtggttttgtgggctgggcccagggtctctgtgctgtgtgcagcctagggacttggtgccctgtgtcccagctgctccagccatggctgaaaggagccaacatagagcttgggctgtggcttcagagggtagaggccccaagcattggcagcttccatgtgatgttgagcctgtgggtgcagagatgtcaagaattgagatttgggaacctctgcctagatttcagaatatatatggaaacacctggatgtccaggcaaaagtttgctgcaggggcagagccctcatggggaacctctcctagggcagtgtggaagggaaatgtggggcagagcccccacacagagtccctgttggggcactgcctagtggagctgtgagaagaaggccacagtcccagaacggtagaccccagaatggtagaccccagaatggtagatcaaccaccaacttgcatcttgtgcctggaaaagctacagacactcaacatcagcctgagaaagcagccaggagggaggctgtactctgcaaagccacaggggcggagctgcacaagaccatgggaacctatctcttgcatcagcatgacctgaatgtgagacatggagtcaaaggagatcattatggagctttaaaatttgactgccccactggatttcagacttgcatggaccctgtaacccctttgttttggccaatttctctcatttggaacagctgtatttacccaatacctgtaccccccattgtatctaggaggtaactagcttgcttttacaggcttgtaagtggaagggacttgccttgtctcagatgagactttggactgtggacttttgggttaatgctgaaatgagttaagactttggggaactgttgggaaggaatgattggttttgaaatgtgaggattatgaaatttggaggagcccagggaggaatgatatggtttggctgtgtccccacccaaatctcaacttgaattgtatctcccagaattcccacatgttgtgggagggacgcagtgggaggtaattgaatcatggaggccagtcttttctgtgctattctcgtgataataagtcccacaagatctggtgggtttatgaagagtttctgcttttgcttcttcctcattttgctcttgatgccaccacgtaagaagtaccttttgcctcccacctgattttgaggcctccccagccatgtggaactgtaagtccaattaaaccctttttgtttccagtctcagatatgtctttatcagcagcatggaaacgaactaatacaatcatagtttttaaaaaccaatctaaatgtaactattgaacatgattagctgtttcatccctagtagagtgacagaaggaaacatccatagacaggagtaataagaaaccagctaaacttctaaaccatttttaaaggatgcgtgtgagctggcataacctacctactctttcctatgggcctctactgagagcatggaggtaatacatctaatacactgaagaccagggcaagagagctggaagaaatccctcttaagcactccaggccttcactgagtatgaggtgctggtctccaaaggcagagggcaaggcaaggcagagagggatctcctggggcacagacaactgacaaaagaaacacttggattgttgtataagaggagtgagctttgtaaataccacgttagctggcctgctgtggaacagaatgcctatgaatgacagtagtcaggtagtggatgaacactgatctgagagcctgtaaaagaaactctttggaatgataatgtcatctagacctttgatacgcaaagtgtgattcctggacagatgtattggctttacctggcagcttgttggaaatgtaaaacctcaggcctcaccccagacctactgaattatttatattaattaaaattaaataatttttatttcaacaaaa

SEQ ID NO: 275939 - DNA, 649 bp, Homo sapiens
ggctgtaggaatacggcacgagagacgagctcttacactcatagagtttaagagtgacagaaggaaacatccatagacaggagtaataagaaaccagctaaacttctaaaccatttttaaaggatgcgtgtgagctggcataacctacctactctttcctatgggcctctactgagagcatggaggtaatacatctaatacactgaagaccagggcaagagagctggaagaaatccctcttaagcactccaggccttcactgagtatgaggtgctggtctccaaaggcagagggcaaggcaaggcagagagggatctcctggggcacagacaactgacaaaagaaacacttggattgttgtataagaggagtgagctttgtaaataccacgttagctggcctgctgtggaacagaatgcctatgaatgacagtagtcaggtagtggatgaacactgatctgagagcctgtaaaagaaactctttggaatgataatgtcatctagacctttgatacgcaaagtgtgattcctggacagatgtattggctttacctggcagcttgttggaaatgtaaaacctcaggcctcaccccagacctactgaattatttatattaattaaaattaaataatttttatttcaacaaaa

SEQ ID NO: 275940 - DNA, 1425 bp, Homo sapiens
agactctggccgcggcgattcaatatatccggaagcaactgtcatggctgctgtcagtgagggcccgtaatggagatcgagtcaagggttgcccagggacacttaagagccttcggcttcaaggaggcctctcaaaggacaaaggatgagactgcctggcggcagagtgccccccacaatcgtaggaactgtgtcgccgcgcttcccgttaacttgccgctaagtttttctagaaaagtcgcccttcttgccaggggtgtcctatagactttgtcatggagtgaaacagaaacaaatgaggtaaagcaaggtggctggatagaatcctccagcaatcatctgcactgcaggaacaacaaattgaacaactatccacataagaagcaccttcacaagaaccaaaaatcagcagctggcttggctttttcagaggaaacagagactctcagacatgaatactgtgacactgaccaccaggccaacttaacatcagcagatatcctgtctcagatgaagagatggagtctcgcactgtcgccccagttggagtgtaatggtgcgatctcggctcactgcaagctccgcctcccgggttcatgccattctcctgcctcagcctcctgagtagctggaactacaggtgcccgccaccacgcccggctaattttttgtatgtatttttagtagagacaaggtttcactgtgttagccaggatggtctcgatcttctgacctcgttatccgcccgcctcagcctcccaaagtgctgagattgcaggcgtgagccaccgcacccggcctataatactacattttaaatcactaaaaattcaagatggataatgactgagtctcatgtctcctataatatagtagtaagacagttaaattctttcaagacttcagtttttgacctccacaaagacagcaattagaaattgattttctgaggtcccctttggctccaaaatgcaatgattaaagttttcattgaccctgcttactgcctttatagaaataattcccaatatgtggaaagggaatgcagagaatcttaaatgggacataatcactacagttgtttgtatttggagtatatagaattagagccaatgacaacaaggtggattttttttttattgtttagtttaatacttttacaaccttaattttaagggataagagaccattttcagcttaggtgttgatagtgctagagtttcaaagtgtggaatatgtgataaaggattttatgtaaaattagacatagtattaaaaccagagctagacagtaaagaaagcagtaaaaaatagattttactcaggaactattggaataaagtaagggacttgagtatagaactgtgctcagttctgaaaagaagaagaataaggggggattcataccaaggaacagagtggggt

SEQ ID NO: 275941 - DNA, 485 bp, Homo sapiens
agactctggccgcggcgattcaatatatccggaagcaactgtcatggctgctgtcagtgagggcccgtaatggagatcgagtcaagggttgcccagggacacttaagagccttcggcttcaaggaggcctctcaaaggacaaaggatgagactgcctggcggcagagtgccccccacaatcgtaggaactgtgtcgccgcgcttcccgttaacttgccgctaagtttttctagaaaagtcgcccttcttgccaggggtgtcctatagactttgtcatggagtgaaacagaaacaaatgaaaccactgccaagaacgatgttataaaggctttcctccacgttctcatctaggagttttatagtttcagcctcgtgaagtgccagctccctctttgccctccaccatgactgcaagtttcctgaggcctcccagaagtttcttgaggcctccccagaagccaagcagatgccagcatcatgcttcc

SEQ ID NO: 275942 - DNA, 338 bp, Homo sapiens
ccaaagaaagaagaagggagcaacagacaccaaggcctacttgggggtggagggtgggagaaaggtgaggattgaaaaactgtctatcaggtactatgctctttacctggatgatgaaataatctgtacaccaaacccctgtgacatgcagttttcccatgttacaaacctgcacacgtacccctgaaactactagaagtaccacattaatagcgtgcatctccttcttcctgccttgttacttcactttttctgttccatctcttaaagaggcatgtaaggtagaatatcaaagtattgagtgttccctttgcttgcttgctggatatccactggta

SEQ ID NO: 275943 - DNA, 271 bp, Homo sapiens
aaagcaggagcaggcatgtgacatggcaaaagcagaagcaagtgagagagagagagagggagagaggtggggaggtggggaagtgctacatacttttaaatgaccagatcttgctagaattcactcactgtcgaggacagcaccaagatgatgatggtaaaccattcatgagaaatcatctcccaccaggttctcccttgaacattgaggattgcatttcaatgtgagatttgggcggggacaaatatccaaactatatcaggggtgatat

SEQ ID NO: 275944 - DNA, 310 bp, Homo sapiens
aggtgtcctctggtggtatcctccagctgcactctccagcccacctcatctctggccccagccgaggttgctaagagtggtggctctgaaaaaaaaaggtggctcctgtgggctccttcctgttggtgggaatttgaaagaagggtagaatagataaaaaaggcctccagccatacgttaggagatgcagagtttggtcctagctccttcttcttggagctgtgtgtttctgtgtgagtgacttcatccctctaagccagtttcctcatatgggaaacaagggtggtaatccttgccccagcctggagga

SEQ ID NO: 275945 - DNA, 660 bp, Homo sapiens
tgtagccatcctccttctttgaagtctcatatgtggaaacatgcaagtgaccaaaattacaactacgaacaagtaaacaaggctattaacgacgcgatttcacaaagtggcagagttctggggaaatcccctggaaagactcaattaaagagcagtgaagagagtgcagatcccgtcactggaagttcggaaaatgcagtgtcatcttcagaactgatgtcccagactcccagtgaagttctgggtaccaacgagaatgagaaactgagccctacaagtaatacctcatatagtttagaaaaaatctccagtctggcccctcctagcatggagtactgcgttttactcttctgctgttgtatttgtggttttgaatcaaccagcaaagaaaacctcttggatcatatgaaagagcacgagggtgaaattgtaaacatcatcctgaataaggaccacaatacagctctaaacacaaattaggtggaataatgactcgagcaggaaagcagtagaagaggattccttcaccacagtttcacctttacgctgtcagacaacttcctgccacagaagaagtcgttgatgtgatttttgaggaaatgacagatgtgactttggaaccaaacttgtaataaaaggaattccaaatggaaaaaaaaa

SEQ ID NO: 275946 - DNA, 368 bp, Homo sapiens
atcaggtatcaaattgtagtggaaataatccaggcgactacaattagcagctttccccaactgaagaggcacaaaggtaagagccagctgatctcctgagggccaggaacatgaagaggtacatcaaccaactgactgtggcaaagaagcagtgtgagaagagaatccgaatcctgggaggccctgcctatgaccagcaagaggatggggccctggatgagggggaagggcctcaaagccagaaggtagaactttatagtttcttgttttgaccctaccaagtttattataaatgctgatagaactacatataaagactttcaacttagaataaaaaaagaaaaatttttgaagtgattgttccccgc

SEQ ID NO: 275947 - DNA, 2430 bp, Homo sapiens
atcaggtatcaaattgtagtggaaataatccaggcgactacaattagcagctttccccaactgaagaggcacaaaggtaagagccagctgatctcctgagggccaggaacatgaagaggtacatcaaccaactgactgtggcaaagaagcagtgtgagaagagaatccgaatcctgggaggccctgcctatgaccagcaagaggatggggccctggatgagggggaagggcctcaaagccagaagattcttcagtttgaagatatcttggccaatacgttctaccgagagcactttggaatgtacatggaaaggatggacaaaagagctctgattagtttttgggaatctgtggaacatttaaagaatgctaacaagaatgaaattccacaattagttggtgaaatttatcagaatttctttgtggagagcaaagaaatatctgtggaaaaatcactttacaaagaaattcagcagtgtcttgtaggaaataaaggtattgaagtattctacaaaatccaggaagatgtttatgagaccctaaaggataggtattacccttcatttattgtcagtgacctgtatgagaaattgttgataaaagaggaagaaaaacatgcctcacagatgatttccaacaaggatgagatgggcccaagagatgaggctggtgaggaagccgtggatgatggtaccaatcagatcaatgaacaagccagttttgctgtaaacaaactgcgagaactaaatgagaaacttgaatataaaaggcaagctctaaattctattcaaaatgcaccaaaacctgacaagaagattgtttccaagttgaaggatgaaataatcctaatagagaaagaacgcacagaccttcagctgcacatggcaagaacggattggtggtgtgaaaaccttggcatgtggaaagcctccatcaccagtggagaggttacagaagagaatggtgagcaattgccatgttactttgtcatggtaagcctacaagaagttggaggagttgaaactaagaactggacggtccccagaaggctcagcgagtttcagaatttacaccggaaactcagtgagtgcgtcccttctttaaaaaaagtccagttgccttctcttagcaagctgcctttcaaatctatagatcaaaagtttatggaaaagtcgaagaatcaattaaataagtttttacagaatctgctttcagatgaaagactgtgtcagagtgaagcactttatgccttcttgagcccttctcctgactacctcaaggttatcgacgtgcaggggaaaaaaaattctttttcattatcctcatttttggaaagacttcctcgcgacttcttctcccaccaggaggaggagacagaggaggacagtgacctgtcagattatggtgatgatgtggatgggaggaaagacgccttggctgaaccatgtttcatgttgattggggagatttttgaacttcgaggaatgtttaaatgggtgagaagaacattaattgccctcgttcaggtcacttttggaagaaccatcaacaaacaaatccgggacacagtcagctggattttcagtgagcaaatgttggtttactacatcaatattttccgggatgctttttggccaaatgggaagttggcaccaccgaccacaatcagaagcaaagagcaaagtcaggaaacaaaacagagagcacagcaaaagctgcttgaaaacattccagatatgcttcagagccttgttggacagcaaaatgcccgccacggtataataaaaatattcaatgcactgcaagaaacaagagccaacaagcatctgttatatgcgctgatggaactgctgctaattgaactgtgtcctgagctgagagttcatttagatcaacttaaagctggccaagtttgagactacacaaataaaccaccagaaaaatgtctgtgtaataatagacatgaaacattttcctcttttccacagagggcttaactgagaaccgtattgatttttattttagttacctccctctagttttatgtgaaattagtagaatcagggaggacgggacttatgctgtggtaggcaacagaaaaaaacttctattgattttaatttaatatgaatactttaaagatcaacataccgattgaaatacaaatgttaatatgtgagaacctaggaagtattttaaatatttatgaaaatattttgttttaaaatgaactatgaatattgtacagttaatttcctcactgaggactgtgaacattcttatattatttcatgtatattgaagaacattgttatgcaatgctttgtgtaaagttattgtgaagattttattgtctttatttttaccaaagatttcccatagtttgagcattcaaagcaataaaatataaaaatgaatcacagtgctcta

SEQ ID NO: 275948 - DNA, 2031 bp, Homo sapiens
atcaggtatcaaattgtagtggaaataatccaggcgactacaattagcagctttccccaactgaagaggcacaaaggtaagagccagctgatctcctgagggccaggaacatgaagaggtacatcaaccaactgactgtggcaaagaagcagtgtgagaagagaatccgaatcctgggaggccctgcctatgaccagcaagaggatggggccctggatgagggggaagggcctcaaagccagaagattcttcagtttgaagatatcttggccaatacgttctaccgagagcactttggaatgtacatggaaaggatggacaaaagagctctgattagtttttgggaatctgtggaacatttaaagaatgctaacaagaatgaaattccacaattagttggtgaaatttatcagaatttctttgtggagagcaaagaaatatctgtggaaaaatcactttacaaagaaattcagcagtgtcttgtaggaaataaaggtattgaagtattctacaaaatccaggaagatgtttatgagaccctaaaggataggtattacccttcatttattgtcagtgacctgtatgagaaattgttgataaaagaggaagaaaaacatgcctcacagatgatttccaacaaggatgagatgggcccaagagatgaggctggtgaggaagccgtggatgatggtaccaatcagatcaatgaacaagccagttttgctgtaaacaaactgcgagaactaaatgagaaacttgaatataaaaggcaagctctaaattctattcaaaatgcaccaaaacctgacaagaagattgtttccaagttgaaggatgaaataatcctaatagagaaagaacgcacagaccttcagctgcacatggcaagaacggattggtggtgtgaaaaccttggcatgtggaaagcctccatcaccagtggagaggttacagaagagaatggtgagcaattgccatgttactttgtcatggtaagcctacaagaagttggaggagttgaaactaagaactggacggtccccagaaggctcagcgagtttcagaatttacaccggaaactcagtgagtgcgtcccttctttaaaaaaagtccagttgccttctcttagcaagctgcctttcaaatctatagatcaaaagtttatggaaaagtcgaagaatcaattaaataagtttttacagaatctgctttcagatgaaagactgtgtcagagtgaagcactttatgccttcttgagcccttctcctgactacctcaaggttatcgacgtgcaggggaaaaaaaattctttttcattatcctcatttttggaaagacttcctcgcgacttcttctcccaccaggaggaggagacagaggaggacagtgacctgtcagattatggtgatgatgtggatgggaggaaagacgccttggctgaaccatgtttcatgttgattggggagatttttgaacttcgaggaatgtttaaatgggtgagaagaacattaattgccctcgttcaggtcacttttggaagaaccatcaacaaacaaatccgggacacagtcagctggattttcagtgagcaaatgttggtttactacatcaatattttccgggatgctttttggccaaatgggaagttggcaccaccgaccacaatcagaagcaaagagcaaagtcaggaaacaaaacagagagcacagcaaaagctgcttgaaaacattccagatatgcttcagagccttgttggacagcaaaatgcccgccacggtataataaaaatattcaatgcactgcaagaaacaagagccaacaagcatctgttatatgcgctgatggaactgctgctaattgaactgtgtcctgagctgagagttcatttagatcaacttaaagctggccaagtttgagactacacaaataaaccaccagaaaaatgtctgtgtaataatagacatgaaacattttcctcttttccacagtgcgctggggacctctagatcgaccacagcagcagctgccgcg

SEQ ID NO: 275949 - DNA, 2219 bp, Homo sapiens
atcaggtatcaaattgtagtggaaataatccaggcgactacaattagcagctttccccaactgaagaggcacaaaggtaagagccagctgatctcctgagggccaggaacatgaagaggtacatcaaccaactgactgtggcaaagaagcagtgtgagaagagaatccgaatcctgggaggccctgcctatgaccagcaagaggatggggccctggatgagggggaagggcctcaaagccagaagattcttcagtttgaagatatcttggccaatacgttctaccgagagcactttggaatgtacatggaaaggatggacaaaagagctctgattagtttttgggaatctgtggaacatttaaagaatgctaacaagaatgaaattccacaattagttggtgaaatttatcagaatttctttgtggagagcaaagaaatatctgtggaaaaatcactttacaaagaaattcagcagtgtcttgtaggaaataaaggtattgaagtattctacaaaatccaggaagatgtttatgagaccctaaaggataggtattacccttcatttattgtcagtgacctgtatgagaaattgttgataaaagaggaagaaaaacatgcctcacagatgatttccaacaaggatgagatgggcccaagagatgaggctggtgaggaagccgtggatgatggtaccaatcagatcaatgaacaagccagttttgctgtaaacaaactgcgagaactaaatgagaaacttgaatataaaagattgtttccaagttgaaggatgaaataatcctaatagagaaagaacgcacagaccttcagctgcacatggcaagaacggattggtggtgtgaaaaccttggcatgtggaaagcctccatcaccagtggagaggttacagaagagaatggtgagcaattgccatgttactttgtcatggtaagcctacaagaagttggaggagttgaaactaagaactggacggtccccagaaggctcagcgagtttcagaatttacaccggaaactcagtgagtgcgtcccttctttaaaaaaagtccagttgccttctcttagcaagctgcctttcaaatctatagatcaaaagtttatggaaaagtcgaagaatcaattaaataagtttttacagaatctgctttcagatgaaagactgtgtcagagtgaagcactttatgccttcttgagcccttctcctgactacctcaaggttatcgacgtgcaggggaaaaaaaattctttttcattatcctcatttttggaaagacttcctcgcgacttcttctcccaccaggaggaggagacagaggaggacagtgacctgtcagattatggtgatgatgtggatgggaggaaagacgccttggctgaaccatgtttcatgttgattggggagatttttgaacttcgaggaatgtttaaatgggtgagaagaacattaattgccctcgttcaggtcacttttggaagaaccatcaacaaacaaatccgggacacagtcagctggattttcagtgagcaaatgttggtttactacatcaatattttccgggatgctttttggccaaatgggaagttggcaccaccgaccacaatcagaagcaaagagcaaagtcaggaaacaaaacagagagcacagcaaaagctgcttgaaaacattccagatatgcttcagagccttgttggacagcaaaatgcccgccacggtataataaaaatattcaatgcactgcaagaaacaagagccaacaagcatctgttatatggaacttcaacaaatacgcttctgtctcctagagaccatgattgaaattttctgaaataaggcctgaactttggaatttgtaaaagatcctcgggtgattttaacatgcagagaagcttgggaaccactgctgtaatatcagagtcagccaagggactcagaagactcccccactcaggctgaacaatctgtgttccacaaacactgctctaccaagtctgctatgatgtaattctgactcgtggatgtgatggacctaagatgtgcacagctttttggtttttctttttttaaaaaaaatctaaacttaagagttagtactcataatgatctcccttacaccccctccactaccacaccccttgctttttagtatttactttgagatgtgaaacgcatttgggatctaaataaattgatcacatggatt

SEQ ID NO: 275950 - DNA, 902 bp, Homo sapiens
gcacataggatttaaggcaactcgaacctattattaactccttaaaagacatacttatctagactattttggagcctgcgattctagtactggtgagtctccaccggcagcatgactacctgaagattcgctagctatttgcaaggttggcacgccactaccacatttagttggctcctaaggtatgtcttacaccaaacttcccatatgtggaaggcacccataactgaagacacatgctctactctggatgtggggaatttgcggagcgctgcaagaaacaagagccaacaagcatctgttatatgcgctgatggaactgctgctaattgaactgtgtcctgagctgagagttcatttagatcaacttaaagctggccaagtttgagactacacaaataaaccaccagaaaaatgtctgtgtaataatagacatgaaacattttcctcttttccacagagggcttaactgagaaccgtattgatttttattttagttacctccctctagttttatgtgaaattagtagaatcagggaggacgggacttatgctgtggtaggcaacagaaaaaaacttctattgattttaatttaatatgaatactttaaagatcaacataccgattgaaatacaaatgttaatatgtgagaacctaggaagtattttaaatatttatgaaaatattttgttttaaaatgaactatgaatattgtacagttaatttcctcactgaggactgtgaacattcttatattatttcatgtatattgaagaacattgttatgcaatgctttgtgtaaagttattgtgaagattttattgtctttatttttaccaaagatttcccatagtttgagcattcaaagcaataaaatataaaaatgaatcacagtgctcta

SEQ ID NO: 275951 - DNA, 777 bp, Homo sapiens
attgaatagaaataaccacctatgaagtaggaggcatcttctaaattatttttacttaactcttgccacaatattatgaaatttctacttgatatcttcattgatgaaatggtgggtttaagtatcttgcctaataccacatagataggaaaagctagaacaagataaaaacccagatctgactggtttgcaaatgtgagtgctttctcactgaaccataacatctctctgactgtttttgtacttgttttagccctacctcagtacctgtcctaactctgaaggaccaaacttgtcttccaagacctggagcatactaagatagaaggaagcagccacgtgacccactcaggagcttagctgtgccgtggaaggaacaggacctcaaagcagatgccagactcctctctgtaatgtgtccattagctacaaagaggcccactggtataatgtaactcaagctacagcctctaacctcacttgttctgattttcagtctcttgattctttcctgtttagctctcggttctacttcagctactcatctgtgatgttcccctgcctccctattccagtgatcagccttgactttcttagtttctggctagtctctgttagagcctctgcaggaagggccagccccagcatacgccagggttctacagcatcttacacaagtggtgcaaatgcagctccaaggaactcttgtttttataatcctctaaccacaggaagtctgttgatgttgctattagcaaaataaaataaaataaaata

SEQ ID NO: 275952 - DNA, 526 bp, Homo sapiens
ctatgtttatgttttaatatggctttgatgctctggaagttttaattttaaagtaatttagggttcccaaacttacctgacattggaatcccacagggaacttcaacaaatacgcttctgtctcctagagaccatgattgaaattttctgaaataaggcctgaactttggaatttgtaaaagatcctcgggtgattttaacatgcagagaagcttgggaaccactgctgtaatatcagagtcagccaagggactcagaagactcccccactcaggctgaacaatctgtgttccacaaacactgctctaccaagtctgctatgatgtaattctgactcgtggatgtgatggacctaagatgtgcacagctttttggtttttctttttttaaaaaaaatctaaacttaagagttagtactcataatgatctcccttacaccccctccactaccacaccccttgctttttagtatttactttgagatgtgaaacgcatttgggatctaaataaattgatcacatggatt

SEQ ID NO: 275953 - DNA, 503 bp, Homo sapiens
atcaggtatcaaattgtagtggaaataatccaggcgactacaattagcagctttccccaactgaagaggcacaaaggtaagagccagctgatctcctgagggccaggaacatgaagaggtacatcaaccaactgactgtggcaaagaagcagtgtgagaagagaatccgaatcctgggaggccctgcctatgaccagcaagaggatggggccctggatgagggggaagggcctcaaagccagaagctctcggttctacttcagctactcatctgtgatgttcccctgcctccctattccagtgatcagccttgactttcttagtttctggctagtctctgttagagcctctgcaggaagggccagccccagcatacgccagggttctacagcatcttacacaagtggtgcaaatgcagctccaaggaactcttgtttttataatcctctaaccacaggaagtctgttgatgttgctattagcaaaataaaataaaataaaata

SEQ ID NO: 275954 - DNA, 292 bp, Homo sapiens
agatatggtggtatgtgactctccccctagggcccaagagatgaggctggtgaggaagccgtggatgatggtaccaatcagatcaatgaacaagccagttttgctgtaaacaaactgcgagaactaaatgagaaacttgaatataaaaggcaagctctaaattctattcaaaatgcaccaaaacctgacaagaaggtaactctttgctttcaaggttgtctttgaaagttaacatttgtctaatttggtagttttcagttgaggttgagaagtgtcagtttcttttaaaata

SEQ ID NO: 275955 - DNA, 2384 bp, Homo sapiens
atcaggtatcaaattgtagtggaaataatccaggcgactacaattagcagctttccccaactgaagaggcacaaaggtaagagccagctgatctcctgagggccaggaacatgaagaggtacatcaaccaactgactgtggcaaagaagcagtgtgagaagagaatccgaatcctgggaggccctgcctatgaccagcaagaggatggggccctggatgagggggaagggcctcaaagccagaagattcttcagtttgaagatatcttggccaatacgttctaccgagagcactttggaatgtacatggaaaggatggacaaaagagctctgattagtttttgggaatctgtggaacatttaaagaatgctaacaagaatgaaattccacaattagttggtgaaatttatcagaatttctttgtggagagcaaagaaatatctgtggaaaaatcactttacaaagaaattcagcagtgtcttgtaggaaataaaggtattgaagtattctacaaaatccaggaagatgtttatgagaccctaaaggataggtattacccttcatttattgtcagtgacctgtatgagaaattgttgataaaagaggaagaaaaacatgcctcacagatgatttccaacaaggatgagatgggcccaagagatgaggctggtgaggaagccgtggatgatggtaccaatcagatcaatgaacaagccagttttgctgtaaacaaactgcgagaactaaatgagaaacttgaatataaaagattgtttccaagttgaaggatgaaataatcctaatagagaaagaacgcacagaccttcagctgcacatggcaagaacggattggtggtgtgaaaaccttggcatgtggaaagcctccatcaccagtggagaggttacagaagagaatggtgagcaattgccatgttactttgtcatggtaagcctacaagaagttggaggagttgaaactaagaactggacggtccccagaaggctcagcgagtttcagaatttacaccggaaactcagtgagtgcgtcccttctttaaaaaaagtccagttgccttctcttagcaagctgcctttcaaatctatagatcaaaagtttatggaaaagtcgaagaatcaattaaataagtttttacagaatctgctttcagatgaaagactgtgtcagagtgaagcactttatgccttcttgagcccttctcctgactacctcaaggttatcgacgtgcaggggaaaaaaaattctttttcattatcctcatttttggaaagacttcctcgcgacttcttctcccaccaggaggaggagacagaggaggacagtgacctgtcagattatggtgatgatgtggatgggaggaaagacgccttggctgaaccatgtttcatgttgattggggagatttttgaacttcgaggaatgtttaaatgggtgagaagaacattaattgccctcgttcaggtcacttttggaagaaccatcaacaaacaaatccgggacacagtcagctggattttcagtgagcaaatgttggtttactacatcaatattttccgggatgctttttggccaaatgggaagttggcaccaccgaccacaatcagaagcaaagagcaaagtcaggaaacaaaacagagagcacagcaaaagctgcttgaaaacattccagatatgcttcagagccttgttggacagcaaaatgcccgccacggtataataaaaatattcaatgcactgcaagaaacaagagccaacaagcatctgttatatgcgctgatggaactgctgctaattgaactgtgtcctgagctgagagttcatttagatcaacttaaagctggccaagtttgagactacacaaataaaccaccagaaaaatgtctgtgtaataatagacatgaaacattttcctcttttccacagagggcttaactgagaaccgtattgatttttattttagttacctccctctagttttatgtgaaattagtagaatcagggaggacgggacttatgctgtggtaggcaacagaaaaaaacttctattgattttaatttaatatgaatactttaaagatcaacataccgattgaaatacaaatgttaatatgtgagaacctaggaagtattttaaatatttatgaaaatattttgttttaaaatgaactatgaatattgtacagttaatttcctcactgaggactgtgaacattcttatattatttcatgtatattgaagaacattgttatgcaatgctttgtgtaaagttattgtgaagattttattgtctttatttttaccaaagatttcccatagtttgagcattcaaagcaataaaatataaaaatgaatcacagtgctcta

SEQ ID NO: 275956 - DNA, 229 bp, Homo sapiens
aattgatggagccaaaagaaatttagacagaacactgggtaaaagaacacctctattaccaccacctgattatcctcaaactatgaccagtgaaatgaaaaaaaaaggagtgagttcaagtttttatatttcttgtttgaaaatgttcaaagaaattattgcaaagtagtttcatctaagaccacctgctaagtcccattctagaaaataaataaatttagaaactgag

SEQ ID NO: 275957 - DNA, 604 bp, Homo sapiens
tctttctcctccctccccccggttgcactctgttatgaagaatgaatgctctggatatatctcacggtggttattcttccccttcttttgccagagccattagggaatttttcttggctcttcaccatgagaggctgatggcattcccagaggcaaaacccataagagtgtggtgcttcctcagactgcagcccccaggagtttcctgctcccgtattataatgcccacactcagcctcaaacaattaatcaatattaccattttactgttcctaccagttcatggtcccagcagcttctgttccagctaagctgatctcagctctgtctccctggatctacctgtttccccatattatgggatattggtttactttgtcatcttacttcgcagatgagtcaagaaaagtgactgacttttagttttctcagtttttccttacggaaaggatggaagtgatgaattctaaacttttttacatgtcagagctgaaactggaagtccagcattgagatttcttactctaaagtagaagaaggtatggacatggaaagagaatactatcactttctacctgagggatttggagagaaaaaatagaaa

SEQ ID NO: 275958 - DNA, 463 bp, Homo sapiens
  misc_feature (399)..(399): n is a, c, g, or t
  misc_feature (402)..(402): n is a, c, g, or t
  misc_feature (426)..(426): n is a, c, g, or t
  misc_feature (442)..(442): n is a, c, g, or t
tcaataaagcatgccccacccccccaaattttacattggttaacaaagccagtttctaacattttgctaacatttgagcctcttctatgtgcttgtgtagcaaacagctagtcacttccattagaataaagagtagaataccaaggggaatagtgcaagaaaacgttggaggattgattggggctagatttgagagggccttaactgccaacctaaaaatgttggtatttattttctagggtactaggagccatcacaataattcaattagtatagtgtgatatatttgcaatgtattttaatgatgtatagctcagattaatttcaaagcattacatattattcattgcattttactttactgatttttaaattgtttggctttggtcactgcccatntcntttaagggccccataaatgatatnaattgagtctttttanggggcctaagtgtttcctttt

SEQ ID NO: 275959 - DNA, 576 bp, Homo sapiens
acaggcgtgagacaccgcgcctggcctgatgcagctagtagttttttaatgaaccttaaattataagggaggttgttgcttttatagtaactttactgagctcaaatgaagaaattagtttcctccattttcctttagaggagtatgatataattttataatttgaaagaagggttggtattcactttttctggaattttcctttctaggtatgatttatgacctagtatcttttgagtaatgtctccttcctttctttttcatcaccagctgtccagttagaagcaagtctggtcatacctgcttttgtgtaccatgtcttacagtagtagttgtcttggggctgtctccctactcatgcccttcttgtcgactttcacctgggtcatgagaatggcttcaaaataggtcttctgcttcagatttctcttaattttcctgtacactgtttggactggcctttccaaaacacctttcaggggctttgtgatgctttcaggatcaagttcagacactaagcttggcagtccaactccttctaccttgaccttaacccccctttgcagttattttctt

SEQ ID NO: 275960 - DNA, 437 bp, Homo sapiens
ctgggtgacagagtgagactctgtcccccccaaaaaaattaaattaaattaaaaaaataaaatcagctctaactctcaactagttcctgcagcattctacttattgattttccttttaacttattatctacatatgtttacctttatggtttgtagtttatcaagtggggaagatcatagtgacacaagataaatttactgattacataatggaatattgggtgggcgcggtggctcacacctgtaatcccagcactttgggaggtcgaggcgggtggatcacctgaggtcaggagttagagaccagcctgaccaacatggtgaaccctgtctctaccaaaaatacaaaaattagtcaggcgtggtggcacgtgcctgtaattccagctgctcaggaggctgaggcaggagaactgcttaacccaccactgcactct

SEQ ID NO: 275961 - DNA, 284 bp, Homo sapiens
tattatagaaatgaatcatatagtatataacacttttgattgtttttttctgcttagcataattatctggcgattaattcaaccttttgctgtatcaacaattctttcttttatagattaacttagagagaataggtccatttaggagaggccataatgtctccatcaattagtctttttaaaagtcccatggaaatgttttgctgttttctttattgagttcttataagttttttaaaattttatttttatataacatatacaaataaatgtgttatggatct

SEQ ID NO: 275962 - DNA, 414 bp, Homo sapiens
tatttttcacaagaacccttaacccccttacttcgccacaagagggtgcacatttccttaggaatacagtaacccagggaaacctgctcaagttcctctaggcagctgctcacctctgctccggcacctctctccctagccatggcagtaatgagcatctgcacatagttacataggtgaaacgtgttcacatactttatctcattcaattccaacaacagctctgtgagggcgggttgggcaacttatcaaccccattttatagaagaggaaacacactcagaggtgaagtgacttgcccaaggtcagagagatcataatgctagagcccaaatgcaaactcacgttgtctagttcccaaatcctgtatacattttccttacctccctattaaagcataatcaaaaattcaaa

SEQ ID NO: 275963 - DNA, 562 bp, Homo sapiens
tcatatgcagagaattttatttgttaagcatactgtactcagagtcaggccaatcagaaataatataagaaaagaaaaactggttaactctttctatctatattagtctaaggagtaccagggctaacaaatcttgatagtatgctaatttgttgtgtttcaaaacttgctctttatcctgttgcgaaagctgaattcaatagaaaaatgattatatttttaaaataaatgaattacatgagcccacagcactgattttaaagtaggacttgcattgatacagtttattgaataaagcaaaaatttttacaagtattttataagtttaaatagcaaattgaaattgtgcgaaaataatgattttgtgattattaaacattcattgttttaagagtgcatgtaacaaaaagtatctgtagttacctaacactataatagttaaaatacctgttaatatgtataagttaactctacatttttgtaaaagtttacaacattgtcattgttgtgttcatttatttattttaaacttccttttttagtaaaaatgtaaggccattta

SEQ ID NO: 275964 - DNA, 630 bp, Homo sapiens
ggggggatttattctgtctccagaagcagcatttcactttcctgaacatcagctcttctcccctggattgcagggtctaggtcttgttctctgtctgcttccagcttttggcattttgacagcacataggacatgcttggagaacgttttcttgagttaactgaattcaggacactgacttggggctggaaaggcaaagtgaggaagaaagtattcccctttcagaagctccccagtctgccttaagaaacaaaggcagccctgtcatctgcccaggactttacagtttataaagtgatttctcatcctttctcctttcttgtattgcacaaatatcgaacgagaacctgcagtgtgccactgtgcagggtgcctagaataaaggagaaaagccactgtgctttctctgaaggaatcacagggagtgaagctagcttcatggatgccagaatttcacagatgaagggactggaggcttggagcaattgcattgcttgagatcccccctgctcatggatggtggctcccaaatcaggacatgagtcttctgaatcccttaaacctgccctgtgcctgcctgttctcccagcacattctctgtactctcttgtgctgctcctcaccccctct

SEQ ID NO: 275965 - DNA, 571 bp, Homo sapiens
gtgttgtgcctgaaccttatctacgaattatggtcccaagtgggtactggtgcaggtcaccctcagctctgtggtccctctgagaatacctgctggcaagtaggcaggactggtgagctgagcgtcacaaccgccaatgtcactgagcactccctatgagggagcaagaggtcaagcatttcaaccaccccagtgtagagagaggaggaaagagagctctgagaggttaggtgactagcccgaggtcacacagcttgcatgtgggaggctgggcctcgaggactctctgacctcccctttctcctctggagcaggccatgagatcatcctatgagaggcgccttccctatacccagagggaaggggcaaactcatctctgaagatggcatgtccccctagtttcctgccccaggctcactcccctgtccgtcgcacttcccacgcctctccactcttcttccaacctggcatcagcacactcagtggactggatctctgggccttcgtttccttacgaaggtacccatgtcatgtgcaacttctagtaaataaactggtatgtttttctct

SEQ ID NO: 275966 - DNA, 552 bp, Homo sapiens
aatcagtacagaaaaagtgatttcaatggggcatccgtaaaggaaaacaattaacttttcaatgaacaacgaacttttttttgacttgttagttgtatttgtatcaaaaaacacaatcttaatcatcatcacgggtatctactactttctatttgtgtagcattttatatagtcaacattttcacaagcattttcaattagttacaaataccttgtaaggtagaaacaaggcctcactgtttaaaacaaggaagctgaggtttcaggccagtagggccagaactcaaatcatctggttcttcatccagtgtttttcaatattccacactgccttggtgaagtctccttagtactttcccaggcatcactaaaaggagtttaaatttcttttttctggagcatgtaggaaaaggataaacagttggctttttttatttttagatcaattcaaaagactacttcttggaaacagacctacagatagacattttggacctttcctatgcatggttttcacgaagctaaatagaacacctcctcctccatcaacac

SEQ ID NO: 275967 - DNA, 4648 bp, Homo sapiens
agttttgtttacttaccatggcaatagtggccttttagccactaaaagtgatgaaactggatggacaacgttttttgactatgacagtgaaggtcgtctgacaaatgttacgtttccaactggagtggtcacaaacctgcatggggacatggacaaggctatcacagtggacattgagtcatctagccgagaagaagatgtcagcatcacttcaaatctgtcctcgatcgattctttctacaccatggttcaagatcagttaagaaacagctaccagattggttatgacggctccctcagaattatctacgccagtggcctggactcacactaccaaacagagccgcacgttctggctggcaccgctaatccgacggttgccaaaagaaacatgactttgcctggcgagaacggtcaaaacttggtggaatggagattccgaaaagagcaagcccaagggaaagtcaatgtctttggccgcaagctcagggttaatggcagaaacctcctttcagttgactttgatcgaacaacaaagacagaaaagatctatgacgaccaccgtaaatttctactgaggatcgcctacgacacgtctgggcacccgactctctggctgccaagcagcaagctgatggccgtcaatgtcacctattcatccacaggtcaaattgccagcatccagcgaggcaccactagcgagaaagtagattatgacggacaggggaggatcgtgtctcgggtctttgctgatggtaaaacatggagttacacatatttagaaaagtccatggttcttctgcttcatagccagcggcagtacatcttcgaatacgatatgtgggaccgcctgtctgccatcaccatgcccagtgtggctcgccacaccatgcagaccatccgatccattggctactaccgcaacatatacaaccccccggaaagcaacgcctccatcatcacggactacaacgaggaagggctgcttctacaaacagctttcttgggtacaagtcggagggtcttattcaaatacagaaggcagactaggctctcagaaattttatatgatagcacaagagtcagttttacctatgatgaaacagcaggagtcctaaagacagtaaacctccagagtgatggttttatttgcaccattagatacaggcaaattggtcccctgattgacaggcagattttccgctttagtgaagatgggatggtaaatgcaagatttgactatagctatgacaacagctttcgagtgaccagcatgcagggtgtgatcaatgaaacgccactgcctattgatctgtatcagtttgatgacatttctggcaaagttgagcagtttggaaagtttggagttatatattatgatattaaccagatcatttctacagctgtaatgacctatacgaagcactttgatgctcatggccgtatcaaggagattcaatatgagatattcaggtcgctcatgtactggattacaattcagtatgataacatgggtcgggtaaccaagagagagattaaaatagggccctttgccaacaccaccaaatatgcttatgaatatgatgttgatggacagctccaaacagtttacctcaatgaaaagataatgtggcggtacaactacgatctgaatggaaacctccatttactgaacccaagtaacagtgcgcgtctgacaccccttcgctatgacctgcgagacagaatcactcgactgggtgatgttcaatatcggttggatgaagatggtttcctacgtcaaaggggcacggaaatctttgaatatagctccaaggggcttctaactcgagtttacagtaaaggcagtggctggacagtgatctaccgttatgacggcctgggaaggcgtgtttctagcaaaaccagtctaggacagcacctgcagtttttttatgctgacttaacttatcccactaggattactcatgtctacaaccattcgagttcagaaattacctccctgtattatgatctccaaggacatctttttgccatggaaatcagcagtggggatgaattctatattgcatcggataacacagggacaccactggctgtgttcagtagcaatgggcttatgctgaaacagattcagtacactgcatatggggaaatctattttgactctaatattgactttcaactggtaattggatttcatggtggcctgtatgacccactcaccaaattaatccactttggagaaagagattatgacattttggcaggacggtggacaacacctgacatagaaatctggaaaagaattgggaaggacccagctccttttaacttgtacatgtttaggaataacaaccctgcaagcaaaatccatgacgtgaaagattacatcacagatgttaacagctggctggtgacatttggtttccatctgcacaatgctattcctggattccctgttcccaaatttgatttaacagaaccttcttacgaacttgtgaagagtcagcagtgggatgatataccgcccatcttcggagtccagcagcaagtggcgcggcaggccaaggccttcctgtcgctggggaagatggccgaggtgcaggtgagccggcgccgggccggcggcgcgcagtcctggctgtggttcgccacggtcaagtcgctgatcggcaagggcgtcatgctggccgtcagccagggccgcgtgcagaccaacgtgctcaacatcgccaacgaggactgcatcaaggtggcggccgtgctcaacaacgccttctacctggagaacctgcacttcaccatcgagggcaaggacacgcactacttcatcaagaccaccacgcccgagagcgacctgggcacgctgcggttgaccagcggccgcaaggcgctggagaacggcatcaacgtgacggtgtcgcagtccaccacggtggtgaacggcaggacgcgcaggttcgcggacgtggagatgcagttcggcgcgctggcgctgcacgtgcgctacggcatgaccctggacgaggagaaggcgcgcatcctggagcaggcgcggcagcgcgcgctcgcccgggcctgggcgcgcgagcagcagcgcgtgcgcgacggcgaggagggcgcgcgcctctggacggagggcgagaagcggcagctgctgagcgccggcaaggtgcagggctacgacgggtactacgtactctcggtggagcagtaccccgagctggccgacagcgccaacaacatccagttcctgcggcagagcgagatcggcaggaggtaacgcccgggccgcgcccgccgagccgctcacgccctgcccacattgtcctgtggcacaacccgagtgggactctccaacgcccaagagccttcctcccgggggaatgagactgctgttacgacccacacccacaccgcgaaaacaaggaccgcttttttccgaatgaccttaaaggtgatcggctttaacgaatatgtttacatatgcatagcgctgcactcagtcggactgaacgtagccagaggaaaaaaaaatcatcaaggacaaaggcctcgacctgttgcgctgggccgtctgttccttctaggcactgtatttaactaactttaaaaaagaaaaaaaaatgtatacagtgtttccaaatagtcccgaattgtcgacctttgcttacaagaagtagtctgtctgcataggatgtgatagctatctctgttcattttacaatgtggggcaaagttactgtttctagacaacccaactgctttccctgtgcagctttgtagaaggacattggcacagtgacttctgcggcggggatttattaatggattttacaatgctaacgtggtttcccttcggggaaaaaactggcaactagaatccttgtcactgataagcaaaggaaatcctgatttttttgtaaattatgtgagacaagttgtttatggatttttatatgaattacaatttactgtacatcaaatcttagtctcagaggagttaatttatgtaaagtgtttaaaaatttatacttaaaaataaaatgataaaaacgtgaactgtgtgatttttttaaaaggattgcaccttttgttatctgttatagctgtacagtatgaattattatattgtagagatataacaacttatgcctataatgtccagaagtgttaatatttttgtattaggttgaaaaaatgtgcaagcttctatcactagatggataggaccgtgcaattctaggtgggtggcgaatcagagagctcctttctcttccctctctcacgcatcaggccagtgtcctcagcattgtcaactgagaggcacagtagacaactagggctggtggaatgtaagggaagaagattgaaaaaacgggaggaagggttctctggccctctctcaaccttgcaagtcaatggggagttgttgatataattaaccccgaggtttttactgttactgttccaaagctctgtctcttgatgggaggagagaccacatcagatgctggggaaataggaggaggaaaggttctgatgtagtcgtgatcctaaacacgtgtcttaagatctaggaaagacagcagaaaccgagcagtggtgggtgagccagatggagccggtcagggttactctaagc

SEQ ID NO: 275968 - DNA, 810 bp, Homo sapiens
gggaagaggtatctcaccgacttctgcccttccatctcaaacaaagacacacacacactctctctctctctctctctctctctctctctgtctctctgtctctctctctttctggcatttgtccccagagagtgcctagagacttcacagccttggccctggaaacccctagacagccgctatgttgccaggcacggctctgggcactgaggctacagcaatgaaaaaatcagccaagttctctgccttcatggtgctcacattctaggcagagaaagacagatgatcaacaagtgaaaaaatcataaagctcaggtcatggtgtggcaagtattagagtggagagcgatggggtggggtgggggcgctgttttatatggggtggtccaaaaatatcttggtgaggtggtgacatttgagtggaaacctggacagcaagaagctagtcgtgctttggggtcaaaaggactccaaaatttcagttttttaaatggaaaacatgtgtttacccataaacattaaagagcagggaaattagaaaaaaactcgtgtccactgtgacccctgttcccatgctgatctgtgtttcctccccagtcatctttcttgttccagagaggtggggctggatgtctccatctctgtctcaactttatgtgcactgagctgcaacttcttacttccctactgaaaataagaatctgaatataaatttgttttctcaaatatttgctatgagaggttgatggattaattaaataagtcaattcctggaatttgaaagagcaaataaagacctgagaaccttcc

SEQ ID NO: 275969 - DNA, 911 bp, Homo sapiens
gagtgggcctgcattctgcggaggttgttgaggaaggagggagtagatggagggctcttttcaccagaagacccccaggcacaagcagcccaccttactgatggtcagagcatccagaagaagtggcaagacttcagctgtcctcaaagcaggaagacagagtgtttctggcagaaagaacagcacaagcaaagatctggtaaccctaggtgcctccagtttgagggaggagagaggacaccccctccaccccagacataggaaagcccctagacagccgctatgttgccaggcacggctctgggcactgaggctacagcaatgaaaaaatcagccaagttctctgccttcatggtgctcacattctaggcagagaaagacagatgatcaacaagtgaaaaaatcataaagctcaggtcatggtgtggcaagtattagagtggagagcgatggggtggggtgggggcgctgttttatatggggtggtccaaaaatatcttggtgaggtggtgacatttgagtggaaacctggacagcaagaagctagtcgtgctttggggtcaaaaggactccaaaatttcagttttttaaatggaaaacatgtgtttacccataaacattaaagagcagggaaattagaaaaaaactcgtgtccactgtgacccctgttcccatgctgatctgtgtttcctccccagtcatctttcttgttccagagaggtggggctggatgtctccatctctgtctcaactttatgtgcactgagctgcaacttcttacttccctactgaaaataagaatctgaatataaatttgttttctcaaatatttgctatgagaggttgatggattaattaaataagtcaattcctggaatttgaaagagcaaataaagacctgagaaccttcc

SEQ ID NO: 275970 - DNA, 1645 bp, Homo sapiens
gagtgggcctgcattctgcggaggttgttgaggaaggagggagtagatggagggctcttttcaccagaagacccccaggcacaagcagcccaccttactgatggtcagagcatccagaagaagtggcaagacttcagctgtcctcaaagcaggaagacagagtgtttctggcagaaagaacagcacaagcaaagatctggtaaccctaggtgcctccagtttgagggaggagagaggacaccccctccaccccagacataggaaagctccacctgcgcaccaggggcaggacacgtggctgggtgcagacgctggcccggatgtcgcggaggactcgcgggccggtagagcgcgcggcggcggcggcggcggcggcggcgggaggagacgcaggtcacgcccccttcccaccacctcccgccgccgacggggcgcgcgcgccgaggagcccgggacaggtgactcctagaggactgcgtctgcgcctcccccggcgggagtcccttcttcgcggcctctgccgccccctgcgtcccctcctgggcttccgagagtctgactcagccaagccggcatcgcttcgcctcctacaacacaccccgagcgcgagaagaaattacaggattgcaggggcacggctaatgcgctctaattacccaccgccgctgtcatccgcggcgctccgcggcgctgggccaacgcgccgtaattaagacgccgctccccggtcccggaaccctcccttcgccaccctccacccacccacctcgcggtccccaggaccactggctgccaactcctgccgccctctgggactgcccctcagtcccaggagagctatgaggcctcactgggggcagaacttggggagaccgaagccggcccttccactcccctaaacctacagtcctggaaggtctctgctggaagagactgggagagtggggaggggccagggacctatttcgttgacagaaacagtgaggtctattggaaagttagccttcagtgggaggagtggcaaaggcacgcagggcagcagtacccccgtttggcacttgaggcacggagaagggaagggaagtccgcccagccagaactcccagacccgctcgtttaacagtggctttatgagcagcacgacggactccctcccctggcggggaaattaccttcctgcgaagaaaggtgacatccccgccacagacacggaggccccgcctgctggccagctgtggccgccataggggagctggtgaggagtgaggtggctctggcctcccatgtcaggtagggtgagagaggccctgaagatagaagccaggcccgaaggccagaattaaaggggtagcttggccatcagctccttcccccaaaaccaggctcagagctctcctctatcagcaattctttcctgaggtccagggtgttgcaaactcatggccttgggccacgttttaccttcagtgaggttttgtttggcttgcaatgagtacatgggttttaggttgaatgtgagagtctgcagacaatgtgggttctccgactgccctcccagtgaaggtggacctctgatttagaccggcccgctgggcccgtgcctacatccttttcctcagcgtcaggatcttagtccccatgattg

SEQ ID NO: 275971 - DNA, 337 bp, Homo sapiens
gaaatgtgatctctgcctctcatgtcagccctctatgaatatgctgcctggaccacatttgggattagtacataggctgaaagatcccattaagtcctgcctcttgagaatggattctggcagtagtgatgtggataatggactttccatgcttattaaacgtggcattgcatgtacacttgagacagcccaaaaaggcaggagattcacataggatagctggtgccttgtctttcttcttagggcttcccagctccagccctttctaaggctttatggactctgttgtcccagaccagacaccatcatcttttgttcctgggtttgaccacggcgc

SEQ ID NO: 275972 - DNA, 793 bp, Homo sapiens
agtgatgtgacacttttgggtagaagctggaagagtcaacgtgctgctcaccagtttcccgtcccaccctcgagtagctatggaagtttgtatcaacctagagcttcatcagtctggatagttatctaaagagcagccttgttatctgtatctcttctagacaaacagcactacactgagtcttaagagttgtttcttctgaccaaggtattcccttccattgttatattccagtcgctttgctccaccaaactcttggtcatattatatattaaaatatgttctttattattcctgttcagtgaattgtctgagattttaagtacaatttttgattttgggggaattaaaacttattctttttacattgtctcacagttttcagagatcatttttttaaagaaaaattactgcattcattttggtggcttaaaacaagatgtaatttagagaatcattttatgttttcaaataaaacctcctacatttaattgactaaaagtttaagcacaagttactacacaaagaaaaccttttttagggttatgtgaacttgaaataataccattaagttttcagctgtctgaagtagcacagcaacattaacgggaagggactaaacaccacttctgctcctaaaccaacaagagctgagacatacaaattttatggcaagtaatctaaaactcttctaaaaatgattaactgttattctatccaacaagaaaaccaatacaacagatctatctaattagttaagacaccagatacttgtcatgcagtttcagtgtct

SEQ ID NO: 275973 - DNA, 871 bp, Homo sapiens
ctgggaaattcttatagtttgtaaagctccttggatgattttaatacacatttagataaaaatcctagttttgtgacatgtgcctgtagtcccagctactcgggaagatgaagtgggagaatggcctgagccagggaggtggaagttgcagtgaaccaagaccgtgccactgtactccagcctggttgatagagtgagaccctgtctcaaaaaagaaaaaaaaaaatcctgattttgggtaccatccttctcactgtaatcatgtccactaaggacaatttaaccataatcatttgtaatgaagacaataaagaccgctatgcttttaacttttatgagtattttaggccacgagtcgatggcatctttctctaagtacattgtactctggtttccttaatggtattttaggaaacgctagcactattccttgatctggcttctaagaattaagatggtagggctgggctactttcccccataatccacattgctttcacttaatcaaccaattctccctctacaggtaataagttttggaatagcagtgttcataacccattttcttcttcctgagtaggaaatgacaaatgtaccagaaatccctgttggagtattttagcacatttcttagtagatacagtctagttttgcctctctgcacttggtcttcaactatttacttacgtccacttgactagacagcctgtagttcaccttaacaataatctccctctccttttgtccttacagttatctaaagagcagccttgttatctgtatctcttctagacaaacagcactacactgagtcttaagagttgtttcttctgaccaaggtattcccttccattgttatattccagtcgct

SEQ ID NO: 275974 - DNA, 507 bp, Homo sapiens
tacttttcacagggctatgcaaccacagcagttttagaacatcttcatcaccccagaaagaaaccctgtagggaggtatggctaaggttgagaatgttttcatgtgaggaattttccatttaggaaacttattagctgtttttcttttttttttaatgtgtagatttgaagtggagggaaagggacatgaaggtgtgagagaaagctgtagcttattctgacacttcatttttggtatggcttgttgccattctatctttcactgtgtaacatagtccccaaaggtttttgtttgtttttttgattttttttttgtgtgttggggaggaggttttattgagatttaatacacataccgtacaattcactgatttaaaatgtacaattcagaggtttttagcctattcacagggctatgcaaccacagcagttttagaacatcttcatcaccccagaaagaaaccctgtaccatttagctgtcattttccctcacctccctgcttttc

SEQ ID NO: 275975 - DNA, 208 bp, Homo sapiens
gaaggatgcctctgccgctgtgttcaccatttacctttctttgggtaggagtccagtgccatgtcccctgtgagcctgcaccctttactttgtaagaagacaccgaagtgtgctgggcgtagtggctcatgcctgtaatcccagcactttaggaggctgaggtggggaggatcacttgagcccaggagtttgagaccagcctgggaaa

SEQ ID NO: 275976 - DNA, 300 bp, Homo sapiens
aatattaataattgaccttggctgtatattaaaatagttacttttatagtagagcacatttctcaaacatgccctgaaaggcttttatcaagctcatataaagttaaagctttgagctaccttttcttggccaataaagtcactgacagtttatgtaaacattaatttcaacatggctgttgcattttaattatcaaagatgtttaagatgctttaagatgacacatagagacatacacatacatacacattagtgcatttgtaatttgttaaattgaatgactatacctgagtatagtc

SEQ ID NO: 275977 - DNA, 357 bp, Homo sapiens
acaaaatggtgttagaacatattgttataccagatatcaaggagattataaaagactgccagggtcatgtccaaatgactcagtagccaatgtgaaaagatttgtttttcaaaaggtagagacatgactagaggactcatccaatggtattataggttatattgaaaaggaatgacgttgtgctatgtgtactgcccttagaagagctctaggatacactgcgaaatccttaaaaagggctaggcatggtggttcatgcctataatcccagtgctttgggagtctgaggaaggaagattccttgaggccagtaggtcaagaccagcctgggcaacatagtgagaccttatctctaca

SEQ ID NO: 275978 - DNA, 412 bp, Homo sapiens
atgaccttagtgctcttagtatacaaatggtctaacatacagtaggagctcacaggtgacggctgaactctactgtccacttgaacacacctgggtcctattcctggagatctgggcttgtgatgcggctcagggcccctgtcctgccacgagtggcacatagcaaacacgtgcatgtgtggctttggcacagagggtctcactcctgcatttagcccctctctgattcacgtcctgggcccgaaacctcccctggggaagcgggatagtcacagggagaagcatggggactgtcactgccgaagcccacagcaaaagaggattaccatatggttccacctgggctagccactcaaagccttctagaaacacagttctaggaatgcatttattaaacacagtccatttttct

SEQ ID NO: 275979 - DNA, 493 bp, Homo sapiens
tcataccaagcatcttctcagaccacagtggaaaaaaaacagaaatcaacagcaagaggaattcttaaaaccacacaaatacaggaaactaatcaacttgtttctgaatgactctaaaataaacaaaaaattaaggcagaagtcaaactgttatttgaaacaaacaaaaatagagatacaacataccaaaacctctagagtacagcaatggcagcgttaagaggaaagtttctagcactgaatgtctacatcaagaagatacatctgaaattaacaacctaaaatcgcacctaaaaaaaaaaaaaaaacagaaaaacaagaacaaaactaaacctagagctagcagaaaaaaaagaaataactaaaatcagaacagaattaaatgaaattgagacccataacaactatacaaaggatatacaaaatgagaagtttgttcttggaaaggataaaaaaagattgatatactgctagctagattaacaagaaaaga

SEQ ID NO: 275980 - DNA, 299 bp, Homo sapiens
gcataacaataaaaagcatctacaaatatttctaaggcacagacactaagaagataattaacgtgaaggaaaaggaatactagagatgtgacggaataaaatcaaacaaggatggaatctatccacatcaactgcccccatccctttctatgtcaaaaaataaccacgctgagatcagaataaaggactctttgtttccatctgcagaagataaaccatcacgcatctgaggctgagttttggagctgccactctcttcctgtttccctgcttgagggtccaattaaaatttaacaaaa

SEQ ID NO: 275981 - DNA, 273 bp, Homo sapiens
ccttacttagttaactcctcttgcttcagatatctcaggtcaattgtcccttcctctgggaagcctctggtggcctctctgactaggtcacacttccctgttttacattctctcaaagataatgtacctctctctccatcaccgtacttatcacagctacaatctacattttctgtgtgttattttgcctcaccactgtactcctagcactcaggaaaccttcaactaattgctgaatgaacaaatgagctgcccatggaaagctagtagagc

SEQ ID NO: 275982 - DNA, 352 bp, Homo sapiens
catcagctgtgagtcagtggggagtgtctgaggatggaggcgctatggctccctggagatctcttggtgtgtccacatgccgggtgggtccacggacaggagctcttctggtgcttccctcactccccacccgacccatgcagtacccaccctctgcagctgggccctccagctggctcagctcagccctgtttcatgtttagtcggtctttgatcttcactctttaactaaagccagagccaggtgaaacctgattttatccttttctcaaatgtgaactaagctcaaaagaaagagaaggctgatatggacccacatctaaactcacatctgaaataaaaacttgagtgg

SEQ ID NO: 275983 - DNA, 301 bp, Homo sapiens
tcattattcttaaaagctagcttgtccacatctgaaaattcacttttgtccttgaagttcagtttggtcttcgataaagacccactttctgctccggagggctggagagatcaggggggagctgatgccaagaccacgaaattcaatctgagcatcagttcttccagcacagcacatcctgtggaagcagggaacagaggcccagagaaggggagtaacttgtccagggacacacagccttgtagtaggggatggtccaggcccttggaggagcagggcacagggccagcatccctgaggt

SEQ ID NO: 275984 - DNA, 435 bp, Homo sapiens
tgccaggccatctacctcaaacttttttcctatttaatccatgtaataggtaccaaatcctacacaacttaaggctaaaaaataagtttgcttatgagtccctatatacaaggtaaaatagagattgttctatggactagcttatggctgcaaactacattttaagaaaagcataaccaggccgggcgcagtggttcatgcctgtaatcccagcactttgggaggccaaggcaggcggatcacctggggtcaggagtttgagaccagtctgaccaacatggagaaaccctgtctctactaaaaatacaaaaattagccgggtgtggtggcacttgctggtagtcccagctacccgggaggctgagacaggagaatcacttgaatccaggaggcagaggttgcagcaagccaagattgtgtcactgcactccagcc

SEQ ID NO: 275985 - DNA, 255 bp, Homo sapiens
  misc_feature (246)..(246): n is a, c, g, or t
  misc_feature (252)..(252): n is a, c, g, or t
  misc_feature (255)..(255): n is a, c, g, or t
aaccttccatggaattaggctttcacagagcacactgtgggaaacacagctctcatgtgcgatcagcaaaccaacctgtattagggtgtccacggagcactgttttactctgtgcatataactgaggtggaaatctacgtcacaagagaatctgaagttcccgagagaacaagccatatcctgtctgcttgtcatctgactcataggctcagcaaacactgcttgctaacttgataaatatatgtnaacccntcn

SEQ ID NO: 275986 - DNA, 539 bp, Homo sapiens
cttgccttacatttaatcttcactattaatacacacatgttataaatgagagcatcaaagtatggagagcagaagcaacttgtccaaggtcatacgcaactagaaaggagtgtaactgatatttaaaccctaacagtctggttccagaatctgtgcttttaaagtcaagatgaaaagcatgtctgggccttgacccttggaacccacccctaccacacaggctttagctagcagaggggcagcaaaggaagacagcaagaggtggcctctggtcgtagctctttgtggtttgccaaggctttctggttcactgactcaaaagggtttggggctttacagactggtaagatctcccaaactgggtagttgtactttaattttgttaagtaaaaacatttttaaaaatctgctaacatcactatcatttcataaagtaaatgtaatttcaatgcaaataaaccccaagaaagacacaatctcagagtacagtccaggcctttaggttgaataaatctacctttgtaaacacctcctttcgt

SEQ ID NO: 275987 - DNA, 406 bp, Homo sapiens
acagattttttttgttaagtgtttttgtggcaggggctgggggaagttgatggttgtatttaaaccacagatagctctcatatattggtctgaggagagaaataaataactagaatgctacagttttaaagactgtaaaactaatatgtaaggtgatttacaagtgaatggaggtcaaaagaattgcatgctttcagcacacacagagttaaccttgcagtatctccttgttttgccagcctgctgttacctcatgaagttaacaggactgatcttttaaaaactcctacacagggctggatatgttggcttatgcctgtaatcccagcactttgggagggagcaggaagatcacttgagccgaggagtttgaaatcagcctgggcaacagggagaccccatttct

SEQ ID NO: 275988 - DNA, 364 bp, Homo sapiens
agaaaatattagttcactgagctatctatatcttctagttgttaacacattatacactatcaaaacctctcattcttggccagccacgatggctcatgcctgcaatcccagcactttgggaggccaaggcgggcagatcacccgaggtcagtagttcaagactaccctggccaacatggtgaaaccccatctctactaaaaatatcaaaattagccaggtgtggtggcagacgcccatagttccagctactcaggaggctgaggcaggagaatcgcttgaacccaggtggcggaggttgcagtgacccaagatggcaccattgcactccagcctgggtgacaagagcgaaactgtcacaaaaaa

SEQ ID NO: 275989 - DNA, 721 bp, Homo sapiens
aggcagctataacagaatgttttagactgggtggcttataaataaaattccagagaattttatttctctggaggcccagaagttcaagaccaagatgccgtagatttggtgtctggtgacagcctgctttttgattcatagatggtgccttctaactgggtcctcccatgttggaaggggcaaacaagcgcccttgggtctcttaactaatctcattcaggaggattctgcccccaggacctaataatctcacaaaggcaccactttttgataccatcatcttgggggtgaggatttcaacctacaaatttcagggggatacaaacattcagacccttcattatatttggttaaaatgctgttaaaaaaaaaaaaaggttactgtatgatgggagtgtgatagaaacagaaagcccatcggctgtgaaaccagagtttttaatcatttctgtcatttcctgggtgtctctggtagcatccttaaactagggtggtgaagtatggcttatggcttatgcctgggctctcagaggaattgtgtgcttggcttccctagggcctgtgagcctggggcaggacgtgggtggtatgagagtttggacttaggccggcagctggtagggaacatctatccttgcactcctgagatcattcccctgccagagaagacacagctcctgttttggtctgatgaattaagctaattgtggtgcttaaactt

SEQ ID NO: 275990 - DNA, 461 bp, Homo sapiens
aactcaaggctaagggctatctatccctttatcttttcttttttctcttagtgcctagtacagtgattgccacacaattgacatgcaatactgaacaatgacataactatcatttctggttggcttttttaactgctagtttatttggatgttcttttatatttatttcataagaatccagggatctgatcctctgttttttgcctttgttttccctgaggttagatttagtttttataaaggcaacattttgtttttgactataaaatgctgccaaatatacagcatgcattctgctcccactctgtccttggaagacactgatcatcggtcaaaatattcttccctgagaagccacgtaggttcttaacccttctcaacacagcacatcaaatagatagctgctatcagctgaaagtaactggtagctgatgtgaaatctctttggaataacacataga

SEQ ID NO: 275991 - DNA, 448 bp, Homo sapiens
aatgacagtgatgacaaacaaaaagatgatcaacattattaatcactaggggaatgcaaattaaaatcttaaggaaatatcactatttattggaacatttaaaataaaaataaagataagaaaaccaaaccatgttctggtaaggatgaacaacccaacgctcatatgtttttgatgagccactttggaaaacagattagcactttatgttataaattagcacttacgttataaattcatacgtgcacttattgtatgactgaggaattccatttccaggtttttaccaaggaaaataaaaatgtatgtctgtacagtatctgtacatgaatgtttatagcaattttatatggaacaaccccaaactgaaaacaactgtagtgtccattaattggtaaataaataaactcactggggcatatccataaaatgaaatactatttaacca

SEQ ID NO: 275992 - DNA, 469 bp, Homo sapiens
ttcccaaactactttgtgagactggattttttcatatatttcaatgaaaacaatgtattgtaacaatgcaaagcagataggaaaattcagttgttttctattaagacagacattaaagagatttgcaaaaatgtaaaacagtgctactcttaataaatattctttcctttagaaaatttattttgaggccaggcacggtggctcacacctgtaatcccaaccctttgggaggctgaggcgggcggatcatgaggtcaacagttcaagaccagcgtggccaacatggtgaagccctgtctctactaaaaatacaaaaattagccaggcgtggtggcaggcgcctgtaatcccagctacttgggaaactgagccaggagaatcacttgaacccgggaggcggaggttgcagtgagccgagacagtgccattgcactcccgcctgggcaacaaagcgagacttcgtctcaaa

SEQ ID NO: 275993 - DNA, 316 bp, Homo sapiens
gtgagctagtagagtgagaactcattcattactgaaaggacagcaccaagccattcatgtgggatctgatcctatgaccctaataccgcccaccaggcccacttccaacagtggggttcaaattttaacatgagattcacaagggacaaaactgccaagctatgtcacatgattttccaaacaaataattgactgatgaattaaagatgagatagttatagttgagactaaagtttgagaactagaagttcaagtggacaaaatatttcaaacagaacataattataaagagatggatataatgaggaaaaaatca

SEQ ID NO: 275994 - DNA, 465 bp, Homo sapiens
tagatcgcgccattgcactccagcctgggcaacaagagcgaaactccatcccaaaaaacaaaaacaagacaaaattagccgggcttggtggcacgtgcctgtggtcccagctactccaggggctggctgcagcgggagaatcacctgagccggggagttcgagtctgcagtgatccgtgattgtgccactacactccagcctgggcgacggcagtgagacacttctcaaaacaaaaaagagaaacagtcatccaaccagttacacaaggcctctgcaagacacaacacagtgttagagatagtgaaagatagttctatgttttggaggagtttatttcctcccaattcgtgttttgtgtagaagcaccgttgtctgcggttagcctacggactactgtcaaagccaagaatctgagataggttagattattagcacgggtgaaagttttatttcagacatggagt

SEQ ID NO: 275995 - DNA, 675 bp, Homo sapiens
gaaaaatgaaacatcattacaaagccaacagacattgaaaagatgagaatattatttaaaatatatattatgtgataatttagataaaacaatcacctaaaaaaatacgacttaaccaaagctgacagacacacaaaaaacacaatagaaacaaaacaaaataatcccagtgtttaaagagccatagctcacgtttaccagctctttacaatgaaagatagaacatcatgggaaattgtgcattatgtcagtacaaaggacttaatagaggcttgttagaggattttggcttgtgttaggcgatttataaataattcaagaaaaatgtacttttcctgggaattgggtgtgatcagaaagagcaaacaatggtttagtatcttaatttttatgtatatgtaagagaaatggagtgggactaaactatcattggtaaagaagcaggagtcactcatattaactgggagaagagaatgtttggttatttttgtgttatggaaagtgttcctgttttttgtgctcaaacatgactgcagtcagagtgacctctctgatgttggtgttttatgaaatgatttatgttcaacaggagtacacaaagtccaagctattagaatctggccagatctcagtctagagtagtcaggtgctgctttttttctttctcatttactc

SEQ ID NO: 275996 - DNA, 405 bp, Homo sapiens
atgtgctgggtttgccccagtgggggtgcagctgggaggtgacagaaggaaccctccccatgagtgagggcccagtcaggctgcccatcctgggccccggaggcagcaagggaagggcccaccagccatgctgaatgtttcacagagctgaaggaaatcatccatgcaaccctgatacggtcacacaaagtcgcccaaaatttgagcctttgactgacagactgtgatggaaatgttatctcctgctgattaagagctctgattagcagtcatatctcatccactaacacggagaaatgggttaaacctttattttacaaatcagatttgatacacaaaatatttttaaaacatggttcctggaggctctaataaataaaggaataggtgatgttgaaaaggtta

SEQ ID NO: 275997 - DNA, 199 bp, Homo sapiens
attacaggcacccaacactacacctggctaatttttgtatttttagtagagatggggtttcaccatattgggcaggctggtctcgaattcctgacctcaggtgattcacctgcctcggccccccaaagtgctggtgtgagcgagcgcgcctggcctcacattgactattatttactgaatgtcataaatggtctttctt

SEQ ID NO: 275998 - DNA, 153 bp, Homo sapiens
acatacatgcacacacccactcatgcacgtacacactacacacgcatacacactacacgtgcatccacaccagtatcagagtgctctatgggaagatagggacactggctatgtatttatttggattgattgagatagggtctcactgtgttg

SEQ ID NO: 275999 - DNA, 506 bp, Homo sapiens
caaaacaaatatctttccgcttctacacatacgcccctatcgtactagtctcttcttccctagtgtcaggaatcatgagtaattggcttacaatacaaaggaaaaaagaaaaccttgggggatactcttattactagaactgtttaaatggatttataggggacgtttaatgagagcagaaattgaaattgcacttgactgcatttcagggcagcagatttttatttagcagccagaaggggtgcaagatatgttaaagaataacgaaaaaatgtaaacctgcccgtagggagcttaaaatctgattaacttagccacgctaatgatagagcaagaaaagctggctgagcaaagaacactgttcagatgccaccgggaaaaatataacagactatcgaaaagtctacatttgttacagctaaaaggtaaatgtttaaattaaaacaattatttcattataaatgcaatgtatggccattgaagaaaaaaatgataaaattagcaaa

SEQ ID NO: 276000 - DNA, 436 bp, Homo sapiens
taaaattggagccactcttgaaaaattgctgcatgccccactgaatgctagagcaagacatgcagtcccagctccaggggcttccagagtgattgaggcagggctgtgggctgctttcctgaagcctgactcctttctttcctcattacactgccacagatggtggcagatacagcatggattggcataagtcactctctactacctgcagaataaaggcccaatttcctagtgcagcttgcaaagtccttctcatctgccaccttcctgcctttgtgatttctcctcctgggactcctgcacccccttttttttttttaatttttcttttcttttttttgagatagggtctccatctgttgcccaggctggagtgtggtggcgcgatcatagcttattgcaggcttgacctcctgggctcatatgatcctcttgc

SEQ ID NO: 276001 - DNA, 538 bp, Homo sapiens
ttagctgaatgtggtggtgtgtgcttgtagtcccagctcctcaggaggctgagatgggaagatcacttgagcccgggaagtcagggctgcagtgagccaagattgtgcctctgcactccaatctgggcgacacagcaagaccctattaaaaaaaaagaaaaaaagatcagttgaccacatgaccatacatgcatgggtttatttctgagttctctatcctgttttattggtctgtgtgtctatgtttaagttgtacatgcaaaacagtatggtacataatgttttgattactgtaactttgaatgtagtttgaaatcagcaaaggtgatgcctccagttttgttctttatcaagattatttattctatttgtagtcttttgttgtcctgtactaattttaggacttttttctacatctatgaaaaatgccatggaattttcatagggattgaattgaatgtgtagatcactttgggtaacatggacattttaatattattaattcttccaatccataaacatgggatgtatttccagc

SEQ ID NO: 276002 - DNA, 498 bp, Homo sapiens
tctctcctaatacttcctgtgtgggcctttatgttggaacatgaaagcagctgacaatgtaaagagaaagaaaacccttaagattgaacatagttactggtgtcccacacataaaccgtgcagttgggagtagcctctgggggccatttccagggaaagcctcacctggagaggtcagaacctcaggattttaaaagcaaggggcatgcttcattacaatgtgggctggaggtgagcaaacatcccatcactctgtagagaggctgtttcaaggctcacccaagtgttcagacataaatacacaagcaggaggccctttagaaagagttcagacaagttatatactacctgaatgtgagccaggccaaactgctcgggcctgaattaaaaggaaacagtttataggctgtagggccacttaccaatccatctttttcactggggagaaaaaaaatcccttttgcagaggtgatgaaaacctgtattaaaaggtgacac

SEQ ID NO: 276003 - DNA, 422 bp, Homo sapiens
  misc_feature (184)..(184): n is a, c, g, or t
aacagtcacttttcctgcacctgagaaggtaaaaatcaaactgccttagaaagattctgtcctcctaaaaactggtgcctctgtacacctcaaggagtcagcaggctctccctccgaggcttaaaagcctcagggatttctttttttctttttttctttttttttttttgagacggagctcgcntctgtcacccaggctggagtgcagtggcgcggtcttggctcactgcaacctctgcctgccgggttcaagtgattctcctgcctcagccacctgtgagccaccgtgccagccagcctcagtgatttcttaggagcctgttgtatgcaatcttgagggctgaagaagtgagagggacccaccccatcctacctctacagaatgcttggcacccccaccaatgttcctagactccatctca

SEQ ID NO: 276004 - DNA, 2656 bp, Homo sapiens
cacgcgtcgatcttcctcatctgaggaggatgatgccctcagacaccatgacgacctcccttcaaacgtggcgtcgtgggttgtttgcgcctcgcctggggtcagcgagcaaggacgggcgcgggcggggatactcaaagccaacagctggagtcagccctcgtgtcccgggctcacagtggcacgactgaatcctcagagtcggctggcttttgagctctcacgattggggaggagggggcgtttctggttcgcagctccagaggattgcgttccttcccccatacctgtcccccacagtcacgctctgccctgacgtgcagcatttgacaagttaccccctcgccacatactacttccacccacgtccgagttaactttgttcttaaccttcttgagactaccctcggcctccaggtctttttttcccagttcatttttgcccataagattgagtttcgagtttcagatatcatgcagaaagtttacctttaagactgagcacccatctgatactcttcctcccgaaaaagttcatgctcacgagagagtttgtgggaaaagtgaaagccagtacacgcaggaaactatggctgagcacggggctcacttcacagctgcttctgtggccgatgaccagccatccatctttgaggtggtagcacaggacagtttaatgacagcagtgagacccgctcttcagcatgtggtcaaggttcttgcagaatcaaatcccacccactatggcttcttgtggaggtggtttgatgaaatctttactctgctagatcttctgctccagcaacattatctgtctagaaccagtgcctcattttctgaaaacttttacggcttaaagagaattgtaatgggggacactcacaagtctcagagattggctagtgctggtctcccaaagcagcagctttggaaatctattatgttcctggttcttcttccctatctgaaagtgaagctggagaagctggtttctagcctgagagaagaggatgaatattctattcatcccccttcttcccgctggaaacgattttacagagctttcctggcagcctacccatttgtgaacatggcctgggaaggatggtttcttgtacaacaacttcgatacatcctaggaaaagctcagcatcactcaccactgctgaggctggctggagttcagctaggtcgactgacagttcaggatatacaagctctggagcacaaaccagctaaggccagcatgatgcagcaaccagccaggagtgttagtgagaagataaactcagctctgaagaaagctgttgggggtgttgccttatccctgtctactggcctttctgtgggtgtattcttcttgcagttccttgactggtggtactcatctgaaaatcaagaaaccatcaagtcattgactgccctgcctactccaccaccacctgtacacctagactataactctgattctcccctcttacccaaaatgaagactgtgtgcccactgtgtcgtaaaacccgggtgaatgatactgttcttgccacctctggctatgtgttttgttaccgctgtgtgtttcattatgtgaggagtcaccaagcttgtcccatcacaggttatccaacagaagtacaacatctgattaaactctactcccctgagaactgaaagggaatcatgtcttatcctcacaacaaaagtattgcgctgtaatgtcacagagctggtttcagcatggtattgagttgacacttctcagcctcaattcataactatatgaactttaaatgattatatggatttctttaaaaggatatgcccatttgatcctaaccttttagcctgctctctagaaccctacttacagttgaccaagctgcttaaagtagaaggatcaggactggcaggggatatgagggccagtgtagagattaaacagaataatgagtacacaagtttttgcctatccctttccttaaaatataagaaataaaggagctcttacgaaaaacccaggttagaccgcataaaaaataaagtgaacagtgaggtggtagcaagacttctttttagaaaagaaagcatttacctgcctgtctgtaaggtggaaatttcatcagtttgcaaacgataagaaatgcagacttgctcttgatagaaatgcttagaaacactctgggggggaaaaaagctccttccatatactgtgagacatttgttaagtgacatctattgtttatcagcttttaaggataaaaaaggtattttaaaagttggatatttaggatatttgaggatattcctttatgagctctccatatccttcttgagaaactggttaaaaaaggaataggggttgagtgttacagagagtagtctgaagattcctgtgtaaaagcaaagctaacaagcaatgaagacatgaagcaaaatactaatctaattgtgtaaagaaaggatattttaataagttctttctgcttgctgctaagagtttgctaaagtgtcatgaattattctggttattactaaagtttctatgaaacacttaagtagattttaagaataaatgtttctggaaaagaactatgttatgattttgtagaaatgtaaagattacttgaggtgtttaaaataaatttttcattcagacta

SEQ ID NO: 276005 - DNA, 3043 bp, Homo sapiens
cacgcgtcgatcttcctcatctgaggaggatgatgccctcagacaccatgacgacctcccttcaaacgtggcgtcgtgggttgtttgcgcctcgcctggggtcagcgagcaaggacgggcgcgggcggggatactcaaagccaacagctggagtcagccctcgtgtcccgggctcacagtggcacgactgaatcctcagagtcggctggcttttgagctctcacgattggggaggagggggcgtttctggttcgcagctccagaggattgcgttccttcccccatacctgtcccccacagtcacgctctgccctgacgtgcagcatttgacaagttaccccctcgccacatactacttccacccacgtccgagttaactttgttcttaaccttcttgagactaccctcggcctccaggtctttttttcccagttcatttttgcccataagattgagtttcgagtttcagatatcatgcagaaagtttacctttaagactgagcacccatctgatactcttcctcccgaaaaagttcatgctcacgagagagtttgtgggaaaagtgaaagccagtacacgcaggaaactatggctgagcacggggctcacttcacagctgcttctgtggccgatgaccagccatccatctttgaggtggtagcacaggacagtttaatgacagcagtgagacccgctcttcagcatgtggtcaaggttcttgcagaatcaaatcccacccactatggcttcttgtggaggtggtttgatgaaatctttactctgctagatcttctgctccagcaacattatctgtctagaaccagtgcctcattttctgaaaacttttacggcttaaagagaattgtaatgggggacactcacaagtctcagagattggctagtgctggtctcccaaagcagcagctttggaaatctattatgttcctggttcttcttccctatctgaaagtgaagctggagaagctggtttctagcctgagagaagaggatgaatattctattcatcccccttcttcccgctggaaacgattttacagagctttcctggcagcctacccatttgtgaacatggcctgggaaggatggtttcttgtacaacaacttcgatacatcctaggaaaagctcagcatcactcaccactgctgaggctggctggagttcagctaggtcgactgacagttcaggatatacaagctctggagcacaaaccagctaaggccagcatgatgcagcaaccagccaggagtgttagtgagaagataaactcagctctgaagaaagctgttgggggtgttgccttatccctgtctactggcctttctgtgggtgtattcttcttgcagttccttgactggtggtactcatctgaaaatcaagaaaccatcaagtcattgactgccctgcctactccaccaccacctgtacacctagactataactctgattctcccctcttacccaaaatgaagactgtgtgcccactgtgtcgtaaaacccgggtgaatgatactgttcttgccacctctggctatgtgttttgttaccgctgtgtgtttcattatgtgaggagtcaccaagcttgtcccatcacaggttatccaacagaagtacaacatctgattaaactctactcccctgagaactgaaagggaatcatgtcttatcctcacaacaaaagtattgcgctgtaatgtcacagagctggtttcagcatggtattgagttgacacttctcagcctcaattcataactatatgaactttaaatgattatatggatttctttaaaaggatatgcccatttgatcctaaccttttagcctgctctctagaaccctacttacagttgaccaagctgcttaaagtagaaggatcaggactggcaggggatatgagggccagtgtagagattaaacagaataatgagtacacaagtttttgcctatccctttccttaaaatataagaaataaaggagctcttacgaaaaacccaggttagaccgcataaaaaataaagtgaacagtgaggtggtagcaagacttctttttagaaaagaaagcatttacctgcctgtctgtaaggtggaaatttcatcagtttgcaaacgataagaaatgcagacttgctcttgatagaaatgcttagaaacactctgggggggaaaaaagctccttccatatactgtgagacatttgttaagtgacatctattgtttatcagcttttaaggataaaaaaggtattttaaaagttggatatttaggatatttgaggatattcctttatgagctctccatatccttcttgagaaactggttaaaaaaggaataggggttgagtgttacagagagtagtctgaagattcctgtgtaaaagcaaagctaacaagcaatgaagacatgaagcaaaatactaatctaattgtgtaaagaaaggatattttaataagttctttctgcttgctgctaagagtttgctaaagtgtcatgaattattctggttattactaaagtttctatgaaacacttaagtagattttaagaataaatgtttctggaaaagaactatgttatgattttgtagaaatgtaaagattacttgaggtgtttaaaataaatttttcattcagactacctttgactttttgaggtgtttttatatttaacattttgccaattcagtagttggaacaaaaatcctctgctccgacaacaagaattcagcctcatgcaaaataccttgcatcaacttaagaaacacttaagttgcctatgtaggagcatttatgccattggattggtagactggtgaaaacatgggttaaaaaaaaatcatcactagaagaggaaggatgaaaatgatttttaagagcctctgctgacataagtgttttccaatactttaactcattttaccagttcaaagcacattctctgatagcacaaaggtgataaagctaaaattttaaatagaatatcccatggattttaacattaagacatttatgatgttagttgaga

SEQ ID NO: 276006 - DNA, 1503 bp, Homo sapiens
cacgcgtcgatcttcctcatctgaggaggatgatgccctcagacaccatgacgacctcccttcaaacgtggcgtcgtgggttgtttgcgcctcgcctggggtcagcgagcaaggacgggcgcgggcggggatactcaaagccaacagctggagtcagccctcgtgtcccgggctcacagtggcacgactgaatcctcagagtcggctggcttttgagctctcacgattggggaggagggggcgtttctggttcgcagctccagaggattgcgttccttcccccatacctgtcccccacagtcacgctctgccctgacgtgcagcatttgacaagttaccccctcgccacatactacttccacccacgtccgagttaactttgttcttaaccttcttgagactaccctcggcctccaggtctttttttcccagttcatttttgcccataagattgagtttcgagtttcagatatcatgcagaaagtttacctttaagactgagcacccatctgatactcttcctcccgaaaaagttcatgctcacgagagagtttgtgggaaaagtgaaagccagtacacgcaggaaactatggctgagcacggggctcacttcacagctgcttctgtggccgatgaccagccatccatctttgaggtggtagcacaggacagtttaatgacagcagtgagacccgctcttcagcatgtggtcaaggttcttgcagaatcaaatcccacccactatggcttcttgtggaggtggtttgatgaaatctttactctgctagatcttctgctccagcaacattatctgtctagaaccagtgcctcattttctgaaaacttttacggcttaaagagaattgtaatgggggacactcacaagtctcagagattggctagtgctggtctcccaaagcagcagctttggaaatctattatgttcctggttcttcttccctatctgaaagtgaagctggagaagctggtttctagcctgagagaagaggatgaatattctattcatcccccttcttcccgctggaaacgattttacagagctttcctggcagcctacccatttgtgaacatggcctgggaaggatggtttcttgtacaacaacttcgatacatcctaggaaaagctcagcatcactcaccactgctgaggctggctggagttcagctaggtcgactgacagttcaggatatacaagctctggagcacaaaccagctaaggccagcatgatgcagcaaccagccaggagtgttagtgagaagataaactcagctctgaagaaagctgttgggggtgttgccttatccctgtctactggcctttctgtgggtgtattcttcttgcagttccttgactggtggtactcatctgaaaatcaagaaaccatcaagtcattgactgccctgcctactccaccaccacctgtacacctagactataactctgattctcccctcttacccaaaatgaagactgtgtgccc

SEQ ID NO: 276007 - DNA, 397 bp, Homo sapiens
agcatgactttccaagtctaactgtgcgtcagaatcatgcaggaggtgttttatttcttggcctagttctgaagacatcaagagttgggcaggtgagatgtgtgtgttaagaaagcactctgggccgggcatggtggctcacgcctgtaatcccagcactttgggaggccgaggcaggtggatcacttgaggtcaggagttcgagatcaacctggccaccatggtgaaaccctgtctctactaaaagtagaataattagcctggtatggtggtgcatgcctgtaatctcagctactcgggaggcaagagaatcccttgaacctcggaggctgaggttgcagtgagccgagatcacgccactgcactccagcctgggcaaaagagcgagactccgtcc

SEQ ID NO: 276008 - DNA, 395 bp, Homo sapiens
tggcctgctggcctcagggagacgagtctggagaacttcagtgctgagttatgcaggactggccctctgtgctgtagtccagagaagagctggaagagctgaggcctgaaaatctgcaataagactgaccacaccccacgttgaaagcctctccccttccctccctgtccactggatttgaaagcacgagagcattctatttttcctcttagggacccacctggagtggcccttgcagggtcatctccccaacatggccttcggaaggacattggatgcaggacccaagaattgccagttcattgtttggttttgggcactggcaaatttgtcatggactttagaggctagtgtttgagagtggccctagaagagggtaagtgcaatggttcata

SEQ ID NO: 276009 - DNA, 391 bp, Homo sapiens
gcttgcctaacagttccttagtgtgatgaagcagttagttgaagagttgatattttaaaataaaagagctatttaaatgtttataaaagttaccaaatcaacagtgtcaaattattgaactcagagaaatagtataaagtatctctgtcagcattgaaattgctgtatctgtcacacaaggtctagaaattgctgaagaaaaaaataataacttaaaaaaatgtataatttcttcctggccacattgactacaaaccagaccagcaaacaaaagaataatctgttagtagttcaaggatgcttggacagtttgtttttcttatatgattcagccagtcctacgcgaaatgtaaacatttaaaaatttaactccttaaacttgcttgaagct

SEQ ID NO: 276010 - DNA, 426 bp, Homo sapiens
tcaaattgactgtatcatggaccaatggatctgggagggaccctcagtgtcccctagtttaatacccctgtaatacaaagaaggtacctgacatccagagaaatgatgtgccttgtgtaaagttgtggttaggaagggacagagccaggactctaaattctgtcctccggccataattccaaaactttctccaatgttaggtatgtaggctaaaatgtgctaacagcacttgtgtttttgtttccttttgttttactttttattatggcaaatttcaaacatatacagatacagaatagtttaatgaactcccatgttctcatcatgccagttcaaacatgaatacatggtcaaccttgtatcacttaaactcctgcagacaagccctgccccatcctgttgttttgaataaaatccatcattgta

SEQ ID NO: 276011 - DNA, 370 bp, Homo sapiens
atcagtgaaatctctattctctgctctgttcagagcctttcttcacccccgactcttaaacaaaacatggctgcctcctgagaactctgctgcttctttaaccctttcaagcgatggtggctgttttttttgctgccacataccactgggcctgggggtggggtggatgtcttccttgatcacatttatggcttccagaccacctttccctgccaagggtgactggggaaattagtagataattgcaacagaggacaagcagcagcctcaaaggagttgaggctttttggaaaagggggaaaggtttcagcacctggtttactgattttctctctaccataactcttgctgtcattcttaacatccatat

SEQ ID NO: 276012 - DNA, 508 bp, Homo sapiens
tcagccccaagcagcaatatcacagtccccagtgagctgtccacacatggctgagagctcatgaagcagcctctagctactccctagctagggaattcagggatctagaatgctgaaggggatactgagtcagatcaataaaaacaagattgtctagaatctaggcaatctatatctttggcaacaaaagcagctgtagactcttctactggtggagagaagtctcctttagccccctggcctggagagctgacagcagggtccagactccctctggaaccttctgaccatctccatctggactgacgccctccatgcctaaagcatacctgcctacctggccttggcttctcctctctcctgtattaaatcccatattgggcgggcacagtggctctcgcctataatcccagcactttgggagactgaggtgggcagatcgcttgagctcaggagtttgagaccagccctgggcaacatggtgaaaccccatctctaccaaaaatac

SEQ ID NO: 276013 - DNA, 915 bp, Homo sapiens
ctgaaataatttcaagatgttcattctctacagttttgtggtatgattaacttcgaagtccactgcagacacaaatgaactttccctaaaatgcaacacgagagtactaactacagtcggtaaagatgagagggggttattttgtagctcttcctgcaggctgtgagaatttttttcgttaaaaaattcgttaaaaaagcaggatatactgcttcagtccttaccatgagagccactcccatcggaacataaattagtcttagtatatttcaggttctcccacatgttcacattccaactgggtgcaacagttgacttttgtctttaactttccttggcaaaccgatagcatcagaggaagagataagctgccccttagggagctgattgtaatgcgttccagacgtctgcacgcccctggtgcaagcaccagctttctgttaaagactcagggttatgttgtttggatgttttgttgtttgctttttgaaaaagccagatcagatttttgtcattgtataaactccagtaggagaagagggatgcgtttttaaggtgatttctagaatgctctggccgacttagctgcagaagaaaaaggagaaaggaagagacagtgtatattttggcactgaaacttctttagtaacaatgcattcattcacaaatctggagagaactgaatgtctgctttttaaagtctgaattgaattctcgactagactttgagaccctgagaaggttttcaatccaaaccatgcttaatattcacgttttatcattattgatggaaagtgaaagaaaatttgaattcttggtagccagatttgacattagacttttacatttataacctcacttaaactttacaagaaatctcattacaggtattattatccccatttttaaagcaaa

SEQ ID NO: 276014 - DNA, 468 bp, Homo sapiens
ctcagcctcctacagtgttgggattacagacgtgagccactgcacccagccactcctgcacccttaccttttcgccgccctggccggctggacgactgcacccatttcacccggcattcttgtgcctgactgtgctctggccatttcctgtgtctggaatacccccattctcccatgctcagccccgtggactgtgtttattcgtaatcacacctcagagcccttccccttctccatggactccacccctgctgtgtagatggccccaacatcattttgctgagtggagtgccactgcaaggcatggcatggaggagcctgactgcataggtggcggcaccttgagggccttacagacctggcagttgaaggtatgggctagaagacagatgattccaaattacggctaagaaataggtaggctgtaaggcttgattgccgtgaatgcctctagaaagagcacttaaa

SEQ ID NO: 276015 - DNA, 341 bp, Homo sapiens
atgggcatgtctttttatgctatgacagtcatctctgggatctactagataatcaaagcagcctggacaataatacatgcaaagcatccagcaaatgttcatgaagtttctgcaaagaacagatttctatcgtggagagaagatgcctctgtggaactgcatcctcaattatgtataagccatcagcttacattttgaaggagtgttattttctttgcatatcaaagactttcaaaaaaatgaaaaagtcaaatttctcaaaatgtatagaaaatacaatgggtatggggttctcaaagttgatcgtgttattagaaaataaataatatagcactccttaa

SEQ ID NO: 276016 - DNA, 393 bp, Homo sapiens
aataagatattttttattgaaatgcaaatgtacgatgaagtgactcagtttagatgaagtgtctcagtttagaaactgtgactgaggtatgcacagtcaaggtgggcaggacagtaactgagacaggttgatgctggcttcacactcaagatttcatttactcctcccggtcttgctaactcctgagttgtacaagtttcaggagactcattttatacacgcagagccccagaccctgagagatcgtgtctgagtctgggccagaaagggtcccccgtttccttatgtcgggccattgaacagagactgtgggagaaatgtgtggactcacagcagtccccagacactggacccaggtagtgttaggaatggaaaaggggagagagtccctga

SEQ ID NO: 276017 - DNA, 250 bp, Homo sapiens
aaacaaattcagcaaacttttggaacagcccaaaataatccaagaaaaaattaagaaaacaatttcatttatagtaccatcaaataacccgtttattaagggaaaatttgaaaaaaataaaactgtcacttttcccatatgatatggttctatacatagtggatcctgaagaacctatactaattgaatgaataactgaacattgtaaagtcactagatacaaggtatatatacagatataaattgtatt

SEQ ID NO: 276018 - DNA, 761 bp, Homo sapiens
ataattttcaagaatgcctaatcagttgctctccattctgcatcctcccagtttcaactttcttcctcaatctctctacccggcacttcctgcacacctctcagccactacccacctttacttgggaggaagagaaaaaaaagaaatgagctccagactcaagctgctagatatgattcagtctaaagtttgttggaagtatggagcccctcggtattggcgaggaacaggtggtacaaggcaaagtaggagaggagggatgcataaataatgctggtggtaagagtagtcttcacctctattattcatcaactgaatgacacctctgagtcattcatcaactaggagagaggtggtgggtggtacccagttccactaactgctgccaccatgagaatcagaaattttacgagttccccaaatatcagagagacaccttgatttgtcatctgtctatccagtggaattccaaatgactgacaattttagaaaacacttggaaaaaaaatatatgaaaagcttattttaatcgccatagcctcagaatctatactccttactcattaaatgtatgattttagacaatttacttcaccaatcccagtctcagtttcctatctgtaaaaggaaataatatagcatctcttaggaatgttgactgatagctcctaagaagaatgttaaaaggttgagattaatcaataaatgtaaagtattgggaacagtgcctggcactttatgtaaataaatattagcttcta

SEQ ID NO: 276019 - DNA, 248 bp, Homo sapiens
cttttgtgagaatttgatgaatccggacatgtgaagtgctcagaaaggtgtctggcaccaagtgaaggctgtttgctatttgctgttgttattgttactcaggcacaaaggcagagaggagcaaatggtccctgggagcaaatgagcaggtggaggctaagatcacttggacaatggaactccatcgtctgccggataatctgccatcatcttataaatccactatgtctaaaagaaacaccatcttt

SEQ ID NO: 276020 - DNA, 545 bp, Homo sapiens
gcttgtggggtgcagtccccccatcactatctggggccatttgtgccaaaaccaatgcactgccacagcccctgagtccagcacatcctcgcaccctgcgtccctggactgtggtccaccctagccagcagcacccagagctctcctaaccaggcaggagctccatgtgacagatgaggaaactgaggccagggcaggtggcgccgacctcactccagaataggcacggacagtgggacccagaatgcccacgggcaccatgttgggagctggatgggcactgagggtgaggctggacccctttctgaaggagggacgtggtgtctgctcctgtaccccatggtgggtgctcaccatctccccagcccacagtttacttggacagccccacagtgacccactttctccccgaaatgggctggatctgcctctaggtgttttctgtctcggcccaggctttcctaacaccggctggtgccatccaagcctcctgcagggtcagcagatttgcaaaccacaggtttctccaatttctttggagaaaa

SEQ ID NO: 276021 - DNA, 233 bp, Homo sapiens
aaaataaatcagccaggctaagaaagaatatacaaattaatacagaaatgaaagcacggacattattatagatcccatgaacattaaaaggataataaaggagtataatgagcaactctgtgcctaaaaacttagtaacttaggtgaaatggaccagttcattgaaagacacaatagcccaaaatcatacaggaagaactaggaaatcttaataaggcaacatctgttaaaca

SEQ ID NO: 276022 - DNA, 210 bp, Homo sapiens
ctctgttgtctctttgtatgtccaggtttcctcttcttataaagacctcagtcagattggatgggggctcaccctgaaggcttcattttaacgtaatcacatctttagaggccccatctgcaaacaggagcacatgcagagatagtgggattagagcttcaacatgagttcggggaacacaattcagcccatagtatcccataataaagg

SEQ ID NO: 276023 - DNA, 248 bp, Homo sapiens
  misc_feature (202)..(202): n is a, c, g, or t
  misc_feature (207)..(207): n is a, c, g, or t
cccaagtggtgaattatctacaagtttgtagcaaagctaatactcagactccctctacagccttgctactcagtgtagtctgtggtccggcagtgtcacaccactggggtacttagcagaaatgcagcttctcaggctccactccagctctcctcaatcacagtctgtttttttgtttgtttgtttgtttgttttgagatcncgccnctgcactccagcctgggcaacaagagttgtctcaaaaaaca

SEQ ID NO: 276024 - DNA, 418 bp, Homo sapiens
cccaagtggtgaattatctacaagtttgtagcaaagctaatactcagactccctctacagccttgctactcagtgtagtctgtggtccggcagtgtcacaccactggggtacttagcagaaatgcagcttctcaggctccactccagctctcctcaatcacagtctgtttttttgtttgtttgtttgtttgttttgagatggagtttcgctcttgttgcctaggctggagagcagtggtgcgatcttggctcactgcaacctccacctccctggttcaagtgattctgctgcctcagcctcccagctgctcaggaggctgaggcaggagaattgcttgaacccgggaggcagagattgcactgggctgaggtcatgccactgcactccagcctggcaaccgggcaagactccatctca

SEQ ID NO: 276025 - DNA, 1091 bp, Homo sapiens
cttaaaagcacagtcagtagaagcaaaaataaatgtggcccaggagtggtggctcatgcctgtaatcccagcactttgggaggctgaggcgggcagattgcctgaggtcagaggttcgagaccagtctggccaacatggtgaaaccccatctctactacaaaaaaattagccaggcgtggtggcatgcgcctgtaatccccagccacttgggaggctgaggcaggggaattgcttgaaccagggagggggaggttgcagtgagctgagattgctccactgcactccagcctgggcaacagaacgagactccatctcaaaaaacaaacaaacaaacaaaaatttgatgtcaaagtcccattgttaaaagtcttttacacaacaaagaaaacaatagaatgaaaagaacacctacagaatgggagaaaatgtttgcaaactacttatctgatctattatatacaaggaactcaaacatctcaacaggaaaaaaaaaaatcccaatacaaaatgggcaagtgatctgaacaggtatttctcaaaagaagacagatggcctgcaaatatatgaaaacatgttcaatgtcactaatcatcagggaaatgaaaattaaaaccacagtgaggtatcatctctaggatgactattatcagaaaggcaaaaaaataaatgctggagagaatggggagaaaagggaggtcttatacactattggtgggaatgttttccatagtacagccactgtggaaagcagtatggaggtttctttaaaaactgaaaatacaacaacatgatccagcagtcccactactggaaactattccaaaggaaaggaaatcattacattgaagagacatctgcacactaatgtttcttgcaccactattcatgataaccaaaatatggtaccaacctatgtgtccagcagcagatgaatggataatatgtggcatgtgtatatacacaatggaatactattcagccataagaaagaatgaaatcctgtcatttgcagcaacatggatggaactgaagaacattatactaagtgaagaaacaaagttaaatactgcatattctcactcatgtgga

SEQ ID NO: 276026 - DNA, 815 bp, Homo sapiens
atctcatgaggcagcacacaattaatttccaaatgtgtatcaaaaatttcaagttaggagactgagttagaaatgattgatttttttaaaaaggaaaaacagagcttttttcttttcttttcataactttggtaaatctaaaattacattgtttggggccatgaatgtttattatgtaacacttggttttgggggcatgaaaatctattgtataacacttggcatgcttatttaaacaatttggttgatatatttaggatataatatatgttcatcttgtctaaaaaaatatggagaaaggaagtccctccaccttgccatctcctatctaggtgactttgagtatggtgatgacattatagataccacaccgaaaccatgattcattaaaactaattcataagccagacttcattagaattaaaggtttctgctctgtcgaggccactaacaaagaataagaagatgaccccatagactgggagaaaatatttgcaaaacacatatctgataaaaaaaaaagactgttatccaaaatatacccaccccctgaaaaaaccctcttaaaactcaacagtaagaaagtgaacaaccagattggttgcccacaacaaatgggcaaaagatctgaacagacatctcaccaaaaaagatacagatgactaataagcacataaaaagatgttcaccatcgtatattatcagggaaatgtgactcaaaatgatgagatacctctatacacctatttaaatggcaaaaattcaaaacagtgagaacaccaaatgctggtgagaatgtggagcaaccgggactc

SEQ ID NO: 276027 - DNA, 435 bp, Homo sapiens
cctcagcctcccgagtagctggtaagggaggagaccacccctcacattgtcttatgcccaatttctgcctccaaagaaagaagtaaaaactaaaaggcagaaatgaaatccacaggcagacagcccggcgctgcaccctgggcctggtagttaaagatcgacccctgacctaatcagttatgttgtctatagattacagacattgtatagaaatgcactgtgaaaatccctatctgttttgttccgatctagttaccagtgcatgcagaccccagtcacgtaccccttgcttgctcaatcaatcccgaccccctcacacgcaccctccttagagttgtgagcccttaaaagggataggaattgctcactcggggagctcggctctcgagacaggagtcttgccgatgcccccagccgattaaaccccttccttca

SEQ ID NO: 276028 - DNA, 369 bp, Homo sapiens
atcaatggagcaagcagggggactgaagcctgagttcagtgcaaactgtgtcctaccacactcaactctggagaatcagactctgctgagatgcctcttcttgtggcaccatccttataattgggtctaaatcttcacttaagtatcatttattaaagttgagtccttacgaattgattcctgtgtgatcctcaacgttcctctgacctgttgcaaatgctggctctgactaagggctcctacagctttctgcttctctaaccagagaatttactgtttataacttctcagtgagaaagcccactctgacacaggggtgaaggtatattgatttttgtatacatgtattttaataaaagtaattcatgc

SEQ ID NO: 276029 - DNA, 3651 bp, Homo sapiens
gggactggaagcgtgcaacactccagagtcgtaggagtgaacactgcacaggaatctctgcccatctcaggagaaaccaaacttggggaaaatgtttgcggtccacttgatggcattttacttcagcaagctgaaggaggaccagatcaagaaggtggacaggttcctgtatcacatgcggctctccgatgacacccttttggacatcatgaggcggttccgggctgagatggagaagggcctggcaaagggcaccaaccccacggctgcagtgaagatgttgcccaccttcgtcagggccattcccgatggttccgaaaatggggagttcctttccctggatctcggagggtccaagttccgagtgctgaaggtgcaagtcgctgaagaggggaagcgacacgtgcagatggagagtcagttctacccaacgcccaatgaaatcatccgcgggaacggcatagagctgtttgaatatgtagctgactgtctggcagatttcatgaagaccaaagatttaaagcataagaaattgccccttggcctaactttttctttcccctgtcgacagactaaactggaagagggtgtcctactttcgtggacaaaaaagtttaaggcacgaggagttcaggacacggatgtggtgagccgtctgaccaaagccatgagaagacacaaggacatggacgtggacatcctggccctggtcaatgacaccgtggggaccatgatgacctgtgcctatgacgacccctactgcgaagttggtgtcatcatcggaactggcaccaatgcgtgttacatggaggacatgagcaacattgacctggtggagggcgacgagggcaggatgtgcatcaacacagagtggggggccttcggggacgacggggccctggaggacattcgcactgagttcgacagggagctggacctcggctctctcaacccaggaaagcaactgttcgagaagatgatcagtggcctgtacctgggggagcttgtcaggcttatcttgctgaagatggccaaggctggcctcctgtttggtggtgagaaatcttctgctctccacactaagggcaagatcgaaacacggcacgtggctgccatggagaagtataaagaaggccttgctaatacaagagagatcctggtggacctgggtctggaaccgtctgaggctgactgcattgccgtccagcatgtctgtaccatcgtctccttccgctcggccaatctctgtgcagcagctctggcggccatcctgacacgcctccgggagaacaagaaggtggaacggctccggaccacagtgggcatggacggcaccctctacaagatacaccctcagtacccaaaacgcctgcacaaggtggtgaggaaactggtcccaagctgtgatgtccgcttcctcctgtcagagagtggcagcaccaagggggccgccatggtgaccgcggtggcctcccgcgtgcaggcccagcggaagcagatcgacagggtgctggctttgttccagctgacccgagagcagctcgtggacgtgcaggccaagatgcgggctgagctggagtatgggctgaagaagaagagccacgggctggccacggtcaggatgctgcccacctacgtctgcgggctgccggacggcacagagaaaggaaagtttctcgccctggatcttgggggaaccaacttccgggtcctcctggtgaagatcagaagtggacggaggtcagtgcgaatgtacaacaagatcttcgccatccccctggagatcatgcagggcactggtgaggagctctttgatcacattgtgcagtgcatcgccgacttcctggactacatgggcctcaagggagcctccctacctttgggcttcacattctcatttccctgcaggcagatgagcattgacaagggaacactcatagggtggaccaaaggtttcaaggccactgactgtgaaggggaggacgtggtggacatgctcagggaagccatcaagaggagaaacgagtttgacctggacattgttgcagtcgtgaatgatacagtggggaccatgatgacctgtggctatgaagatcctaattgtgagattggcctgattgcaggaacaggcagcaacatgtgctacatggaggacatgaggaacatcgagatggtggaggggggtgaagggaagatgtgcatcaatacagagtggggaggatttggagacaatggctgcatagatgacatccggacccgatacgacacggaggtggatgaggggtccttgaatcctggcaagcagagatacgagaaaatgaccagtgggatgtacttgggggagattgtgcggcagatcctgatcgacctgaccaagcagggtctcctcttccgagggcagatttcagagcgtctccggaccaggggcatcttcgaaaccaagttcctgtcccagatcgaaagcgatcggctggcccttctccaggtcaggaggattctgcagcagctgggcctggacagcacgtgtgaggacagcatcgtggtgaaggaggtgtgcggagccgtgtcccggcgggcggcccagctctgcggtgctggcctggccgctatagtggaaaaaaggagagaagaccaggggctagagcacctgaggatcactgtgggtgtggacggcaccctgtacaagctgcaccctcacttttctagaatattgcaggaaactgtgaaggaactagcccctcgatgtgatgtgacattcatgctgtcagaagatggcagtggaaaaggggcagcactgatcactgctgtggccaagaggttacagcaggcacagaaggagaactaggaacccctgggattggacctgatgcatcttggatactgaacagcttttcctctggcagatcagttggtcagagaccaatgggcaccctcctggctgacctcaccttctggatggccgaaagagaaccccaggttctcgggtactcttagtatcttgtactggatttgcagtgacattacatgacatctctatttggtatatttgggccaaaatgggccaacttatgaaatcaaagtgtctgtcctgagagatcccctttcaacacattgttcaggtgaggcttgagctgtcaattctctatggctttcagtcttgtggctgcgggacttggaaatatatagaatctgcccatgtggctggcaggctgtttccccattgggatgcttaagccatctcttataggggattggaccctgtacttgtggatgaacattggagagcaagaggaactcacgttatgaactagggggatctcatctaacttgtccttaacttgccatgttgacttcaaacctgttaagagaacaaagactttgaagtatccagccccagggtgcagagaggttgattgccagggagcactgcaggaatcattgcatgcttaaagcgagttatgtcagcaccctgtaggattttgttccttattaagtgtgtgccatgtggtggggtgctgtctggggcatctgtttttcattttgcctgtggtttgtgttgcagctgttgatagttgttttaaggattgttaggtataggaaatccagtaaattaataaaaaaattttgattttccaataaactttgcatgaa

SEQ ID NO: 276030 - DNA, 2325 bp, Homo sapiens
gggactggaagcgtgcaacactccagagtcgtaggagtgaacactgcacaggaatctctgcccatctcaggagaaaccaaacttggggaaaatgtttgcggtccacttgatggcattttacttcagcaagctgaaggaggaccagatcaagaaggtggacaggttcctgtatcacatgcggctctccgatgacacccttttggacatcatgaggcggttccgggctgagatggagaagggcctggcaaagggcaccaaccccacggctgcagtgaagatgttgcccaccttcgtcagggccattcccgatggttccgaaaatggggagttcctttccctggatctcggagggtccaagttccgagtgctgaaggtgcaagtcgctgaagaggggaagcgacacgtgcagatggagagtcagttctacccaacgcccaatgaaatcatccgcgggaacggcatagagctgtttgaatatgtagctgactgtctggcagatttcatgaagaccaaagatttaaagcataagaaattgccccttggcctaactttttctttcccctgtcgacagactaaactggaagagggtgtcctactttcgtggacaaaaaagtttaaggcacgaggagttcaggacacggatgtggtgagccgtctgaccaaagccatgagaagacacaaggacatggacgtggacatcctggccctggtcaatgacaccgtggggaccatgatgacctgtgcctatgacgacccctactgcgaagttggtgtcatcatcggaactggcaccaatgcgtgttacatggaggacatgagcaacattgacctggtggagggcgacgagggcaggatgtgcatcaacacagagtggggggccttcggggacgacggggccctggaggacattcgcactgagttcgacagggagctggacctcggctctctcaacccaggaaagcaactgttcgagaagatgatcagtggcctgtacctgggggagcttgtcaggcttatcttgctgaagatggccaaggctggcctcctgtttggtggtgagaaatcttctgctctccacactaagggcaagatcgaaacacggcacgtggctgccatggagaagtataaagaaggccttgctaatacaagagagatcctggtggacctgggtctggaaccgtctgaggctgactgcattgccgtccagcatgtctgtaccatcgtctccttccgctcggccaatctctgtgcagcagctctggcggccatcctgacacgcctccgggagaacaagaaggtggaacggctccggaccacagtgggcatggacggcaccctctacaagatacaccctcagtacccaaaacgcctgcacaaggtggtgaggaaactggtcccaagctgtgatgtccgcttcctcctgtcagagagtggcagcaccaagggggccgccatggtgaccgcggtggcctcccgcgtgcaggcccagcggaagcagatcgacagggtgctggctttgttccagctgacccgagagcagctcgtggacgtgcaggccaagatgcgggctgagctggagtatgggctgaagaagaagagccacgggctggccacggtcaggatgctgcccacctacgtctgcgggctgccggacggcacagagaaaggaaagtttctcgccctggatcttgggggaaccaacttccgggtcctcctggtgaagatcagaagtggacggaggtcagtgcgaatgtacaacaagatcttcgccatccccctggagatcatgcagggcactggtgaggagctctttgatcacattgtgcagtgcatcgccgacttcctggactacatgggcctcaagggagcctccctacctttgggcttcacattctcatttccctgcaggcagatgagcattgacaagggaacactcatagggtggaccaaaggtttcaaggccactgactgtgaaggggaggacgtggtggacatgctcagggaagccatcaagaggagaaacgagtttgacctggacattgttgcagtcgtgaatgatacagtggggaccatgatgacctgtggctatgaagatcctaattgtgagattggcctgattgcaggaacaggcagcaacatgtgctacatggaggacatgaggaacatcgagatggtggaggggggtgaagggaagatgtgcatctgtttttcattttgcctgtggtttgtgttgcagctgttgatagttgttttaaggattgttaggtataggaaatccagtaaattaataaaaaaattttgattttccaataaactttgcatgaa

SEQ ID NO: 276031 - DNA, 2669 bp, Homo sapiens
gggactggaagcgtgcaacactccagagtcgtaggagtgaacactgcacaggaatctctgcccatctcaggagaaaccaaacttggggaaaatgtttgcggtccacttgatggcattttacttcagcaagctgaaggaggaccagatcaagaaggtggacaggttcctgtatcacatgcggctctccgatgacacccttttggacatcatgaggcggttccgggctgagatggagaagggcctggcaaagggcaccaaccccacggctgcagtgaagatgttgcccaccttcgtcagggccattcccgatggttccgaaaatggggagttcctttccctggatctcggagggtccaagttccgagtgctgaaggtgcaagtcgctgaagaggggaagcgacacgtgcagatggagagtcagttctacccaacgcccaatgaaatcatccgcgggaacggcatagagctgtttgaatatgtagctgactgtctggcagatttcatgaagaccaaagatttaaagcataagaaattgccccttggcctaactttttctttcccctgtcgacagactaaactggaagagggtgtcctactttcgtggacaaaaaagtttaaggcacgaggagttcaggacacggatgtggtgagccgtctgaccaaagccatgagaagacacaaggacatggacgtggacatcctggccctggtcaatgacaccgtggggaccatgatgacctgtgcctatgacgacccctactgcgaagttggtgtcatcatcggaactggcaccaatgcgtgttacatggaggacatgagcaacattgacctggtggagggcgacgagggcaggatgtgcatcaacacagagtggggggccttcggggacgacggggccctggaggacattcgcactgagttcgacagggagctggacctcggctctctcaacccaggaaagcaactgttcgagaagatgatcagtggcctgtacctgggggagcttgtcaggcttatcttgctgaagatggccaaggctggcctcctgtttggtggtgagaaatcttctgctctccacactaagggcaagatcgaaacacggcacgtggctgccatggagaagtataaagaaggccttgctaatacaagagagatcctggtggacctgggtctggaaccgtctgaggctgactgcattgccgtccagcatgtctgtaccatcgtctccttccgctcggccaatctctgtgcagcagctctggcggccatcctgacacgcctccgggagaacaagaaggtggaacggctccggaccacagtgggcatggacggcaccctctacaagatacaccctcagtacccaaaacgcctgcacaaggtggtgaggaaactggtcccaagctgtgatgtccgcttcctcctgtcagagagtggcagcaccaagggggccgccatggtgaccgcggtggcctcccgcgtgcaggcccagcggaagcagatcgacagggtgctggctttgttccagctgacccgagagcagctcgtggacgtgcaggccaagatgcgggctgagctggagtatgggctgaagaagaagagccacgggctggccacggtcaggatgctgcccacctacgtctgcgggctgccggacggcacagagaaaggaaagtttctcgccctggatcttgggggaaccaacttccgggtcctcctggtgaagatcagaagtggacggaggtcagtgcgaatgtacaacaagatcttcgccatccccctggagatcatgcagggcactggtgaggagctctttgatcacattgtgcagtgcatcgccgacttcctggactacatgggcctcaagggagcctccctacctttgggcttcacattctcatttccctgcaggcagatgagcattgacaagggaacactcatagggtggaccaaaggtttcaaggccactgactgtgaaggggaggacgtggtggacatgctcagggaagccatcaagaggagaaacgagtttgacctggacattgttgcagtcgtgaatgatacagtggggaccatgatgacctgtggctatgaagatcctaattgtgagattggcctgattgcaggaacaggcagcaacatgtgctacatggaggacatgaggaacatcgagatggtggaggggggtgaagggaagatgtgcatcaatacagagtggggaggatttggagacaatggctgcatagatgacatccggacccgatacgacacggaggtggatgaggggtccttgaatcctggcaagcagagatacgagaaaatgaccagtgggatgtacttgggggagattgtgcggcagatcctgatcgacctgaccaagcagggtctcctcttccgagggcagatttcagagcgtctccggaccaggggcatcttcgaaaccaagttcctgtcccagatcgaaaggtgacctgtgatcaagttcatcatgaggctctgactggcatatgctgccaccacgctggggttgggccaatttgaggtttaaaaataaaaacagaaaggccctggctgggtaagggattgcctcctggggctgctcttctctttccaactgattcaggatcgctttcaacaataataaactcatggccaaactgggctcatctaaa

SEQ ID NO: 276032 - DNA, 277 bp, Homo sapiens
agatgcttgcctcctaacagtcttgtaggggcgctactcttctccctgttttgtagatgatagcttgcagtgcttgctcacatcaagcagctagtatgtggcagagctaggatctggatcttgctccatgcgtagctccaaagcctggccttctcacatcatgtggtcttctgcattgcaggtctgccccaaccttatccttcttctccaaacagatacgagaaaatgaccagtgggatgtacttgggggagattgtgcggcagatcctgatcgacc

SEQ ID NO: 276033 - DNA, 316 bp, Homo sapiens
ctacatggaagggctgatgatgtttctttctctttttcatagcttttctagaatattgcaggaaactgtgaaggaactagcccctcgatgtgatgtgacattcatgctgtcagaagatggcagtggaaaaggggcagcactgatcactgctgtggccaagaggttacagcaggcacagaaggagaactaggaacccctgggattggacctgatgcatcttggatactgaacagcttttcctctggcagatcagttggtcagagaccaatgggcaccctcctggctgacctcaccttctggatggccgaaagagaac

SEQ ID NO: 276034 - DNA, 1423 bp, Homo sapiens
  misc_feature (5)..(5): n is a, c, g, or t
aaggnccagccgattcgctttcgatcttgggacaggaacttggtttcggaagatgcccctggtccggagacggctctgaaatctgccctcggaagaggagaccctacttgggggagattgtgcggcagatcctgatcgacctgaccaagcagggtctcctcttccgagggcagatttcagagcgtctccggaccaggggcatcttcgaaaccaagttcctgtcccagatcgaaagcgatcggctggcccttctccaggtcaggaggattctgcagcagctgggcctggacagcacgtgtgaggacagcatcgtggtgaaggaggtgtgcggagccgtgtcccggcgggcggcccagctctgcggtgctggcctggccgctatagtggaaaaaaggagagaagaccaggggctagagcacctgaggatcactgtgggtgtggacggcaccctgtacaagctgcaccctcacttttctagaatattgcaggaaactgtgaaggaactagcccctcgatgtgatgtgacattcatgctgtcagaagatggcagtggaaaaggggcagcactgatcactgctgtggccaagaggttacagcaggcacagaaggagaactaggaacccctgggattggacctgatgcatcttggatactgaacagcttttcctctggcagatcagttggtcagagaccaatgggcaccctcctggctgacctcaccttctggatggccgaaagagaaccccaggttctcgggtactcttagtatcttgtactggatttgcagtgacattacatgacatctctatttggtatatttgggccaaaatgggccaacttatgaaatcaaagtgtctgtcctgagagatcccctttcaacacattgttcaggtgaggcttgagctgtcaattctctatggctttcagtcttgtggctgcgggacttggaaatatatagaatctgcccatgtggctggcaggctgtttccccattgggatgcttaagccatctcttataggggattggaccctgtacttgtggatgaacattggagagcaagaggaactcacgttatgaactagggggatctcatctaacttgtccttaacttgccatgttgacttcaaacctgttaagagaacaaagactttgaagtatccagccccagggtgcagagaggttgattgccagggagcactgcaggaatcattgcatgcttaaagcgagttatgtcagcaccctgtaggattttgttccttattaagtgtgtgccatgtggtggggtgctgtctggggcatctgtttttcattttgcctgtggtttgtgttgcagctgttgatagttgttttaaggattgttaggtataggaaatccagtaaattaataaaaaaattttgattttccaataaactttgcatgaa

SEQ ID NO: 276035 - DNA, 1896 bp, Homo sapiens
gggactggaagcgtgcaacactccagagtcgtaggagtgaacactgcacaggaatctctgcccatctcaggagaaaccaaacttggggaaaatgtttgcggtccacttgatggcattttacttcagcaagctgaaggaggaccagatcaagaaggtggacaggttcctgtatcacatgcggctctccgatgacacccttttggacatcatgaggcggttccgggctgagatggagaagggcctggcaaagggcaccaaccccacggctgcagtgaagatgttgcccaccttcgtcagggccattcccgatggttccgaaaatggggagttcctttccctggatctcggagggtccaagttccgagtgctgaaggtgcaagtcgctgaagaggggaagcgacacgtgcagatggagagtcagttctacccaacgcccaatgaaatcatccgcgggaacggcatagagctgtttgaatatgtagctgactgtctggcagatttcatgaagaccaaagatttaaagcataagaaattgccccttggcctaactttttctttcccctgtcgacagactaaactggaagagggtgtcctactttcgtggacaaaaaagtttaaggcacgaggagttcaggacacggatgtggtgagccgtctgaccaaagccatgagaagacacaaggacatggacgtggacatcctggccctggtcaatgacaccgtggggaccatgatgacctgtgcctatgacgacccctactgcgaagttggtgtcatcatcggaactggcaccaatgcgtgttacatggaggacatgagcaacattgacctggtggagggcgacgagggcaggatgtgcatcaacacagagtggggggccttcggggacgacggggccctggaggacattcgcactgagttcgacagggagctggacctcggctctctcaacccaggaaagcaactgttcgagaagatgatcagtggcctgtacctgggggagcttgtcaggcttatcttgctgaagatggccaaggctggcctcctgtttggtggtgagaaatcttctgctctccacactaagggcaagatcgaaacacggcacgtggctgccatggagaagtataaagaaggccttgctaatacaagagagatcctggtggacctgggtctggaaccgtctgaggctgactgcattgccgtccagcatgtctgtaccatcgtctccttccgctcggccaatctctgtgcagcagctctggcggccatcctgacacgcctccgggagaacaagaaggtggaacggctccggaccacagtgggcatggacggcaccctctacaagatacaccctcagtacccaaaacgcctgcacaaggtggtgaggaaactggtcccaagctgtgatgtccgcttcctcctgtcagagagtggcagcaccaagggggccgccatggtgaccgcggtggcctcccgcgtgcaggcccagcggaagcagatcgacagggtgctggctttgttccagctgacccgagagcagctcgtggacgtgcaggccaagatgcgggctgagctggagtatgggctgaagaagaagagccacgggctggccacggtcaggatgctgcccacctacgtctgcgggctgccggacggcacaggtgggccagcacagcctccctctctgaacagccatccagggctcccgtcaaaactccttaaagccagtgaggttcttggtttttagaaacttgggttcacgtctctaatggagggcaagagtaagaagaaggctagtattctttctaaatctgttggcctttgttaacccaaggcatttgcagtaaaaacaaaacaaataaacaaacaaaaacacaaaaagcctacattaggtta

SEQ ID NO: 276036 - DNA, 341 bp, Homo sapiens
gtattataataataataataaacttaagaagagttttcatgattaattagatcaggcatggttccaggttttgtgaagttttaagattatgtaatttttgaggctgtctgtaagaagagagaacaaaattttgaatgcaaagttagttcctggtccttggaaggggcctgtgtgggccccggaacttaagtttccatcatgccatgctggattcacctgttgaaatgtatgcgacacacatacattttgtttacttatgccttgctccgcctcttttggggggcgttattgctcactattattccattatgaaaacatacctacttgtcactgatacaatt

SEQ ID NO: 276037 - DNA, 498 bp, Homo sapiens
aggcagaagtacctcccgtaggcctcgctcttagctcctaaattggctcacgctggccacagctcacacttgaggccccacaccaggcactcatctgccagccacccctgcctgcaggaactaccatcggccaggacctaagttggatggatctaatcaccccatctccagacacgctgtactcgcagcctcagctctctgccctctgctattctgcccggtatgaccagaaccaccctggacacaaccctccgccactggcacattctgctcccagacactccagcctcctccagaaccccctccatggatattccagatgtggcggtcctgcagccttggactccctcggcccaacacactgatgagtgagtaagagtgtagctgagcttccaggtcctgcagcctccggggaatgtccagggtgtggatagacactgggcctgaagctccaggctgtggtcagcgctgggatggaaggaggcaggtgcacaggga

SEQ ID NO: 276038 - DNA, 722 bp, Homo sapiens
agcgccctcgcgaccggaagtgcgcgctcgggggtaggcgggaaggccgcggcgggattaattaaagacccgatcaagcggcccgcagaggggcgtgaccttgtttcctcaggagtgtggcggtggtcttactactatgttcgttatagcgcggcagaaagaagaaatgttatgacaacagagcagcaagtcccatggtcctagctaaaaggcggtacggctgtgactgctgagatggagagtcctcaaagagggagtctcgctctgtcgccaggctggagtgaagtggcacaatctcagatcactgcaacctctgcctcccaagttcaagcaattctcctgcctcagcctcccgagtagctgtgactacagagaattaaacttatggtctctcacctgagcatggagtggaaatgggcatataaggtaatcacagaagttatcacacctacacccttcccagtatatggatgtactagggaggaagattccatggaagaggtaaaatctccccgcatgcttcattatagaaagaaaaagagaacactctcttcctaacagaacggaccactgtctcagcatgtgggatggtgataatgagggaatgattacctaccatcagatcaacaattagtatacactgaaattacaatgactgtgagactgacctaagtgtgaatatacaacttctgagcttccactgcctttggagggatcaccac

SEQ ID NO: 276039 - DNA, 386 bp, Homo sapiens
agcgccctcgcgaccggaagtgcgcgctcgggggtaggcgggaaggccgcggcgggattaattaaagacccgatcaagcggcccgcagaggggcgtgaccttgtttcctcaggagtgtggcggtggtcttactactatgttcgttatagcgcggtacgttctagacccttctataggaaatttaaaacctttaaaatgtgtatttccttcctccagtcagtgaccacgggggcgtctccatgagattaagacaaagattataatagagttccagactatcctgggcaacatagcaagacctcgtctctacaaaaaatcaaaaataggccaggcttgttggcctgcccctgtggtcccagctactcgggaggctgaggaggaagatt

SEQ ID NO: 276040 - DNA, 413 bp, Homo sapiens
catatgttagactgtaaatcaagtctcagtcaaatttaaaagatatataaggtatcttctctgaccacaacaggatgaaattagaaatcagtaacagaaagaatactggaaaattcacagatgtatggaaattaagcaacacattcttaaccaatgggtgaaaaaagaaatcacaaagcaaatcagaaaatacttacagacaagtaaaaaccaaatcagaacatacctaaagttagaaggtgcagcaaaagcaacactcagaggaaaattaatagctataaatgcttacattaagaatgaaggccaggtgtggtggcttaatcccaacactttgggaggccaaggcgggcagatcacttgagcccaggagtttgaggccagcctaggcaacatggcgaaaccctgtctctatc

SEQ ID NO: 276041 - DNA, 211 bp, Homo sapiens
atattcttctggacagtttattaaaaacggtgaggctccgaggccacatctctatgtctacaatgtggctgaggggtttatacggcaacagcctgagcttggtgcaaacctttctgtttagttacacagaaagaccaactgcagtcaaaagagttcactagtgactaaccaaggaggctgaagctgtttggctgagctgttgaaggaaggt

SEQ ID NO: 276042 - DNA, 212 bp, Homo sapiens
tcttcccatgacacgtgggaattatggaagttacaattcaatatgagatttgggtggggacacagccaaaccctatcatctatcaattggagcaagccaccaagcagatgattgtgaacttttgtgccctcacaaagaaattgaagtgaagtgtaagaatgcttttggctataaatagaagaaaatccagattcagtggacttaagcaagga

SEQ ID NO: 276043 - DNA, 325 bp, Homo sapiens
tagatctgtttctgagttctctgtcctgttccgctgctctgttgctgtgactgtcccaccccatctgggttacttgctgcagcgctgggagagggattcctctggcttcctctctcttttctctttttcaagattgagctcttgaaaaaagagctctgggagctggcattttggagctcctctagggttccgcgtgtagaagatggcactgtgttgggcctaggttcagagtcgtccttgacaccacctcatcctcagcccgtgtctgactcatcagcgagcattgccttttcttggtagacatagcccaggtctgtccccctct

SEQ ID NO: 276044 - DNA, 300 bp, Homo sapiens
atttaatttttattgatgattttttcacaaccagcttacaaaaacttctgaacatttagcagtcaactctcttcagctgatgtgagtcagctagttccagcacactcactgaccaggtgactgtggatttgtcacttaatctttttggttttaagcagctttattaagagataattcacataccatatgatgtatcatttaagtatacaaattagtggtttctagtatacagcctgcccttcatgtctgggttccatatccatggagtcagccaacactggattgaaaatatttggaaaa

SEQ ID NO: 276045 - DNA, 997 bp, Homo sapiens
atgctcattggtttgaagaaatcacactgattcttgattggctatgcattgttaagctatggggtgtgggacatagtgtcccgggagcattattaggttaatgcatctctatctgtggcaatggcaagcagtttcaatagatgaatacatagctgacagtggggagtaggatgtgactgctgtctcagtttaatgtctctcggcctaataatttgaaagggctcacaatcctccgatagaagctcttttctttcctcctcgagtatctcagtgtccatctttagagatcatccttaacaataaaactggctttttaacctactccctaatcaccagtcatccaactttgagttaataatgctaatttcagcctcactcctgactctcgcaccccaccactcccagccaggaaatgcttctctgtgtccacgatgccttccagcatcttccttacatggttatattgcactccctgtaattactcagcactcagcaacttggttgtggcatactctgaaaagccttcgacaagctacacaagggcttgtggagcttatggattcacctctaagaaagcaaaaaaacacactttcatctccacatgtttactcaggtctgttcttcctttcacaagcagtggtgtttcctactaggatgtttccaagttcaccctgttaacaacagaattagtttagtactggagagattaatcattaaccttggtgtctccactttctggctcacaaattttaactatgaagttagaaataaaattagataaggaagggctcacaaattttaactatgaagttagaaataaaattagataaggaagatatctaacatgtctactttattgtaaatggtagcaattacatttgtcacttaactcaatttgcgaatatattttatctaatgtaaacatatagatcaaagttatatatattatcaattggctaatgtatcacctcattctaaataaaaaatttaaggactt

SEQ ID NO: 276046 - DNA, 355 bp, Homo sapiens
ggttatggcaaaatcaataagaagcgaattgctttgatacataacactttgattgcttgatctcttggtaaatatggcatcatctgcctggaggatctgattcatgagatctatactgttggaaaatgcttcaaagaagcaaataactacctgtggcccttcaaattatcttctccacgaggcggaatgaagaaaaagaccacccattttgtagaaggtggagatgctagcaacagggaggaccagatcaacaggcttattagaagaatgaactaaggtgtctaccatgattatttttctaaggtggtcagttaataaacagtacctactctcaaattgaaaaaaaagtcgacgc

SEQ ID NO: 276047 - DNA, 286 bp, Homo sapiens
aaagaaagagacagagagggagagagaaagaaggaaagaaaggaaagaaatgaagaaaagaaagaaaagggtacctaaggactggggattctgaatcaggaacttctgtctgatcttccaagagttaagagatttgaacacgtgaacttaaagtgaaatacaagcccaagaaaacattaggtcttattgatatcatgagcccatttttacctttcccattctgcctcctctcccactttgcaccatatgagtgatagcatgttacccctttcatgacatgacatcc

SEQ ID NO: 276048 - DNA, 391 bp, Homo sapiens
tcgtagcttagctgctgtattcccaaaacccacacagtgccccagagctttacccttggaattattatcagagataagttccttaaagccacagcctcatctccaatcaagggagttccttggagggacttggaataggaagaagctagaaccctctgagatctggccatccaccacccatgaggcccaattcttccctggtcccctgagcaactgaaaatcagctcctagagtatcatttcagaactttgagcatttgggcttcttttattttattttattttgttttatttatttattttttgagacaggatctcactctgtcgctcaggctggagtgcagtggcgtgatctcagctcattgcaacctccacctcccaggtttcagtga

SEQ ID NO: 276049 - DNA, 426 bp, Homo sapiens
tgatttttgtgagaaaagagggattataaaagactgctcctagccaaccttttgcccatgagggaaatctacaagctcagtccttgtgaagctggggttttgggttcccagaggcctcaaccactccttttcctgtgatcttgtggctgggatgacagtgcatcagcagaggatggatcgtttcctgcaggctcagcccacactccgtgtagcaatcttgggggatttctgtctggaaaacagtctggcggttcaatccacagacagtcccccaaccttcctctatatcttatagaggaggtgggaaaacgaggaacacttgaatgagaggccgtgcatatatgagttgcctacaaaatctgtcatttttggaggtattatttgaagggaacgtttatttatttatttatttatttttttttttta

SEQ ID NO: 276050 - DNA, 588 bp, Homo sapiens
ccttgacctcccaaagcactgggattacaggtgcgagccaccacacccagctggatttttctgttttagatattcctgtacatgtccccatctctataaaagaaaaaaaagcctagttggtaaccttttactacactgccctgtgccacctttcatatgatgatactaacctctttaatcaccattaaagagctccgtactctttcatagttaactttgttactgtaaaagaacatgaaaggggtatcccaagaagagaaacaatagcagctattagtcccttgggctgtgtttctctgaaggatttctcaggaatgaaaggagccctaagttatttagagtcctgcctttgtttcactgttgctctctctttctctttagagctctttctttctctccttttgaagttagtactaggctttgtgagtttgaatgaaagtgagccttggtgcttggtcggtacctcctctttcctcatttacccctcatttactcctgcatacattggtggttctcataagggatttccagcacattgccatcctcccattgcagctggagcatagcactggggaaaggaggcaacac

SEQ ID NO: 276051 - DNA, 553 bp, Homo sapiens
tagagatggggtctcactctgttccccaggctagtctcaaactcctgagttcaagccatcctcctgccttggattcccaaagtgctgggattacaggcatgagccaccacgcctggccccacattaaaaattttgaaacggtagctttgattcaggtgtaactgtcctcctaaagaaaaataaaatgttctgagaagttttagtttaaagttggaaagcactgagaataaatctgttttgggggaaacattgaaatgctacgtttgaaaatctgtagaatttgcttcaggtgagacaaaggatggggtaagtcattgaaaggactcactgggacacatgtgcagtggagggtttaaaagtatttgcggaaaaatatttagaacgtttaatttctaaattagaaatgtatgagtgaatttagggggaaggggctggttaagtacccagggattggttccacagttgctgagcatacactgtcaccaagtcagatgtggctactgtcctcggggaggtgacaggtagaggagaaagccttatccactaggtttta

SEQ ID NO: 276052 - DNA, 1608 bp, Homo sapiens
aggcagacaagaggcaggtttttattttagactgtgatgttgaaaattttgtgatcactttttacactgtcccaggacatacagaaccaagacatagtgtcccaagtagtatctaatttcatatactttaggtagttctattccatttccaaaggtttagaataccgccccacctcaacccccaggaaactggggagcactccctccactacacacacttgggacacgaaggacagaccctggttggggaggcacttaggtgtcccttccttaggggctttatctctcacttcccctcctgggttggaggctcctgtgaccccctcgcctgggcaggtccccatgcagggtagagcacttggaggcctctgtaaacatgggttacaggagagagggggcaagaggccacagctggggtacataaggaaacccctctgtgggcccccttactcagagaagtctcaggagaaaccctttcccccacccccagtcctggcaccaagctggagaaagacaaaatggcttgtgaaggcatctgtctgccctccagggtggctgccaggggggcagccatgatggctggcctggtgtgggtgcctttgtgtgccatgactgggtgtctgtttctgcagtcactaggcgcttgttctgtggggtgaggggtgtgggggtgggggcacggcctatggcagggcacgtacgtgaggctgggcacgaaaagcctcttgtcccctttcccagatccaccaagcgtctatgggcagactgttttttcctgcacttcctagtggccagcagagggcgccgccaaaagactgaggccaccacggagggaacaggagaatcggctttttggggtctagccactgtgcagagcccaggcgcgtgggtcggtgtcgggtgtgtgtgtacgtctgtgtgtgtaatgaaactggacgccttccttcccggcgatcttgacttaacctgtcagcagagggcttgaggttagaccacaggttgaacctaggtggctgctggagaggtaagcccaggtggctcttggcaggaagaggaggatgagtgagttgctcccttctagcaacccaaatgggaagggacaacggaggttgccagctttcctccctgaccctggaagaagggttgggaggggttgcacagaatagctggtgtcccaccctgtgggaggaactgctatggacatctgggccacatctggtttcctggcaaggcagggagctggtctgtttggaattcttggtccaccgcttggtggtccctcaccattacattctaggaggaccctttacaaacaggtgtatagggcgcagccctgtaatgcgagtgagtccacagcaacctagtcgtggtcacactcctttggaagtggccctaggggcctgggcagcagcctgctcctctgcgccactcgacctttctgtggccatgttggagtctgcatgctgagatgctgccctttccccttggaaatgctgggaaatgtgctctggtgtccatcctggccatgcctcttcctccaggtggggtaagagatgaaaagaggagttagtctgcagtacctcttagggaccccaccccatgaaaggc

SEQ ID NO: 276053 - DNA, 3073 bp, Homo sapiens
aggcagacaagaggcaggtttttattttagactgtgatgttgaaaattttgtgatcactttttacactgtcccaggacatacagaaccaagacatagtgtcccaagtagtatctaatttcatatactttaggtagttctattccatttccaaaggtttagaataccgccccacctcaacccccaggaaactggggagcactccctccactacacacacttgggacacgaaggacagaccctggttggggaggcacttaggtgtcccttccttaggggctttatctctcacttcccctcctgggttggaggctcctgtgaccccctcgcctgggcaggtccccatgcagggtagagcacttggaggcctctgtaaacatgggttacaggagagagggggcaagaggccacagctggggtacataaggaaacccctctgtgggcccccttactcagagaagtctcaggagaaaccctttcccccacccccagtcctggcaccaagctggagaaagacaaaatggcttgtgaaggcatctgtctgccctccagggtggctgccaggggggcagccatgatggctggcctggtgtgggtgcctttgtgtgccatgactgggtgtctgtttctgcagtcactaggcgcttgttctgtggggtgaggggtgtgggggtgggggcacggcctatggcagggcacgtacgtgaggctgggcacgaaaagcctcttgtcccctttcccagatccaccaagcgtctatgggcagactgttttttcctgcacttcctagtggccagcagagggcgccgccaaaagactgaggccaccacggagggaacaggagaatcggctttttggggtctagccactgtgcagagcccaggcgcgtgggtcggtgtcgggtgtgtgtgtacgtctgtgtgtgtaatgaaactggacgccttccttcccggcgatcttgacttaacctgtcagcagagggcttgaggttagaccacaggttgaacctaggtggctgctggagagaaacactctgtcttcctgctttgaggacagctgaagtcttgccacttcttctggatgctctgaccctcaccctccgcagaatgcaggcccactccgttgctgaagggcctcctccttgggccagggcgcctgcttctgccagtggcatcatcaccccactcctcagccgccagtcatcagagacacggtctgactttgttaccccggctggagtgcagtggtgcaatcatggctcactgcagccttaacctcctgggctcaagtgatcctctcgccaaggctaggataagtagctaggactacagatgcgccccatcacgcccagctaattttacaacttctgtagagatggagtgttgctgggttgcccaggctggtcttgaattcctgggctcaagcgatcctcctgtgtccggaattggtgggttcttggtctcactgacttcaagaatgaagccgcggaccctcgcgagtctgtatccaccagctactcttccagattcatgaggcaaggcctgcctgctcacctggctggccccaagcacctcttcaacctgttgccaccgtcctgccttgctgcccttctcagctcatccagcagggtctccaagtcgtggaaacagaagcacatatacacacatgctcatatgtacatgcccacagtcacataagcacaccgagaaacaccatcgcagacatgttctcacaagcacatgtgcataacactcactacccctcacgcgtatacacattaatacacacactcatgcacactcagtcttacacacacagacacacagccataatcactgttgttggttgaattgtgcccccccatccccaccaaaaagataagttggagtcctaacccccagtacctggggatgtgaccgtagttggaaatagggtgtttgtagatgtaatcaaattaagatgagatcttactggattagagtgggccttaaatccagtgactggtgtccttataaggagaaaaagatttgaaaacagagacatggagacacagagcagaaggccatgtgatgatggagtcagagattggagtgatgcagctatgagccgagaaataccaaggtgctggcagcccccagaagcaaggagagaggcaaggaacaatctccatcagagcctctggaagaaacagactctgccaacaccttgatttcagacttttggcctccttcactgtgcgagaatacgtttctgttgttttaaactactgagtcaccaagtctgtggtactgtgttatggcagccccggcaacaaatccaatcacacacacacacacacacacacacacacacacacacacacacacagctggctccaggctcagtgatgagctcagaggagttccccttgggagctgctctttctctgtcttccttccttagtgattggtccagtggatccacaaaagctcatggcccagagcaggagcccagtcatttttaattcctcttccctggagttcttaaccatgcgttgccctcaaaatctgctctcaagatttgggttgccatatttaggagcaccagaaaacatacaggaatgctgtgtctgcttgcatcatattaattaaaaactggaaataacctaaatgtcccagaataggtacataaactgtggcatatccacttaatggaatactactcagcaatacaaaaggaaaacctagtgttacttgagcaacatggatgaacttcacagacataatattgcacagcacgaggcagacacaaaagtgtgcatatgctatgattccatttacatgagattcaagaacaggcaaagcagatctatggggatagaagtcagaatagtggttacctctggaaggtggaattgactgggaggggcttcagggaacctcctggggtgctgaaaacattctgtgcttgcaccgggtggtggttatgtgggcattacataaaattcaccaagctgcacccttaatgatttgtacaatttgatgcacaaatctaacatctcaagaagaataaattttacaaagtacctaagaagca

SEQ ID NO: 276054 - DNA, 3308 bp, Homo sapiens
tattcttagtaagtttcattcatcaaagcgtgacaaatggtgtcctgggaggaatgcctgggcgccatggggagccagagggtggggtggggtgcaaatgtcccatttgaggggagaggccattgccttcagggagctccagatggagggggagacagccctgtcctcatgggaatctgtctgatgcagaagacacaaagaacctagtcccaggggagacacagtccctgtcctttgggggaggccccagtctgaaggggggagacagccctgccctcagggagctccagtctgaggggagatgcagcctcatcctcaggcagccccagtctgagggggacacagccccatcttcagggagctccagtctgagggagaagcagccctttcttcagggagccccagtctgagggagacacagccccgtcctcagggagccgcagtctgaggggagacacaacgctgtcctgagggagccccactttgagggagacacggccccatcttcagggattcccagtctgaggcagacacagccccgtcctcagggagccccagtctgaggggagacacagccctgactcagggagccccaggctgaggggagacacagccctgtcctcagggagccccagtcggaggggagaaacagccccatcctcagggaaccgtcagtctgaatcggagacacagccttgccctcagagcgctccctgtgataggagataatcctcccatattccccccttctccagcccttagtgaaatcccagcctgaagggagagatccaatttcctgttctcaagcaacctctagtctcatggcagaaaaatagctaccatccctgatggagaagatagggtgccacccaagtcacggactgaaactcaagatgacaaaagggagtgctggaggggtatccgggagcatgtgcagccaccacggccactgcaagtggggagcctgacgatgacagagaagagggggctcccagagacacttgactgggcacccttaccaagaaacatgcagaccacaaaggggcagcaatcatggggactaagatcctgacgctgaggaaaaggatgtaggcacgggcccagcgggccggtctaaatcagaggtccaccttcactgggagggcagtcggagaacccacattgtctgcagactctcacattcaacctaaaacccatgtactcattgcaagccaaacaaaacctcactgaaggtaaaacgtggcccaaggccatgagtttgcaacaccctggacctcaggaaagaattgatcagtaaggtgggctgcttgtgcctgggggtcttctcaccctccgcagaatgcaggcccactccgttgctgaagggcctcctccttgggccagggcgcctgcttctgccagtggcatcatcaccccactcctcagccgccagtcatcagagacacggtctgactttgttaccccggctggagtgcagtggtgcaatcatggctcactgcagccttaacctcctgggctcaagtgatcctctcgccaaggctaggataagtagctaggactacagatgcgccccatcacgcccagctaattttacaacttctgtagagatggagtgttgctgggttgcccaggctggtcttgaattcctgggctcaagcgatcctcctgtgtccggaattggtgggttcttggtctcactgacttcaagaatgaagccgcggaccctcgcgagtctgtatccaccagctactcttccagattcatgaggcaaggcctgcctgctcacctggctggccccaagcacctcttcaacctgttgccaccgtcctgccttgctgcccttctcagctcatccagcagggtctccaagtcgtggaaacagaagcacatatacacacatgctcatatgtacatgcccacagtcacataagcacaccgagaaacaccatcgcagacatgttctcacaagcacatgtgcataacactcactacccctcacgcgtatacacattaatacacacactcatgcacactcagtcttacacacacagacacacagccataatcactgttgttggttgaattgtgcccccccatccccaccaaaaagataagttggagtcctaacccccagtacctggggatgtgaccgtagttggaaatagggtgtttgtagatgtaatcaaattaagatgagatcttactggattagagtgggccttaaatccagtgactggtgtccttataaggagaaaaagatttgaaaacagagacatggagacacagagcagaaggccatgtgatgatggagtcagagattggagtgatgcagctatgagccgagaaataccaaggtgctggcagcccccagaagcaaggagagaggcaaggaacaatctccatcagagcctctggaagaaacagactctgccaacaccttgatttcagacttttggcctccttcactgtgcgagaatacgtttctgttgttttaaactactgagtcaccaagtctgtggtactgtgttatggcagccccggcaacaaatccaatcacacacacacacacacacacacacacacacacacacacacacacagctggctccaggctcagtgatgagctcagaggagttccccttgggagctgctctttctctgtcttccttccttagtgattggtccagtggatccacaaaagctcatggcccagagcaggagcccagtcatttttaattcctcttccctggagttcttaaccatgcgttgccctcaaaatctgctctcaagatttgggttgccatatttaggagcaccagaaaacatacaggaatgctgtgtctgcttgcatcatattaattaaaaactggaaataacctaaatgtcccagaataggtacataaactgtggcatatccacttaatggaatactactcagcaatacaaaaggaaaacctagtgttacttgagcaacatggatgaacttcacagacataatattgcacagcacgaggcagacacaaaagtgtgcatatgctatgattccatttacatgagattcaagaacaggcaaagcagatctatggggatagaagtcagaatagtggttacctctggaaggtggaattgactgggaggggcttcagggaacctcctggggtgctgaaaacattctgtgcttgcaccgggtggtggttatgtgggcattacataaaattcaccaagctgcacccttaatgatttgtacaatttgatgcacaaatctaacatctcaagaagaataaattttacaaagtacctaagaagca

SEQ ID NO: 276055 - DNA, 2320 bp, Homo sapiens
tattcttagtaagtttcattcatcaaagcgtgacaaatggtgtcctgggaggaatgcctgggcgccatggggataagatcctgacgctgaggaaaaggatgtaggcacgggcccagcgggccggtctaaatcagaggtccaccttcactgggagggcagtcggagaacccacattgtctgcagactctcacattcaacctaaaacccatgtactcattgcaagccaaacaaaacctcactgaaggtaaaacgtggcccaaggccatgagtttgcaacaccctggacctcaggaaagaattgatcagtaaggtgggctgcttgtgcctgggggtcttctcaccctccgcagaatgcaggcccactccgttgctgaagggcctcctccttgggccagggcgcctgcttctgccagtggcatcatcaccccactcctcagccgccagtcatcagagacacggtctgactttgttaccccggctggagtgcagtggtgcaatcatggctcactgcagccttaacctcctgggctcaagtgatcctctcgccaaggctaggataagtagctaggactacagatgcgccccatcacgcccagctaattttacaacttctgtagagatggagtgttgctgggttgcccaggctggtcttgaattcctgggctcaagcgatcctcctgtgtccggaattggtgggttcttggtctcactgacttcaagaatgaagccgcggaccctcgcgagtctgtatccaccagctactcttccagattcatgaggcaaggcctgcctgctcacctggctggccccaagcacctcttcaacctgttgccaccgtcctgccttgctgcccttctcagctcatccagcagggtctccaagtcgtggaaacagaagcacatatacacacatgctcatatgtacatgcccacagtcacataagcacaccgagaaacaccatcgcagacatgttctcacaagcacatgtgcataacactcactacccctcacgcgtatacacattaatacacacactcatgcacactcagtcttacacacacagacacacagccataatcactgttgttggttgaattgtgcccccccatccccaccaaaaagataagttggagtcctaacccccagtacctggggatgtgaccgtagttggaaatagggtgtttgtagatgtaatcaaattaagatgagatcttactggattagagtgggccttaaatccagtgactggtgtccttataaggagaaaaagatttgaaaacagagacatggagacacagagcagaaggccatgtgatgatggagtcagagattggagtgatgcagctatgagccgagaaataccaaggtgctggcagcccccagaagcaaggagagaggcaaggaacaatctccatcagagcctctggaagaaacagactctgccaacaccttgatttcagacttttggcctccttcactgtgcgagaatacgtttctgttgttttaaactactgagtcaccaagtctgtggtactgtgttatggcagccccggcaacaaatccaatcacacacacacacacacacacacacacacacacacacacacacacagctggctccaggctcagtgatgagctcagaggagttccccttgggagctgctctttctctgtcttccttccttagtgattggtccagtggatccacaaaagctcatggcccagagcaggagcccagtcatttttaattcctcttccctggagttcttaaccatgcgttgccctcaaaatctgctctcaagatttgggttgccatatttaggagcaccagaaaacatacaggaatgctgtgtctgcttgcatcatattaattaaaaactggaaataacctaaatgtcccagaataggtacataaactgtggcatatccacttaatggaatactactcagcaatacaaaaggaaaacctagtgttacttgagcaacatggatgaacttcacagacataatattgcacagcacgaggcagacacaaaagtgtgcatatgctatgattccatttacatgagattcaagaacaggcaaagcagatctatggggatagaagtcagaatagtggttacctctggaaggtggaattgactgggaggggcttcagggaacctcctggggtgctgaaaacattctgtgcttgcaccgggtggtggttatgtgggcattacataaaattcaccaagctgcacccttaatgatttgtacaatttgatgcacaaatctaacatctcaagaagaataaattttacaaagtacctaagaagca

SEQ ID NO: 276056 - DNA, 1261 bp, Homo sapiens
aggcagacaagaggcaggtttttattttagactgtgatgttgaaaattttgtgatcactttttacactgtcccaggacatacagaaccaagacatagtgtcccaagtagtatctaatttcatatactttaggtagttctattccatttccaaaggtttagaataccgccccacctcaacccccaggaaactggggagcactccctccactacacacacttgggacacgaaggacagaccctggttggggaggcacttaggtgtcccttccttaggggctttatctctcacttcccctcctgggttggaggctcctgtgaccccctcgcctgggcaggtccccatgcagggtagagcacttggaggcctctgtaaacatgggttacaggagagagggggcaagaggccacagctggggtacataaggaaacccctctgtgggcccccttactcagagaagtctcaggagaaaccctttcccccacccccagtcctggcaccaagctggagaaagacaaaatggcttgtgaaggcatctgtctgccctccagggtggctgccaggggggcagccatgatggctggcctggtgtgggtgcctttgtgtgccatgactgggtgtctgtttctgcagtcactaggcgcttgttctgtggggtgaggggtgtgggggtgggggcacggcctatggcagggcacgtacgtgaggctgggcacgaaaagcctcttgtcccctttcccagatccaccaagcgtctatgggcagactgttttttcctgcacttcctagtggccagcagagggcgccgccaaaagactgaggccaccacggagggaacaggagaatcggctttttggggtctagccactgtgcagagcccaggcgcgtgggtcggtgtcgggtgtgtgtgtacgtctgtgtgtgtaatgaaactggacgccttccttcccggcgatcttgacttaacctgtcagcagagggcttgaggttagaccacaggttgaacctaggtggctgctggagagggtcacctcattgcccaagatggctgctggagccccagccagcaggaaggaagaagaaagcctgaagaaggacatgccccttcccttcaaggaagcttcctagaagtcacacttatattccattggccagaactcagtcatctagccatacctagctgcaagggaagctaggtagtctagtctttattccatgggggtctggctaaaagttgggaaataaacgaggaatggatatta

SEQ ID NO: 276057 - DNA, 2671 bp, Homo sapiens
gcttcggtctccccaagttctgcccccagtgaggcctcatagctctcctgggactgaggggcagtcccagagggcggcaggagttggcagccagtggtcctggggaccgcgaggtgggtgggtggagggtggcgaagggagggttccgggaccggggagcggcgtcttaattacggcgcgttggcccagcgccgcggagcgccgcggatgacagcggcggtgggtaattagagcgcattagccgtgcccctgcaatcctgtaatttcttctcgcgctcggggtgtgttgtaggaggcgaagcgatgccggcttggctgagtcagactctcggaagcccaggaggggacgcagggggcggcagaggccgcgaagaagggactcccgccgggggaggcgcagacgcagtcctctaggagtcacctgtcccgggctcctcggcgcgcgcgccccgtcggcggcgggaggtggtgggaagggggcgtgacctgcgtctcctcccgccgccgccgccgccgccgccgccgcgcgctctaccggcccgcgagtcctccgcgacatccgggccagcgtctgcacccagccacgtgtcctgcccctggtgcgcaggtggactgctttcctatgtctggggtggagggggtgtcctctctcctccctcaaactggaggcacctagggttaccagatctcaccctccgcagaatgcaggcccactccgttgctgaagggcctcctccttgggccagggcgcctgcttctgccagtggcatcatcaccccactcctcagccgccagtcatcagagacacggtctgactttgttaccccggctggagtgcagtggtgcaatcatggctcactgcagccttaacctcctgggctcaagtgatcctctcgccaaggctaggataagtagctaggactacagatgcgccccatcacgcccagctaattttacaacttctgtagagatggagtgttgctgggttgcccaggctggtcttgaattcctgggctcaagcgatcctcctgtgtccggaattggtgggttcttggtctcactgacttcaagaatgaagccgcggaccctcgcgagtctgtatccaccagctactcttccagattcatgaggcaaggcctgcctgctcacctggctggccccaagcacctcttcaacctgttgccaccgtcctgccttgctgcccttctcagctcatccagcagggtctccaagtcgtggaaacagaagcacatatacacacatgctcatatgtacatgcccacagtcacataagcacaccgagaaacaccatcgcagacatgttctcacaagcacatgtgcataacactcactacccctcacgcgtatacacattaatacacacactcatgcacactcagtcttacacacacagacacacagccataatcactgttgttggttgaattgtgcccccccatccccaccaaaaagataagttggagtcctaacccccagtacctggggatgtgaccgtagttggaaatagggtgtttgtagatgtaatcaaattaagatgagatcttactggattagagtgggccttaaatccagtgactggtgtccttataaggagaaaaagatttgaaaacagagacatggagacacagagcagaaggccatgtgatgatggagtcagagattggagtgatgcagctatgagccgagaaataccaaggtgctggcagcccccagaagcaaggagagaggcaaggaacaatctccatcagagcctctggaagaaacagactctgccaacaccttgatttcagacttttggcctccttcactgtgcgagaatacgtttctgttgttttaaactactgagtcaccaagtctgtggtactgtgttatggcagccccggcaacaaatccaatcacacacacacacacacacacacacacacacacacacacacacacagctggctccaggctcagtgatgagctcagaggagttccccttgggagctgctctttctctgtcttccttccttagtgattggtccagtggatccacaaaagctcatggcccagagcaggagcccagtcatttttaattcctcttccctggagttcttaaccatgcgttgccctcaaaatctgctctcaagatttgggttgccatatttaggagcaccagaaaacatacaggaatgctgtgtctgcttgcatcatattaattaaaaactggaaataacctaaatgtcccagaataggtacataaactgtggcatatccacttaatggaatactactcagcaatacaaaaggaaaacctagtgttacttgagcaacatggatgaacttcacagacataatattgcacagcacgaggcagacacaaaagtgtgcatatgctatgattccatttacatgagattcaagaacaggcaaagcagatctatggggatagaagtcagaatagtggttacctctggaaggtggaattgactgggaggggcttcagggaacctcctggggtgctgaaaacattctgtgcttgcaccgggtggtggttatgtgggcattacataaaattcaccaagctgcacccttaatgatttgtacaatttgatgcacaaatctaacatctcaagaagaataaattttacaaagtacctaagaagca

SEQ ID NO: 276058 - DNA, 525 bp, Homo sapiens
acacacagcaaataggtgaatgatgagacaatttcataattacaaattgcaatgactgctgtgaagggaaagatccaggggctatgagtggagtaactctgtaattcattatccaaactggggcactcttgagagtggaaggaggcatcattaagtattatattggaaaaacaggtgaaaaccagactatgccaggtaagtcaggatccatggtcaccattcaggaaactggactttcatttgactatacagagaagagagacccagaggatcaggacttagccatgcaaagagtctcaaaaaggacaatctgggcagaggaacagagaatcaagaaagtttgtgagttcgaggaactgcaagaaagcgtgtttggaacaaaatgatcaaggcataaagtgatgtcaggtgaggctgaggccagatcactcagggctgtagatcaaattatgcagattggattttttatttctaaatatagtatttggccagtgaaatactttattaagcagggaaggtgataac

SEQ ID NO: 276059 - DNA, 774 bp, Homo sapiens
acacacagcaaataggtgaatgatgagacaatttcataattacaaattgcaatgactgctgtgaagggaaagatccaggggctatgagtggagtaactctgtaattcattatccaaactggggcactcttgagagtggaaggaggcatcattaagtattatattggaaaaacaggtgaaaaccagactatgccaggtaagtcaggatccatggtcaccattcaggaaactggactttcatttgactatacagagaagagagacccagaggatcaggacttagccatgcaaagagtctcaaaaaggacaatctgggcagaggaacagagaatcaagaaagtttgtgagttcgaggaactgcaagaaagcgtgtttggaacaaaatgatcaaggcataaagtgatgtcaggaaagctgtgctttgaaagctcccatctctcaacacgccatccatggccacacaagctgtctgcccaccagactggggtctcttctgttgaacagaaggctgaccaaaagctgacccagcacaaagcccagctttccacaccaacagttactattagctaggctctcaattacagtatcaactttctgaaggaagactagaaaagaatcactctcctcatttccagatatatctgaaacaagggcacagtggtagtcattaaccataaagataaggttaatttgctttccttctaaatctgaatgctaatgtaaccatttaaatagtgccaacaatggaaataaacacaaggctgagttaaaccac

SEQ ID NO: 276060 - DNA, 1265 bp, Homo sapiens
cggacgcgtgggtcgacccacgcgtccgggtttcttaggaacaaagcaactattttgattactgagatctctgttttgtttctgtgagttactctgtattcctttccccatttcactcttgcccttcacatcttaaatgtccataagaaacccttgcatgtgttggtattctgaggcatcccgtgggaaagtcccctaagtcccattttgtacttcaacaaaaaatgactgtagcagaagataagtggagacttttatggatatactactcattttacttaaaatctacccagttcagacttgaatgtaaacttgtattaggggaaaattctccaaagagggttttctacatacacagaagcagttcaacttctcaagttaattttgataagcagaatctactactggccagagcgacaggagtggctaggggttgccagccagtccctttctgatgatcaaggccctgcacagcaggatgccacaggatgcccctgccatctagctggaagcatcaaaagtccctctgtatgacccggtgtgggaaagagggttgtcaggatgagaaagtggggctgcagggtgacgataagaccacctaaccaactccccacctccaccaccacaataagaacaaaactgtagggctctaaagagagggggtggtttacaagtttattgagcatttactaggaagtgacatggcgatgacctctgtacatgagttaggttcactttcatgtggcctcccactacagagatgcgtatgcccagaagtcagctctctgaggagacaggctactttggccccagtttgaagcattctgtccaaatgtcctgagctctccagcagtcaagtagtgaatggataccatacttattatggttgatgaaaaaaggcagagcttatcctcaattttttttagggaagagaaggaataaaataaaagtggttcaagctgggcatggtggctcacacctgtaattgcagcactttgggaggctgaggcaggcagatcacttgaggtcaggagttcaagaccagcctggccaacagggtgaaaccccatctctactaaaaatacaaaaattacccaggcgtgatggtgggcgcctgtaatcccagctacacaggaagctgaggcaggaaaattgcttgaaccggggaggcggagattgcagtgagccaagattgtgccacttcattccagcctgggcgacagagcgaaactctgtcaaaggaaaggaaagaaaagaaaaaaaaa

SEQ ID NO: 276061 - DNA, 895 bp, Homo sapiens
ggtttctgctggaactacctttgttaaattgcaattaggtatttttctttggcttactttgaagctgtggctaaaaatagttgcaaattacaaagctcatgcaggatctactctggggctctcgttgagggtattgcccactaaatcacacagtgcctctttaggagaacccatagaagagattttactctggtcttagtaccaagagatgccattcttaggagaaagtagtttgtttttgtcttttggacataattgcaaatttttgttattggttctatttcctctttgcttatgctaggaaactcagagccatatgtgaaagcatttttatttactaaaccccctggttttatttcgttttctttgccttccttttcctcccctcctcattctttcctccagatgcataagatgcctgacctatttatcattggcagcggtgaggccatgttgcagctcatccctcccttccagtgccgaagacattgtcagtctgtggccatgccaatagagccaggggatatcggtatgtagggccccaggaggcagggtcaatggatctttttagtttttaactcaaaagctattttaagaatcacatactgccttcacaaaagttttatttagtagaatcaaaaataacattctcctgttaacaggctcaatatttatgcttagaaatgaaacaacttaatgagaaaacatagcagaaagaaatggcttgtacatacaacatatagaatgcgtgtgtctattgatcatagaaacttcaagttaggaaggattctggaaaatatttagaccaatccctcgttttatagatgaaaaggttgagacccagagaggagaggtgaccaccccaaggccccactgtcagtcgagcagagcgtca

SEQ ID NO: 276062 - DNA, 693 bp, Homo sapiens
acctgtccctgttgggtcacctccttggatcatgaagtctttgataattctgtggaattttgtgccattgtagtaacctcgacgagccaactcagcaaagttcttacaggtctttggagcatgcagcggagtacagctccagcacaatgattcccatgctgcagagggagaggacaacagctccagtaaacaaaaaggtcagggcagacaggagtattatggaactgctccaggactcttgattttcaagcttgtaagtcatgaaattgtgataaccactggatttcatgctcagcaaaggaaaacaccacaatgcaagtaacataaacacccattatcttttttgagtaaaacacgcaggtgttctgggtacttcttttcagcaaaataacaagcatggagaactcaaaattctaatactatacatatatacatatgtatatatatatagctatatctgattatctgaaaccaatataaccaacccctaaattaggaaaaaaattcttacacttaatttttaattttttaaaaaaagagacattaaaatatcaggagttcatatttatttagaagtttctgggtgggggtagggactgggtagatggaaaataggaagatgtttaatgaataccttttaaaaacttttgtatttttgatccatgtaaatacattacctattcaaaaaattta

SEQ ID NO: 276063 - DNA, 4361 bp, Homo sapiens
ttctgttttgggcggaagcgctggacgagaggaggaattactctagggtacaaggcctcgccccaggagtggggggttgcttccgggtcgcgctcccggaaacaggaagttgcccatcctcctcgcccggcggcagctgtccccgaggcgggaggagcccgagggggcgcgagccccgcatggattttatattggaagacatggatcttgctgccaacgagatcagcatttatgacaaactttcagagactgttgatttggtgagacagaccggccatcagtgtggcatgtcagagaaggcaattgaaaaatttatcagacagctgctggaaaagaatgaacctcagagaccccccccgcagtatcctctccttatagttgtgtataaggttctcgcaaccttgggattaatcttgctcactgcctactttgtgattcaacctttcagcccattagcacctgagccagtgctttctggagctcacacctggcgctcactcatccatcacattaggctgatgtccttgcccattgccaagaagtacatgtcagaaaataagggagttcctctgcatgggggtgatgaagacagaccctttccagactttgacccctggtggacaaacgactgtgagcagaatgagtcagagcccattcctgccaactgcactggctgtgcccagaaacacctgaaggtgatgctcctggaagacgccccaaggaaatttgagaggctccatccactggtgatcaagacgggaaagcccctgttggaggaagagattcagcattttttgtgccagtaccctgaggcgacagaaggcttctctgaagggtttttcgccaagtggtggcgctgctttcctgagcggtggttcccatttccttatccatggaggagacctctgaacagatcacaaatgttacgtgagctttttcctgttttcactcacctgccatttccaaaagatgcctctttaaacaagtgctcctttcttcacccagaacctgttgtggggagtaagatgcataagatgcctgacctatttatcattggcagcggtgaggccatgttgcagctcatccctcccttccagtgccgaagacattgtcagtctgtggccatgccaatagagccaggggatatcggctatgtcgacaccacccactggaaggtctacgttatagccagaggggtccagcctttggtcatctgcgatggaaccgctttctcagaactgtaggaaatagaactgtgcacaggaacagcttccagagccgaaaaccaggttgaaaggggaaaaataaaaacaaaaacgatgaaactgctttctgggggttggttacttagttacctgccctttgcatgcatgtgtgaaccagctgtgagctgcaaggcagtggccagagcctcgccctcctgactcttcctgcaggtggctcaggaaggattcagcctggccacttggctaggactctgccagcacccatctgagactgacctcttccgggcctttggacactatgaccttgatgctgcccttcaggcaggaaacagggctggtgcctttcttcacctgcatggccagcttccttccctggcagtggagagggcagccaacaggttctaatgtcagagccatcctttaccaggtgggcctgcttgtccctgtcttgcctgccacatcactctactttttggaaggccatggctgattaaagaagttcttgtagtttcccaagcaaagtggaatctagaaacagtgaaaaaagttcagataactttgaattgcattcaagaagtacacttctttcccattgtccgtggctcttggagtctccgtgatgccaggctagagtctgattatataataattcaaaatggtaactcccaaggtaatgctttcttccatttcatcaggttcttttatccccactgcaccccctccccttctcccttgcctatctggatggcttctcagaagctcggccctagtcctccctgccttggcggggccagagcccactactgctgaggcagcactgctctcgtcagctgtgttgcctttaccaagtgtcttcagagggttatgagttagagtagctggcctggggagagggtgcctccctgggtttgatctttagggtctgactttctgcagagaagatgttttacagatgtgtcaaagctgatgtaatgtggttgggggaggaaatccagacccaaagtgtttgtcagctgggtgtacaactgcctatgtgatcctctgtcttaaaatgatttctgtctgtgctgcgaaacaaagacaaggtgaggtgtttttcttttttgtaataatataaagctgtgtgtttctgattggatgattcactatgtgcattgttttctcctaagtgcttttagtaggtagcaatcaaatggtgtaaataaggatgttcttttcctgttccttttatttttttctctctttattattcttttattgacaccactagatagctggccactggtcatgccattgccaagatgaagaaaaagcaaactacactttggcctctggttctgaattgcagaaatcaaaggatgcagtaggtgtctatgtcagaattatggatcagaggcagacaatgacgagtgaagatggttgtgaagccctcttcattcctggaggagcctgcatctcatctctcaggccctctttctctgtgggtctcatgaacagcagtggggaccattgagcacttgaatggcctgtttgtctatgggcttgcaaaggacaagcagagttcacagagctcaggatagaaacatcagagcctcctccacgggcttcagtgaaactccgatgaactgtacctgagggaattttttcttaatcaaccccttgtgtggatgaatacaggaacaacaaaacttgtgtacgtatgaaagtcatgttgttaagcagttatgatttaagaggttttaagtcagagggatcatctggaggccggctttgtgcaagcttttacagccttctgcagtgtccttaccctggctgtacatggggaagggctatgtgtaaacaagtgctttagaggcctctgagagtttttaaaaatcagacccattaacaaaagagagggtttcttaggaacaaagcaactattttgattactgagatctctgttttgtttctgtgagttactctgtattcctttccccatttcactcttgcccttcacatcttaaatgtccataagaaacccttgcatgtgttggtattctgaggcatcccgtgggaaagtcccctaagtcccattttgtacttcaacaaaaaatgactgtagcagaagataagtggagacttttatggatatactactcattttacttaaaatctacccagttcagacttgaatgtaaacttgtattaggggaaaattctccaaagagggttttctacatacacagaagcagttcaacttctcaagttaattttgataagcagaatctactactggccagagcgacaggagtggctaggggttgccagccagtccctttctgatgatcaaggccctgcacagcaggatgccacaggatgcccctgccatctagctggaagcatcaaaagtccctctgtatgacccggtgtgggaaagagggttgtcaggatgagaaagtggggctgcagggtgacgataagaccacctaaccaactccccacctccaccaccacaataagaacaaaactgtagggctctaaagagagggggtggtttacaagtttattgagcatttactaggaagtgacatggcgatgacctctgtacatgagttaggttcactttcatgtggcctcccactacagagatgcgtatgcccagaagtcagctctctgaggagacaggctactttggccccagtttgaagcattctgtccaaatgtcctgagctctccagcagtcaagtagtgaatggataccatacttattatggttgatgaaaaaaggcagagcttatcctcaattttttttagggaagagaaggaataaaataaaagtggttcaagctgggcatggtggctcacacctgtaattgcagcactttgggaggctgaggcaggcagatcacttgaggtcaggagttcaagaccagcctggccaacagggtgaaaccccatctctactaaaaatacaaaaattacccaggcgtgatggtgggcgcctgtaatcccagctacacaggaagctgaggcaggaaaattgcttgaaccggggaggcggagattgcagtgagccaagattgtgccacttcattccagcctgggcgacagagcgaaactctgtcaaaggaaaggaaagaaaagaaaaaaaaa

SEQ ID NO: 276064 - DNA, 4557 bp, Homo sapiens
ggccgctgagggaaagggaacccagaaggctggcatgccagcaaaagagtaagaatttcttaccagtcagatttttggcttctctctctctgtgcaaatggttgaatgaatgaacctgcagattggatcgtctgagaacaccagagaaagagaaagactgtccttgccatccacactacagcaaaactttggagctttaaaccttgggttcataatctcacagctgagaagggtccctccacactcctggaactgtacatccattggaacccttaaggaatcattgtagtcaatcattttccagttctcagccgctcagttgtgatcaagggacacgtggtttccgaactgccagctcagaataggaaaataacttgggattttatattggaagacatggatcttgctgccaacgagatcagcatttatgacaaactttcagagactgttgatttggtgagacagaccggccatcagtgtggcatgtcagagaaggcaattgaaaaatttatcagacagctgctggaaaagaatgaacctcagagaccccccccgcagtatcctctccttatagttgtgtataaggttctcgcaaccttgggattaatcttgctcactgcctactttgtgattcaacctttcagcccattagcacctgagccagtgctttctggagctcacacctggcgctcactcatccatcacattaggctgatgtccttgcccattgccaagaagtacatgtcagaaaataagggagttcctctgcatgggggtgatgaagacagaccctttccagactttgacccctggtggacaaacgactgtgagcagaatgagtcagagcccattcctgccaactgcactggctgtgcccagaaacacctgaaggtgatgctcctggaagacgccccaaggaaatttgagaggctccatccactggtgatcaagacgggaaagcccctgttggaggaagagattcagcattttttgtgccagtaccctgaggcgacagaaggcttctctgaagggtttttcgccaagtggtggcgctgctttcctgagcggtggttcccatttccttatccatggaggagacctctgaacagatcacaaatgttacgtgagctttttcctgttttcactcacctgccatttccaaaagatgcctctttaaacaagtgctcctttcttcacccagaacctgttgtggggagtaagatgcataagatgcctgacctatttatcattggcagcggtgaggccatgttgcagctcatccctcccttccagtgccgaagacattgtcagtctgtggccatgccaatagagccaggggatatcggctatgtcgacaccacccactggaaggtctacgttatagccagaggggtccagcctttggtcatctgcgatggaaccgctttctcagaactgtaggaaatagaactgtgcacaggaacagcttccagagccgaaaaccaggttgaaaggggaaaaataaaaacaaaaacgatgaaactgctttctgggggttggttacttagttacctgccctttgcatgcatgtgtgaaccagctgtgagctgcaaggcagtggccagagcctcgccctcctgactcttcctgcaggtggctcaggaaggattcagcctggccacttggctaggactctgccagcacccatctgagactgacctcttccgggcctttggacactatgaccttgatgctgcccttcaggcaggaaacagggctggtgcctttcttcacctgcatggccagcttccttccctggcagtggagagggcagccaacaggttctaatgtcagagccatcctttaccaggtgggcctgcttgtccctgtcttgcctgccacatcactctactttttggaaggccatggctgattaaagaagttcttgtagtttcccaagcaaagtggaatctagaaacagtgaaaaaagttcagataactttgaattgcattcaagaagtacacttctttcccattgtccgtggctcttggagtctccgtgatgccaggctagagtctgattatataataattcaaaatggtaactcccaaggtaatgctttcttccatttcatcaggttcttttatccccactgcaccccctccccttctcccttgcctatctggatggcttctcagaagctcggccctagtcctccctgccttggcggggccagagcccactactgctgaggcagcactgctctcgtcagctgtgttgcctttaccaagtgtcttcagagggttatgagttagagtagctggcctggggagagggtgcctccctgggtttgatctttagggtctgactttctgcagagaagatgttttacagatgtgtcaaagctgatgtaatgtggttgggggaggaaatccagacccaaagtgtttgtcagctgggtgtacaactgcctatgtgatcctctgtcttaaaatgatttctgtctgtgctgcgaaacaaagacaaggtgaggtgtttttcttttttgtaataatataaagctgtgtgtttctgattggatgattcactatgtgcattgttttctcctaagtgcttttagtaggtagcaatcaaatggtgtaaataaggatgttcttttcctgttccttttatttttttctctctttattattcttttattgacaccactagatagctggccactggtcatgccattgccaagatgaagaaaaagcaaactacactttggcctctggttctgaattgcagaaatcaaaggatgcagtaggtgtctatgtcagaattatggatcagaggcagacaatgacgagtgaagatggttgtgaagccctcttcattcctggaggagcctgcatctcatctctcaggccctctttctctgtgggtctcatgaacagcagtggggaccattgagcacttgaatggcctgtttgtctatgggcttgcaaaggacaagcagagttcacagagctcaggatagaaacatcagagcctcctccacgggcttcagtgaaactccgatgaactgtacctgagggaattttttcttaatcaaccccttgtgtggatgaatacaggaacaacaaaacttgtgtacgtatgaaagtcatgttgttaagcagttatgatttaagaggttttaagtcagagggatcatctggaggccggctttgtgcaagcttttacagccttctgcagtgtccttaccctggctgtacatggggaagggctatgtgtaaacaagtgctttagaggcctctgagagtttttaaaaatcagacccattaacaaaagagagggtttcttaggaacaaagcaactattttgattactgagatctctgttttgtttctgtgagttactctgtattcctttccccatttcactcttgcccttcacatcttaaatgtccataagaaacccttgcatgtgttggtattctgaggcatcccgtgggaaagtcccctaagtcccattttgtacttcaacaaaaaatgactgtagcagaagataagtggagacttttatggatatactactcattttacttaaaatctacccagttcagacttgaatgtaaacttgtattaggggaaaattctccaaagagggttttctacatacacagaagcagttcaacttctcaagttaattttgataagcagaatctactactggccagagcgacaggagtggctaggggttgccagccagtccctttctgatgatcaaggccctgcacagcaggatgccacaggatgcccctgccatctagctggaagcatcaaaagtccctctgtatgacccggtgtgggaaagagggttgtcaggatgagaaagtggggctgcagggtgacgataagaccacctaaccaactccccacctccaccaccacaataagaacaaaactgtagggctctaaagagagggggtggtttacaagtttattgagcatttactaggaagtgacatggcgatgacctctgtacatgagttaggttcactttcatgtggcctcccactacagagatgcgtatgcccagaagtcagctctctgaggagacaggctactttggccccagtttgaagcattctgtccaaatgtcctgagctctccagcagtcaagtagtgaatggataccatacttattatggttgatgaaaaaaggcagagcttatcctcaattttttttagggaagagaaggaataaaataaaagtggttcaagctgggcatggtggctcacacctgtaattgcagcactttgggaggctgaggcaggcagatcacttgaggtcaggagttcaagaccagcctggccaacagggtgaaaccccatctctactaaaaatacaaaaattacccaggcgtgatggtgggcgcctgtaatcccagctacacaggaagctgaggcaggaaaattgcttgaaccggggaggcggagattgcagtgagccaagattgtgccacttcattccagcctgggcgacagagcgaaactctgtcaaaggaaaggaaagaaaagaaaaaaaaa

SEQ ID NO: 276065 - DNA, 4485 bp, Homo sapiens
ttctgttttgggcggaagcgctggacgagaggaggaattactctagggtacaaggcctcgccccaggagtggggggttgcttccgggtcgcgctcccggaaacaggaagttgcccatcctcctcgcccggcggcagctgtccccgaggcgggaggagcccgagggggcgcgagccccgcatagatgggatctcgttctgtctcccaggctggagtgcagtggtatgatcatagctcactgcagcctcaaactcctgggctcaagcagtcctcccacctcagcttcccaggtagctgggactacagggattttatattggaagacatggatcttgctgccaacgagatcagcatttatgacaaactttcagagactgttgatttggtgagacagaccggccatcagtgtggcatgtcagagaaggcaattgaaaaatttatcagacagctgctggaaaagaatgaacctcagagaccccccccgcagtatcctctccttatagttgtgtataaggttctcgcaaccttgggattaatcttgctcactgcctactttgtgattcaacctttcagcccattagcacctgagccagtgctttctggagctcacacctggcgctcactcatccatcacattaggctgatgtccttgcccattgccaagaagtacatgtcagaaaataagggagttcctctgcatgggggtgatgaagacagaccctttccagactttgacccctggtggacaaacgactgtgagcagaatgagtcagagcccattcctgccaactgcactggctgtgcccagaaacacctgaaggtgatgctcctggaagacgccccaaggaaatttgagaggctccatccactggtgatcaagacgggaaagcccctgttggaggaagagattcagcattttttgtgccagtaccctgaggcgacagaaggcttctctgaagggtttttcgccaagtggtggcgctgctttcctgagcggtggttcccatttccttatccatggaggagacctctgaacagatcacaaatgttacgtgagctttttcctgttttcactcacctgccatttccaaaagatgcctctttaaacaagtgctcctttcttcacccagaacctgttgtggggagtaagatgcataagatgcctgacctatttatcattggcagcggtgaggccatgttgcagctcatccctcccttccagtgccgaagacattgtcagtctgtggccatgccaatagagccaggggatatcggctatgtcgacaccacccactggaaggtctacgttatagccagaggggtccagcctttggtcatctgcgatggaaccgctttctcagaactgtaggaaatagaactgtgcacaggaacagcttccagagccgaaaaccaggttgaaaggggaaaaataaaaacaaaaacgatgaaactgctttctgggggttggttacttagttacctgccctttgcatgcatgtgtgaaccagctgtgagctgcaaggcagtggccagagcctcgccctcctgactcttcctgcaggtggctcaggaaggattcagcctggccacttggctaggactctgccagcacccatctgagactgacctcttccgggcctttggacactatgaccttgatgctgcccttcaggcaggaaacagggctggtgcctttcttcacctgcatggccagcttccttccctggcagtggagagggcagccaacaggttctaatgtcagagccatcctttaccaggtgggcctgcttgtccctgtcttgcctgccacatcactctactttttggaaggccatggctgattaaagaagttcttgtagtttcccaagcaaagtggaatctagaaacagtgaaaaaagttcagataactttgaattgcattcaagaagtacacttctttcccattgtccgtggctcttggagtctccgtgatgccaggctagagtctgattatataataattcaaaatggtaactcccaaggtaatgctttcttccatttcatcaggttcttttatccccactgcaccccctccccttctcccttgcctatctggatggcttctcagaagctcggccctagtcctccctgccttggcggggccagagcccactactgctgaggcagcactgctctcgtcagctgtgttgcctttaccaagtgtcttcagagggttatgagttagagtagctggcctggggagagggtgcctccctgggtttgatctttagggtctgactttctgcagagaagatgttttacagatgtgtcaaagctgatgtaatgtggttgggggaggaaatccagacccaaagtgtttgtcagctgggtgtacaactgcctatgtgatcctctgtcttaaaatgatttctgtctgtgctgcgaaacaaagacaaggtgaggtgtttttcttttttgtaataatataaagctgtgtgtttctgattggatgattcactatgtgcattgttttctcctaagtgcttttagtaggtagcaatcaaatggtgtaaataaggatgttcttttcctgttccttttatttttttctctctttattattcttttattgacaccactagatagctggccactggtcatgccattgccaagatgaagaaaaagcaaactacactttggcctctggttctgaattgcagaaatcaaaggatgcagtaggtgtctatgtcagaattatggatcagaggcagacaatgacgagtgaagatggttgtgaagccctcttcattcctggaggagcctgcatctcatctctcaggccctctttctctgtgggtctcatgaacagcagtggggaccattgagcacttgaatggcctgtttgtctatgggcttgcaaaggacaagcagagttcacagagctcaggatagaaacatcagagcctcctccacgggcttcagtgaaactccgatgaactgtacctgagggaattttttcttaatcaaccccttgtgtggatgaatacaggaacaacaaaacttgtgtacgtatgaaagtcatgttgttaagcagttatgatttaagaggttttaagtcagagggatcatctggaggccggctttgtgcaagcttttacagccttctgcagtgtccttaccctggctgtacatggggaagggctatgtgtaaacaagtgctttagaggcctctgagagtttttaaaaatcagacccattaacaaaagagagggtttcttaggaacaaagcaactattttgattactgagatctctgttttgtttctgtgagttactctgtattcctttccccatttcactcttgcccttcacatcttaaatgtccataagaaacccttgcatgtgttggtattctgaggcatcccgtgggaaagtcccctaagtcccattttgtacttcaacaaaaaatgactgtagcagaagataagtggagacttttatggatatactactcattttacttaaaatctacccagttcagacttgaatgtaaacttgtattaggggaaaattctccaaagagggttttctacatacacagaagcagttcaacttctcaagttaattttgataagcagaatctactactggccagagcgacaggagtggctaggggttgccagccagtccctttctgatgatcaaggccctgcacagcaggatgccacaggatgcccctgccatctagctggaagcatcaaaagtccctctgtatgacccggtgtgggaaagagggttgtcaggatgagaaagtggggctgcagggtgacgataagaccacctaaccaactccccacctccaccaccacaataagaacaaaactgtagggctctaaagagagggggtggtttacaagtttattgagcatttactaggaagtgacatggcgatgacctctgtacatgagttaggttcactttcatgtggcctcccactacagagatgcgtatgcccagaagtcagctctctgaggagacaggctactttggccccagtttgaagcattctgtccaaatgtcctgagctctccagcagtcaagtagtgaatggataccatacttattatggttgatgaaaaaaggcagagcttatcctcaattttttttagggaagagaaggaataaaataaaagtggttcaagctgggcatggtggctcacacctgtaattgcagcactttgggaggctgaggcaggcagatcacttgaggtcaggagttcaagaccagcctggccaacagggtgaaaccccatctctactaaaaatacaaaaattacccaggcgtgatggtgggcgcctgtaatcccagctacacaggaagctgaggcaggaaaattgcttgaaccggggaggcggagattgcagtgagccaagattgtgccacttcattccagcctgggcgacagagcgaaactctgtcaaaggaaaggaaagaaaagaaaaaaaaa

SEQ ID NO: 276066 - DNA, 4723 bp, Homo sapiens
acctgtccctgttgggtcacctccttggatcatgaagtctttgataattctgtggaattttgtgccattgtagtaacctcgacgagccaactcagcaaagttcttacaggtctttggagcatgcagcggagtacagctccagcacaatgattcccatgctgcagagggagaggacaacagctccagtaaacaaaaaggtcagggcagacaggagtattatggaactgctccaggactcttgattttcaagcttatggtgtcaggaatgggatctaaagtggagcttctagcgacccccaggagcactgagtgaacatgcaaggtacctgcaggatccacttgtgtctattgatctctcacagcagctggggatcacagaacctgcagattggatcgtctgagaacaccagagaaagagaaagactgtccttgccatccacactacagcaaaactttggagctttaaaccttgggttcataatctcacagctgagaagggtccctccacactcctggaactgtacatccattggaacccttaagggattttatattggaagacatggatcttgctgccaacgagatcagcatttatgacaaactttcagagactgttgatttggtgagacagaccggccatcagtgtggcatgtcagagaaggcaattgaaaaatttatcagacagctgctggaaaagaatgaacctcagagaccccccccgcagtatcctctccttatagttgtgtataaggttctcgcaaccttgggattaatcttgctcactgcctactttgtgattcaacctttcagcccattagcacctgagccagtgctttctggagctcacacctggcgctcactcatccatcacattaggctgatgtccttgcccattgccaagaagtacatgtcagaaaataagggagttcctctgcatgggggtgatgaagacagaccctttccagactttgacccctggtggacaaacgactgtgagcagaatgagtcagagcccattcctgccaactgcactggctgtgcccagaaacacctgaaggtgatgctcctggaagacgccccaaggaaatttgagaggctccatccactggtgatcaagacgggaaagcccctgttggaggaagagattcagcattttttgtgccagtaccctgaggcgacagaaggcttctctgaagggtttttcgccaagtggtggcgctgctttcctgagcggtggttcccatttccttatccatggaggagacctctgaacagatcacaaatgttacgtgagctttttcctgttttcactcacctgccatttccaaaagatgcctctttaaacaagtgctcctttcttcacccagaacctgttgtggggagtaagatgcataagatgcctgacctatttatcattggcagcggtgaggccatgttgcagctcatccctcccttccagtgccgaagacattgtcagtctgtggccatgccaatagagccaggggatatcggctatgtcgacaccacccactggaaggtctacgttatagccagaggggtccagcctttggtcatctgcgatggaaccgctttctcagaactgtaggaaatagaactgtgcacaggaacagcttccagagccgaaaaccaggttgaaaggggaaaaataaaaacaaaaacgatgaaactgctttctgggggttggttacttagttacctgccctttgcatgcatgtgtgaaccagctgtgagctgcaaggcagtggccagagcctcgccctcctgactcttcctgcaggtggctcaggaaggattcagcctggccacttggctaggactctgccagcacccatctgagactgacctcttccgggcctttggacactatgaccttgatgctgcccttcaggcaggaaacagggctggtgcctttcttcacctgcatggccagcttccttccctggcagtggagagggcagccaacaggttctaatgtcagagccatcctttaccaggtgggcctgcttgtccctgtcttgcctgccacatcactctactttttggaaggccatggctgattaaagaagttcttgtagtttcccaagcaaagtggaatctagaaacagtgaaaaaagttcagataactttgaattgcattcaagaagtacacttctttcccattgtccgtggctcttggagtctccgtgatgccaggctagagtctgattatataataattcaaaatggtaactcccaaggtaatgctttcttccatttcatcaggttcttttatccccactgcaccccctccccttctcccttgcctatctggatggcttctcagaagctcggccctagtcctccctgccttggcggggccagagcccactactgctgaggcagcactgctctcgtcagctgtgttgcctttaccaagtgtcttcagagggttatgagttagagtagctggcctggggagagggtgcctccctgggtttgatctttagggtctgactttctgcagagaagatgttttacagatgtgtcaaagctgatgtaatgtggttgggggaggaaatccagacccaaagtgtttgtcagctgggtgtacaactgcctatgtgatcctctgtcttaaaatgatttctgtctgtgctgcgaaacaaagacaaggtgaggtgtttttcttttttgtaataatataaagctgtgtgtttctgattggatgattcactatgtgcattgttttctcctaagtgcttttagtaggtagcaatcaaatggtgtaaataaggatgttcttttcctgttccttttatttttttctctctttattattcttttattgacaccactagatagctggccactggtcatgccattgccaagatgaagaaaaagcaaactacactttggcctctggttctgaattgcagaaatcaaaggatgcagtaggtgtctatgtcagaattatggatcagaggcagacaatgacgagtgaagatggttgtgaagccctcttcattcctggaggagcctgcatctcatctctcaggccctctttctctgtgggtctcatgaacagcagtggggaccattgagcacttgaatggcctgtttgtctatgggcttgcaaaggacaagcagagttcacagagctcaggatagaaacatcagagcctcctccacgggcttcagtgaaactccgatgaactgtacctgagggaattttttcttaatcaaccccttgtgtggatgaatacaggaacaacaaaacttgtgtacgtatgaaagtcatgttgttaagcagttatgatttaagaggttttaagtcagagggatcatctggaggccggctttgtgcaagcttttacagccttctgcagtgtccttaccctggctgtacatggggaagggctatgtgtaaacaagtgctttagaggcctctgagagtttttaaaaatcagacccattaacaaaagagagggtttcttaggaacaaagcaactattttgattactgagatctctgttttgtttctgtgagttactctgtattcctttccccatttcactcttgcccttcacatcttaaatgtccataagaaacccttgcatgtgttggtattctgaggcatcccgtgggaaagtcccctaagtcccattttgtacttcaacaaaaaatgactgtagcagaagataagtggagacttttatggatatactactcattttacttaaaatctacccagttcagacttgaatgtaaacttgtattaggggaaaattctccaaagagggttttctacatacacagaagcagttcaacttctcaagttaattttgataagcagaatctactactggccagagcgacaggagtggctaggggttgccagccagtccctttctgatgatcaaggccctgcacagcaggatgccacaggatgcccctgccatctagctggaagcatcaaaagtccctctgtatgacccggtgtgggaaagagggttgtcaggatgagaaagtggggctgcagggtgacgataagaccacctaaccaactccccacctccaccaccacaataagaacaaaactgtagggctctaaagagagggggtggtttacaagtttattgagcatttactaggaagtgacatggcgatgacctctgtacatgagttaggttcactttcatgtggcctcccactacagagatgcgtatgcccagaagtcagctctctgaggagacaggctactttggccccagtttgaagcattctgtccaaatgtcctgagctctccagcagtcaagtagtgaatggataccatacttattatggttgatgaaaaaaggcagagcttatcctcaattttttttagggaagagaaggaataaaataaaagtggttcaagctgggcatggtggctcacacctgtaattgcagcactttgggaggctgaggcaggcagatcacttgaggtcaggagttcaagaccagcctggccaacagggtgaaaccccatctctactaaaaatacaaaaattacccaggcgtgatggtgggcgcctgtaatcccagctacacaggaagctgaggcaggaaaattgcttgaaccggggaggcggagattgcagtgagccaagattgtgccacttcattccagcctgggcgacagagcgaaactctgtcaaaggaaaggaaagaaaagaaaaaaaaa

SEQ ID NO: 276067 - DNA, 4232 bp, Homo sapiens
gtatcttgaggatcccctggaaaccgcccatggtagacacgagcctcgtaatggattttatattggaagacatggatcttgctgccaacgagatcagcatttatgacaaactttcagagactgttgatttggtgagacagaccggccatcagtgtggcatgtcagagaaggcaattgaaaaatttatcagacagctgctggaaaagaatgaacctcagagaccccccccgcagtatcctctccttatagttgtgtataaggttctcgcaaccttgggattaatcttgctcactgcctactttgtgattcaacctttcagcccattagcacctgagccagtgctttctggagctcacacctggcgctcactcatccatcacattaggctgatgtccttgcccattgccaagaagtacatgtcagaaaataagggagttcctctgcatgggggtgatgaagacagaccctttccagactttgacccctggtggacaaacgactgtgagcagaatgagtcagagcccattcctgccaactgcactggctgtgcccagaaacacctgaaggtgatgctcctggaagacgccccaaggaaatttgagaggctccatccactggtgatcaagacgggaaagcccctgttggaggaagagattcagcattttttgtgccagtaccctgaggcgacagaaggcttctctgaagggtttttcgccaagtggtggcgctgctttcctgagcggtggttcccatttccttatccatggaggagacctctgaacagatcacaaatgttacgtgagctttttcctgttttcactcacctgccatttccaaaagatgcctctttaaacaagtgctcctttcttcacccagaacctgttgtggggagtaagatgcataagatgcctgacctatttatcattggcagcggtgaggccatgttgcagctcatccctcccttccagtgccgaagacattgtcagtctgtggccatgccaatagagccaggggatatcggctatgtcgacaccacccactggaaggtctacgttatagccagaggggtccagcctttggtcatctgcgatggaaccgctttctcagaactgtaggaaatagaactgtgcacaggaacagcttccagagccgaaaaccaggttgaaaggggaaaaataaaaacaaaaacgatgaaactgctttctgggggttggttacttagttacctgccctttgcatgcatgtgtgaaccagctgtgagctgcaaggcagtggccagagcctcgccctcctgactcttcctgcaggtggctcaggaaggattcagcctggccacttggctaggactctgccagcacccatctgagactgacctcttccgggcctttggacactatgaccttgatgctgcccttcaggcaggaaacagggctggtgcctttcttcacctgcatggccagcttccttccctggcagtggagagggcagccaacaggttctaatgtcagagccatcctttaccaggtgggcctgcttgtccctgtcttgcctgccacatcactctactttttggaaggccatggctgattaaagaagttcttgtagtttcccaagcaaagtggaatctagaaacagtgaaaaaagttcagataactttgaattgcattcaagaagtacacttctttcccattgtccgtggctcttggagtctccgtgatgccaggctagagtctgattatataataattcaaaatggtaactcccaaggtaatgctttcttccatttcatcaggttcttttatccccactgcaccccctccccttctcccttgcctatctggatggcttctcagaagctcggccctagtcctccctgccttggcggggccagagcccactactgctgaggcagcactgctctcgtcagctgtgttgcctttaccaagtgtcttcagagggttatgagttagagtagctggcctggggagagggtgcctccctgggtttgatctttagggtctgactttctgcagagaagatgttttacagatgtgtcaaagctgatgtaatgtggttgggggaggaaatccagacccaaagtgtttgtcagctgggtgtacaactgcctatgtgatcctctgtcttaaaatgatttctgtctgtgctgcgaaacaaagacaaggtgaggtgtttttcttttttgtaataatataaagctgtgtgtttctgattggatgattcactatgtgcattgttttctcctaagtgcttttagtaggtagcaatcaaatggtgtaaataaggatgttcttttcctgttccttttatttttttctctctttattattcttttattgacaccactagatagctggccactggtcatgccattgccaagatgaagaaaaagcaaactacactttggcctctggttctgaattgcagaaatcaaaggatgcagtaggtgtctatgtcagaattatggatcagaggcagacaatgacgagtgaagatggttgtgaagccctcttcattcctggaggagcctgcatctcatctctcaggccctctttctctgtgggtctcatgaacagcagtggggaccattgagcacttgaatggcctgtttgtctatgggcttgcaaaggacaagcagagttcacagagctcaggatagaaacatcagagcctcctccacgggcttcagtgaaactccgatgaactgtacctgagggaattttttcttaatcaaccccttgtgtggatgaatacaggaacaacaaaacttgtgtacgtatgaaagtcatgttgttaagcagttatgatttaagaggttttaagtcagagggatcatctggaggccggctttgtgcaagcttttacagccttctgcagtgtccttaccctggctgtacatggggaagggctatgtgtaaacaagtgctttagaggcctctgagagtttttaaaaatcagacccattaacaaaagagagggtttcttaggaacaaagcaactattttgattactgagatctctgttttgtttctgtgagttactctgtattcctttccccatttcactcttgcccttcacatcttaaatgtccataagaaacccttgcatgtgttggtattctgaggcatcccgtgggaaagtcccctaagtcccattttgtacttcaacaaaaaatgactgtagcagaagataagtggagacttttatggatatactactcattttacttaaaatctacccagttcagacttgaatgtaaacttgtattaggggaaaattctccaaagagggttttctacatacacagaagcagttcaacttctcaagttaattttgataagcagaatctactactggccagagcgacaggagtggctaggggttgccagccagtccctttctgatgatcaaggccctgcacagcaggatgccacaggatgcccctgccatctagctggaagcatcaaaagtccctctgtatgacccggtgtgggaaagagggttgtcaggatgagaaagtggggctgcagggtgacgataagaccacctaaccaactccccacctccaccaccacaataagaacaaaactgtagggctctaaagagagggggtggtttacaagtttattgagcatttactaggaagtgacatggcgatgacctctgtacatgagttaggttcactttcatgtggcctcccactacagagatgcgtatgcccagaagtcagctctctgaggagacaggctactttggccccagtttgaagcattctgtccaaatgtcctgagctctccagcagtcaagtagtgaatggataccatacttattatggttgatgaaaaaaggcagagcttatcctcaattttttttagggaagagaaggaataaaataaaagtggttcaagctgggcatggtggctcacacctgtaattgcagcactttgggaggctgaggcaggcagatcacttgaggtcaggagttcaagaccagcctggccaacagggtgaaaccccatctctactaaaaatacaaaaattacccaggcgtgatggtgggcgcctgtaatcccagctacacaggaagctgaggcaggaaaattgcttgaaccggggaggcggagattgcagtgagccaagattgtgccacttcattccagcctgggcgacagagcgaaactctgtcaaaggaaaggaaagaaaagaaaaaaaaa

SEQ ID NO: 276068 - DNA, 2359 bp, Homo sapiens
ttctgttttgggcggaagcgctggacgagaggaggaattactctagggtacaaggcctcgccccaggagtggggggttgcttccgggtcgcgctcccggaaacaggaagttgcccatcctcctcgcccggcggcagctgtccccgaggcgggaggagcccgagggggcgcgagccccgcatggattttatattggaagacatggatcttgctgccaacgagatcagcatttatgacaaactttcagagactgttgatttggtgagacagaccggccatcagtgtggcatgtcagagaaggcaattgaaaaatttatcagacagctgctggaaaagaatgaacctcagagaccccccccgcagtatcctctccttatagttgtgtataaggttctcgcaaccttgggattaatcttgctcactgcctactttgtgattcaacctttcagcccattagcacctgagccagtgctttctggagctcacacctggcgctcactcatccatcacattaggctgatgtccttgcccattgccaagaagtacatgtcagaaaataagggagttcctctgcatgggggtgatgaagacagaccctttccagactttgacccctggtggacaaacgactgtgagcagaatgagtcagagcccattcctgccaactgcactggctgtgcccagaaacacctgaaggtgatgctcctggaagacgccccaaggaaatttgagaggctccatccactggtgatcaagacgggaaagcccctgttggaggaagagattcagcattttttgtgccagtaccctgaggcgacagaaggcttctctgaagggtttttcgccaagtggtggcgctgctttcctgagcggtggttcccatttccttatccatggaggagacctctgaacagatcacaaatgttacgtgagctttttcctgttttcactcacctgccatttccaaaagatgcctctttaaacaagtgctcctttcttcacccagaacctgttgtggggagtaagatgcataagatgcctgacctatttatcattggcagcggtgaggccatgttgcagctcatccctcccttccagtgccgaagacattgtcagtctgtggccatgccaatagagccaggggatatcggctatgtcgacaccacccactggaaggtctacgttatagccagaggggtccagcctttggtcatctgcgatggaaccgctttctcagaactgtaggaaatagaactgtgcacaggaacagcttccagagccgaaaaccaggttgaaaggggaaaaataaaaacaaaaacgatgaaactgctttctgggggttggttacttagttacctgccctttgcatgcatgtgtgaaccagctgtgagctgcaaggcagtggccagagcctcgccctcctgactcttcctgcaggtggctcaggaaggattcagcctggccacttggctaggactctgccagcacccatctgagactgacctcttccgggcctttggacactatgaccttgatgctgcccttcaggcaggaaacagggctggtgcctttcttcacctgcatggccagcttccttccctggcagtggagagggcagccaacaggttctaatgtcagagccatcctttaccaggtgggcctgcttgtccctgtcttgcctgccacatcactctactttttggaaggccatggctgattaaagaagttcttgtagtttcccaagcaaagtggaatctagaaacagtgaaaaaagttcagataactttgaattgcattcaagaagtacacttctttcccattgtccgtggctcttggagtctccgtgatgccaggctagagtctgattatataataattcaaaatggtaactcccaaggtaatgctttcttccatttcatcaggttcttttatccccactgcaccccctccccttctcccttgcctatctggatggcttctcagaagctcggccctagtcctccctgccttggcggggccagagcccactactgctgaggcagcactgctctcgtcagctgtgttgcctttaccaagtgtcttcagagggttatgagttagagtagctggcctggggagagggtgcctccctgggtttgatctttagggtctgactttctgcagagaagatgttttacagatgtgtcaaagctgatgtaatgtggttgggggaggaaatccagacccaaagtgtttgtcagctgggtgtacaactgcctatgtgatcctctgtcttaaaatgatttctgtctgtgctgcgaaacaaagacaaggtgaggtgtttttcttttttgtaataatataaagctgtgtgtttctga

SEQ ID NO: 276069 - DNA, 4302 bp, Homo sapiens
ttctgttttgggcggaagcgctggacgagaggaggaattactctagggtacaaggcctcgccccaggagtggggggttgcttccgggtcgcgctcccggaaacaggaagttgcccatcctcctcgcccggcggcagctgtccccgaggcgggaggagcccgagggggcgcgagccccgcatggattttatattggaagacatggatcttgctgccaacgagatcagcatttatgacaaactttcagagactgttgatttggtgagacagaccggccatcagtgtggcatgtcagagaaggcaattgaaaaatttatcagacagctgctggaaaagaatgaacctcagagaccccccccgcagtatcctctccttatagttgtgtataagcccattagcacctgagccagtgctttctggagctcacacctggcgctcactcatccatcacattaggctgatgtccttgcccattgccaagaagtacatgtcagaaaataagggagttcctctgcatgggggtgatgaagacagaccctttccagactttgacccctggtggacaaacgactgtgagcagaatgagtcagagcccattcctgccaactgcactggctgtgcccagaaacacctgaaggtgatgctcctggaagacgccccaaggaaatttgagaggctccatccactggtgatcaagacgggaaagcccctgttggaggaagagattcagcattttttgtgccagtaccctgaggcgacagaaggcttctctgaagggtttttcgccaagtggtggcgctgctttcctgagcggtggttcccatttccttatccatggaggagacctctgaacagatcacaaatgttacgtgagctttttcctgttttcactcacctgccatttccaaaagatgcctctttaaacaagtgctcctttcttcacccagaacctgttgtggggagtaagatgcataagatgcctgacctatttatcattggcagcggtgaggccatgttgcagctcatccctcccttccagtgccgaagacattgtcagtctgtggccatgccaatagagccaggggatatcggctatgtcgacaccacccactggaaggtctacgttatagccagaggggtccagcctttggtcatctgcgatggaaccgctttctcagaactgtaggaaatagaactgtgcacaggaacagcttccagagccgaaaaccaggttgaaaggggaaaaataaaaacaaaaacgatgaaactgctttctgggggttggttacttagttacctgccctttgcatgcatgtgtgaaccagctgtgagctgcaaggcagtggccagagcctcgccctcctgactcttcctgcaggtggctcaggaaggattcagcctggccacttggctaggactctgccagcacccatctgagactgacctcttccgggcctttggacactatgaccttgatgctgcccttcaggcaggaaacagggctggtgcctttcttcacctgcatggccagcttccttccctggcagtggagagggcagccaacaggttctaatgtcagagccatcctttaccaggtgggcctgcttgtccctgtcttgcctgccacatcactctactttttggaaggccatggctgattaaagaagttcttgtagtttcccaagcaaagtggaatctagaaacagtgaaaaaagttcagataactttgaattgcattcaagaagtacacttctttcccattgtccgtggctcttggagtctccgtgatgccaggctagagtctgattatataataattcaaaatggtaactcccaaggtaatgctttcttccatttcatcaggttcttttatccccactgcaccccctccccttctcccttgcctatctggatggcttctcagaagctcggccctagtcctccctgccttggcggggccagagcccactactgctgaggcagcactgctctcgtcagctgtgttgcctttaccaagtgtcttcagagggttatgagttagagtagctggcctggggagagggtgcctccctgggtttgatctttagggtctgactttctgcagagaagatgttttacagatgtgtcaaagctgatgtaatgtggttgggggaggaaatccagacccaaagtgtttgtcagctgggtgtacaactgcctatgtgatcctctgtcttaaaatgatttctgtctgtgctgcgaaacaaagacaaggtgaggtgtttttcttttttgtaataatataaagctgtgtgtttctgattggatgattcactatgtgcattgttttctcctaagtgcttttagtaggtagcaatcaaatggtgtaaataaggatgttcttttcctgttccttttatttttttctctctttattattcttttattgacaccactagatagctggccactggtcatgccattgccaagatgaagaaaaagcaaactacactttggcctctggttctgaattgcagaaatcaaaggatgcagtaggtgtctatgtcagaattatggatcagaggcagacaatgacgagtgaagatggttgtgaagccctcttcattcctggaggagcctgcatctcatctctcaggccctctttctctgtgggtctcatgaacagcagtggggaccattgagcacttgaatggcctgtttgtctatgggcttgcaaaggacaagcagagttcacagagctcaggatagaaacatcagagcctcctccacgggcttcagtgaaactccgatgaactgtacctgagggaattttttcttaatcaaccccttgtgtggatgaatacaggaacaacaaaacttgtgtacgtatgaaagtcatgttgttaagcagttatgatttaagaggttttaagtcagagggatcatctggaggccggctttgtgcaagcttttacagccttctgcagtgtccttaccctggctgtacatggggaagggctatgtgtaaacaagtgctttagaggcctctgagagtttttaaaaatcagacccattaacaaaagagagggtttcttaggaacaaagcaactattttgattactgagatctctgttttgtttctgtgagttactctgtattcctttccccatttcactcttgcccttcacatcttaaatgtccataagaaacccttgcatgtgttggtattctgaggcatcccgtgggaaagtcccctaagtcccattttgtacttcaacaaaaaatgactgtagcagaagataagtggagacttttatggatatactactcattttacttaaaatctacccagttcagacttgaatgtaaacttgtattaggggaaaattctccaaagagggttttctacatacacagaagcagttcaacttctcaagttaattttgataagcagaatctactactggccagagcgacaggagtggctaggggttgccagccagtccctttctgatgatcaaggccctgcacagcaggatgccacaggatgcccctgccatctagctggaagcatcaaaagtccctctgtatgacccggtgtgggaaagagggttgtcaggatgagaaagtggggctgcagggtgacgataagaccacctaaccaactccccacctccaccaccacaataagaacaaaactgtagggctctaaagagagggggtggtttacaagtttattgagcatttactaggaagtgacatggcgatgacctctgtacatgagttaggttcactttcatgtggcctcccactacagagatgcgtatgcccagaagtcagctctctgaggagacaggctactttggccccagtttgaagcattctgtccaaatgtcctgagctctccagcagtcaagtagtgaatggataccatacttattatggttgatgaaaaaaggcagagcttatcctcaattttttttagggaagagaaggaataaaataaaagtggttcaagctgggcatggtggctcacacctgtaattgcagcactttgggaggctgaggcaggcagatcacttgaggtcaggagttcaagaccagcctggccaacagggtgaaaccccatctctactaaaaatacaaaaattacccaggcgtgatggtgggcgcctgtaatcccagctacacaggaagctgaggcaggaaaattgcttgaaccggggaggcggagattgcagtgagccaagattgtgccacttcattccagcctgggcgacagagcgaaactctgtcaaaggaaaggaaagaaaagaaaaaaaaa

SEQ ID NO: 276070 - DNA, 3995 bp, Homo sapiens
ttctgttttgggcggaagcgctggacgagaggaggaattactctagggtacaaggcctcgccccaggagtggggggttgcttccgggtcgcgctcccggaaacaggaagttgcccatcctcctcgcccggcggcagctgtccccgaggcgggaggagcccgagggggcgcgagccccgcatggattttatattggaagacatggatcttgctgccaacgagatcagcatttatgacaaactttcagagactgttgatttggtgagacagaccggccatcagtgtggcatgtcagagaaggcaattgaaaaatttatcagacagctgctggaaaagaatgaacctcagagaccccccccgcagtatcctctccttatagttgtgtataaggttctcgcaaccttgggattaatcttgctcactgcctactttgtgattcaacctttcagcccattagcacctgagccagtgctttctggagctcacacctggcgctcactcatccatcacattaggctgatgtccttgcccattgccaagaagtacatgtcagaaaataagggagttcctctgcatgggggtgatgaagacagaccctttccagactttgacccctggtggacaaacgactgtgagcagaatgagtcagagcccattcctgccaactgcactggctgtgcccagaaacacctgaaggtgatgctcctggaagacgccccaaggaaatttgagaggctccatccactggtgatcaagacgggaaagcccctgttggaggaagagattcagcattttttgtgccagtaccctgaggcgacagaaggcttctctgaagggtttttcgccaagtggtggcgctgctttctctcagaactgtaggaaatagaactgtgcacaggaacagcttccagagccgaaaaccaggttgaaaggggaaaaataaaaacaaaaacgatgaaactgctttctgggggttggttacttagttacctgccctttgcatgcatgtgtgaaccagctgtgagctgcaaggcagtggccagagcctcgccctcctgactcttcctgcaggtggctcaggaaggattcagcctggccacttggctaggactctgccagcacccatctgagactgacctcttccgggcctttggacactatgaccttgatgctgcccttcaggcaggaaacagggctggtgcctttcttcacctgcatggccagcttccttccctggcagtggagagggcagccaacaggttctaatgtcagagccatcctttaccaggtgggcctgcttgtccctgtcttgcctgccacatcactctactttttggaaggccatggctgattaaagaagttcttgtagtttcccaagcaaagtggaatctagaaacagtgaaaaaagttcagataactttgaattgcattcaagaagtacacttctttcccattgtccgtggctcttggagtctccgtgatgccaggctagagtctgattatataataattcaaaatggtaactcccaaggtaatgctttcttccatttcatcaggttcttttatccccactgcaccccctccccttctcccttgcctatctggatggcttctcagaagctcggccctagtcctccctgccttggcggggccagagcccactactgctgaggcagcactgctctcgtcagctgtgttgcctttaccaagtgtcttcagagggttatgagttagagtagctggcctggggagagggtgcctccctgggtttgatctttagggtctgactttctgcagagaagatgttttacagatgtgtcaaagctgatgtaatgtggttgggggaggaaatccagacccaaagtgtttgtcagctgggtgtacaactgcctatgtgatcctctgtcttaaaatgatttctgtctgtgctgcgaaacaaagacaaggtgaggtgtttttcttttttgtaataatataaagctgtgtgtttctgattggatgattcactatgtgcattgttttctcctaagtgcttttagtaggtagcaatcaaatggtgtaaataaggatgttcttttcctgttccttttatttttttctctctttattattcttttattgacaccactagatagctggccactggtcatgccattgccaagatgaagaaaaagcaaactacactttggcctctggttctgaattgcagaaatcaaaggatgcagtaggtgtctatgtcagaattatggatcagaggcagacaatgacgagtgaagatggttgtgaagccctcttcattcctggaggagcctgcatctcatctctcaggccctctttctctgtgggtctcatgaacagcagtggggaccattgagcacttgaatggcctgtttgtctatgggcttgcaaaggacaagcagagttcacagagctcaggatagaaacatcagagcctcctccacgggcttcagtgaaactccgatgaactgtacctgagggaattttttcttaatcaaccccttgtgtggatgaatacaggaacaacaaaacttgtgtacgtatgaaagtcatgttgttaagcagttatgatttaagaggttttaagtcagagggatcatctggaggccggctttgtgcaagcttttacagccttctgcagtgtccttaccctggctgtacatggggaagggctatgtgtaaacaagtgctttagaggcctctgagagtttttaaaaatcagacccattaacaaaagagagggtttcttaggaacaaagcaactattttgattactgagatctctgttttgtttctgtgagttactctgtattcctttccccatttcactcttgcccttcacatcttaaatgtccataagaaacccttgcatgtgttggtattctgaggcatcccgtgggaaagtcccctaagtcccattttgtacttcaacaaaaaatgactgtagcagaagataagtggagacttttatggatatactactcattttacttaaaatctacccagttcagacttgaatgtaaacttgtattaggggaaaattctccaaagagggttttctacatacacagaagcagttcaacttctcaagttaattttgataagcagaatctactactggccagagcgacaggagtggctaggggttgccagccagtccctttctgatgatcaaggccctgcacagcaggatgccacaggatgcccctgccatctagctggaagcatcaaaagtccctctgtatgacccggtgtgggaaagagggttgtcaggatgagaaagtggggctgcagggtgacgataagaccacctaaccaactccccacctccaccaccacaataagaacaaaactgtagggctctaaagagagggggtggtttacaagtttattgagcatttactaggaagtgacatggcgatgacctctgtacatgagttaggttcactttcatgtggcctcccactacagagatgcgtatgcccagaagtcagctctctgaggagacaggctactttggccccagtttgaagcattctgtccaaatgtcctgagctctccagcagtcaagtagtgaatggataccatacttattatggttgatgaaaaaaggcagagcttatcctcaattttttttagggaagagaaggaataaaataaaagtggttcaagctgggcatggtggctcacacctgtaattgcagcactttgggaggctgaggcaggcagatcacttgaggtcaggagttcaagaccagcctggccaacagggtgaaaccccatctctactaaaaatacaaaaattacccaggcgtgatggtgggcgcctgtaatcccagctacacaggaagctgaggcaggaaaattgcttgaaccggggaggcggagattgcagtgagccaagattgtgccacttcattccagcctgggcgacagagcgaaactctgtcaaaggaaaggaaagaaaagaaaaaaaaa

SEQ ID NO: 276071 - DNA, 3454 bp, Homo sapiens
tcatcttgggcctgtgttatctgaactttttcctgttttcactcacctgccatttccaaaagatgcctctttaaacaagtgctcctttcttcacccagaacctgttgtggggagtaagatgcataagatgcctgacctatttatcattggcagcggtgaggccatgttgcagctcatccctcccttccagtgccgaagacattgtcagtctgtggccatgccaatagagccaggggatatcggctatgtcgacaccacccactggaaggtctacgttatagccagaggggtccagcctttggtcatctgcgatggaaccgctttctcagaactgtaggaaatagaactgtgcacaggaacagcttccagagccgaaaaccaggttgaaaggggaaaaataaaaacaaaaacgatgaaactgctttctgggggttggttacttagttacctgccctttgcatgcatgtgtgaaccagctgtgagctgcaaggcagtggccagagcctcgccctcctgactcttcctgcaggtggctcaggaaggattcagcctggccacttggctaggactctgccagcacccatctgagactgacctcttccgggcctttggacactatgaccttgatgctgcccttcaggcaggaaacagggctggtgcctttcttcacctgcatggccagcttccttccctggcagtggagagggcagccaacaggttctaatgtcagagccatcctttaccaggtgggcctgcttgtccctgtcttgcctgccacatcactctactttttggaaggccatggctgattaaagaagttcttgtagtttcccaagcaaagtggaatctagaaacagtgaaaaaagttcagataactttgaattgcattcaagaagtacacttctttcccattgtccgtggctcttggagtctccgtgatgccaggctagagtctgattatataataattcaaaatggtaactcccaaggtaatgctttcttccatttcatcaggttcttttatccccactgcaccccctccccttctcccttgcctatctggatggcttctcagaagctcggccctagtcctccctgccttggcggggccagagcccactactgctgaggcagcactgctctcgtcagctgtgttgcctttaccaagtgtcttcagagggttatgagttagagtagctggcctggggagagggtgcctccctgggtttgatctttagggtctgactttctgcagagaagatgttttacagatgtgtcaaagctgatgtaatgtggttgggggaggaaatccagacccaaagtgtttgtcagctgggtgtacaactgcctatgtgatcctctgtcttaaaatgatttctgtctgtgctgcgaaacaaagacaaggtgaggtgtttttcttttttgtaataatataaagctgtgtgtttctgattggatgattcactatgtgcattgttttctcctaagtgcttttagtaggtagcaatcaaatggtgtaaataaggatgttcttttcctgttccttttatttttttctctctttattattcttttattgacaccactagatagctggccactggtcatgccattgccaagatgaagaaaaagcaaactacactttggcctctggttctgaattgcagaaatcaaaggatgcagtaggtgtctatgtcagaattatggatcagaggcagacaatgacgagtgaagatggttgtgaagccctcttcattcctggaggagcctgcatctcatctctcaggccctctttctctgtgggtctcatgaacagcagtggggaccattgagcacttgaatggcctgtttgtctatgggcttgcaaaggacaagcagagttcacagagctcaggatagaaacatcagagcctcctccacgggcttcagtgaaactccgatgaactgtacctgagggaattttttcttaatcaaccccttgtgtggatgaatacaggaacaacaaaacttgtgtacgtatgaaagtcatgttgttaagcagttatgatttaagaggttttaagtcagagggatcatctggaggccggctttgtgcaagcttttacagccttctgcagtgtccttaccctggctgtacatggggaagggctatgtgtaaacaagtgctttagaggcctctgagagtttttaaaaatcagacccattaacaaaagagagggtttcttaggaacaaagcaactattttgattactgagatctctgttttgtttctgtgagttactctgtattcctttccccatttcactcttgcccttcacatcttaaatgtccataagaaacccttgcatgtgttggtattctgaggcatcccgtgggaaagtcccctaagtcccattttgtacttcaacaaaaaatgactgtagcagaagataagtggagacttttatggatatactactcattttacttaaaatctacccagttcagacttgaatgtaaacttgtattaggggaaaattctccaaagagggttttctacatacacagaagcagttcaacttctcaagttaattttgataagcagaatctactactggccagagcgacaggagtggctaggggttgccagccagtccctttctgatgatcaaggccctgcacagcaggatgccacaggatgcccctgccatctagctggaagcatcaaaagtccctctgtatgacccggtgtgggaaagagggttgtcaggatgagaaagtggggctgcagggtgacgataagaccacctaaccaactccccacctccaccaccacaataagaacaaaactgtagggctctaaagagagggggtggtttacaagtttattgagcatttactaggaagtgacatggcgatgacctctgtacatgagttaggttcactttcatgtggcctcccactacagagatgcgtatgcccagaagtcagctctctgaggagacaggctactttggccccagtttgaagcattctgtccaaatgtcctgagctctccagcagtcaagtagtgaatggataccatacttattatggttgatgaaaaaaggcagagcttatcctcaattttttttagggaagagaaggaataaaataaaagtggttcaagctgggcatggtggctcacacctgtaattgcagcactttgggaggctgaggcaggcagatcacttgaggtcaggagttcaagaccagcctggccaacagggtgaaaccccatctctactaaaaatacaaaaattacccaggcgtgatggtgggcgcctgtaatcccagctacacaggaagctgaggcaggaaaattgcttgaaccggggaggcggagattgcagtgagccaagattgtgccacttcattccagcctgggcgacagagcgaaactctgtcaaaggaaaggaaagaaaagaaaaaaaaa

SEQ ID NO: 276072 - DNA, 1515 bp, Homo sapiens
ttctgttttgggcggaagcgctggacgagaggaggaattactctagggtacaaggcctcgccccaggagtggggggttgcttccgggtcgcgctcccggaaacaggaagttgcccatcctcctcgcccggcggcagctgtccccgaggcgggaggagcccgagggggcgcgagccccgcatggattttatattggaagacatggatcttgctgccaacgagatcagcatttatgacaaactttcagagactgttgatttggtgagacagaccggccatcagtgtggcatgtcagagaaggcaattgaaaaatttatcagacagctgctggaaaagaatgaacctcagagaccccccccgcagtatcctctccttatagttgtgtataaggttctcgcaaccttgggattaatcttgctcactgcctactttgtgattcaacctttcagcccattagcacctgagccagtgctttctggagctcacacctggcgctcactcatccatcacattaggctgatgtccttgcccattgccaagaagtacatgtcagaaaataagggagttcctctgcatgggggtgatgaagacagaccctttccagactttgacccctggtggacaaacgactgtgagcagaatgagtcagagcccattcctgccaactgcactggctgtgcccagaaacacctgaaggtgatgctcctggaagacgccccaaggaaatttgagaggctccatccactggtgatcaagacgggaaagcccctgttggaggaagagattcagcattttttgtgccagtaccctgaggcgacagaaggcttctctgaagggtttttcgccaagtggtggcgctgctttcctgagcggtggttcccatttccttatccatggaggagacctctgaacagatcacaaatgttacgtgagctttttcctgttttcactcacctgccatttccaaaagatgcctctttaaacaagtgctcctttcttcacccagaacctgttgtggggagtaagatgcataagatgcctgacctatttatcattggcagcggtgaggccatgttgcagctcatccctcccttccagtgccgaagacattgtcagtctgtggccatgccaatagagccaggggatatcggtatgtagggccccaggaggcagggtcaatggatctttttagtttttaactcaaaagctattttaagaatcacatactgccttcacaaaagttttatttagtagaatcaaaaataacattctcctgttaacaggctcaatatttatgcttagaaatgaaacaacttaatgagaaaacatagcagaaagaaatggcttgtacatacaacatatagaatgcgtgtgtctattgatcatagaaacttcaagttaggaaggattctggaaaatatttagaccaatccctcgttttatagatgaaaaggttgagacccagagaggagaggtgaccaccccaaggccccactgtcagtcgagcagagcgtca

SEQ ID NO: 276073 - DNA, 4461 bp, Homo sapiens
ttctgttttgggcggaagcgctggacgagaggaggaattactctagggtacaaggcctcgccccaggagtggggggttgcttccgggtcgcgctcccggaaacaggaagttgcccatcctcctcgcccggcggcagctgtccccgaggcgggaggagcccgagggggcgcgagccccgcatgaatcattgtagtcaatcattttccagttctcagccgctcagttgtgatcaagggacacgtggtttccgaactgccagctcagaataggaaaataacttgggattttatattggaagacatggatcttgctgccaacgagatcagcatttatgacaaactttcagagactgttgatttggtgagacagaccggccatcagtgtggcatgtcagagaaggcaattgaaaaatttatcagacagctgctggaaaagaatgaacctcagagaccccccccgcagtatcctctccttatagttgtgtataaggttctcgcaaccttgggattaatcttgctcactgcctactttgtgattcaacctttcagcccattagcacctgagccagtgctttctggagctcacacctggcgctcactcatccatcacattaggctgatgtccttgcccattgccaagaagtacatgtcagaaaataagggagttcctctgcatgggggtgatgaagacagaccctttccagactttgacccctggtggacaaacgactgtgagcagaatgagtcagagcccattcctgccaactgcactggctgtgcccagaaacacctgaaggtgatgctcctggaagacgccccaaggaaatttgagaggctccatccactggtgatcaagacgggaaagcccctgttggaggaagagattcagcattttttgtgccagtaccctgaggcgacagaaggcttctctgaagggtttttcgccaagtggtggcgctgctttcctgagcggtggttcccatttccttatccatggaggagacctctgaacagatcacaaatgttacgtgagctttttcctgttttcactcacctgccatttccaaaagatgcctctttaaacaagtgctcctttcttcacccagaacctgttgtggggagtaagatgcataagatgcctgacctatttatcattggcagcggtgaggccatgttgcagctcatccctcccttccagtgccgaagacattgtcagtctgtggccatgccaatagagccaggggatatcggctatgtcgacaccacccactggaaggtctacgttatagccagaggggtccagcctttggtcatctgcgatggaaccgctttctcagaactgtaggaaatagaactgtgcacaggaacagcttccagagccgaaaaccaggttgaaaggggaaaaataaaaacaaaaacgatgaaactgctttctgggggttggttacttagttacctgccctttgcatgcatgtgtgaaccagctgtgagctgcaaggcagtggccagagcctcgccctcctgactcttcctgcaggtggctcaggaaggattcagcctggccacttggctaggactctgccagcacccatctgagactgacctcttccgggcctttggacactatgaccttgatgctgcccttcaggcaggaaacagggctggtgcctttcttcacctgcatggccagcttccttccctggcagtggagagggcagccaacaggttctaatgtcagagccatcctttaccaggtgggcctgcttgtccctgtcttgcctgccacatcactctactttttggaaggccatggctgattaaagaagttcttgtagtttcccaagcaaagtggaatctagaaacagtgaaaaaagttcagataactttgaattgcattcaagaagtacacttctttcccattgtccgtggctcttggagtctccgtgatgccaggctagagtctgattatataataattcaaaatggtaactcccaaggtaatgctttcttccatttcatcaggttcttttatccccactgcaccccctccccttctcccttgcctatctggatggcttctcagaagctcggccctagtcctccctgccttggcggggccagagcccactactgctgaggcagcactgctctcgtcagctgtgttgcctttaccaagtgtcttcagagggttatgagttagagtagctggcctggggagagggtgcctccctgggtttgatctttagggtctgactttctgcagagaagatgttttacagatgtgtcaaagctgatgtaatgtggttgggggaggaaatccagacccaaagtgtttgtcagctgggtgtacaactgcctatgtgatcctctgtcttaaaatgatttctgtctgtgctgcgaaacaaagacaaggtgaggtgtttttcttttttgtaataatataaagctgtgtgtttctgattggatgattcactatgtgcattgttttctcctaagtgcttttagtaggtagcaatcaaatggtgtaaataaggatgttcttttcctgttccttttatttttttctctctttattattcttttattgacaccactagatagctggccactggtcatgccattgccaagatgaagaaaaagcaaactacactttggcctctggttctgaattgcagaaatcaaaggatgcagtaggtgtctatgtcagaattatggatcagaggcagacaatgacgagtgaagatggttgtgaagccctcttcattcctggaggagcctgcatctcatctctcaggccctctttctctgtgggtctcatgaacagcagtggggaccattgagcacttgaatggcctgtttgtctatgggcttgcaaaggacaagcagagttcacagagctcaggatagaaacatcagagcctcctccacgggcttcagtgaaactccgatgaactgtacctgagggaattttttcttaatcaaccccttgtgtggatgaatacaggaacaacaaaacttgtgtacgtatgaaagtcatgttgttaagcagttatgatttaagaggttttaagtcagagggatcatctggaggccggctttgtgcaagcttttacagccttctgcagtgtccttaccctggctgtacatggggaagggctatgtgtaaacaagtgctttagaggcctctgagagtttttaaaaatcagacccattaacaaaagagagggtttcttaggaacaaagcaactattttgattactgagatctctgttttgtttctgtgagttactctgtattcctttccccatttcactcttgcccttcacatcttaaatgtccataagaaacccttgcatgtgttggtattctgaggcatcccgtgggaaagtcccctaagtcccattttgtacttcaacaaaaaatgactgtagcagaagataagtggagacttttatggatatactactcattttacttaaaatctacccagttcagacttgaatgtaaacttgtattaggggaaaattctccaaagagggttttctacatacacagaagcagttcaacttctcaagttaattttgataagcagaatctactactggccagagcgacaggagtggctaggggttgccagccagtccctttctgatgatcaaggccctgcacagcaggatgccacaggatgcccctgccatctagctggaagcatcaaaagtccctctgtatgacccggtgtgggaaagagggttgtcaggatgagaaagtggggctgcagggtgacgataagaccacctaaccaactccccacctccaccaccacaataagaacaaaactgtagggctctaaagagagggggtggtttacaagtttattgagcatttactaggaagtgacatggcgatgacctctgtacatgagttaggttcactttcatgtggcctcccactacagagatgcgtatgcccagaagtcagctctctgaggagacaggctactttggccccagtttgaagcattctgtccaaatgtcctgagctctccagcagtcaagtagtgaatggataccatacttattatggttgatgaaaaaaggcagagcttatcctcaattttttttagggaagagaaggaataaaataaaagtggttcaagctgggcatggtggctcacacctgtaattgcagcactttgggaggctgaggcaggcagatcacttgaggtcaggagttcaagaccagcctggccaacagggtgaaaccccatctctactaaaaatacaaaaattacccaggcgtgatggtgggcgcctgtaatcccagctacacaggaagctgaggcaggaaaattgcttgaaccggggaggcggagattgcagtgagccaagattgtgccacttcattccagcctgggcgacagagcgaaactctgtcaaaggaaaggaaagaaaagaaaaaaaaa

SEQ ID NO: 276074 - DNA, 4667 bp, Homo sapiens
acctgtccctgttgggtcacctccttggatcatgaagtctttgataattctgtggaattttgtgccattgtagtaacctcgacgagccaactcagcaaagttcttacaggtctttggagcatgcagcggagtacagctccagcacaatgattcccatgctgcagagggagaggacaacagctccagtaaacaaaaagatggtgtcaggaatgggatctaaagtggagcttctagcgacccccaggagcactgagtgaacatgcaaggtacctgcaggatccacttgtgtctattgatctctcacagcagctggggatcacagaacctgcagattggatcgtctgagaacaccagagaaagagaaagactgtccttgccatccacactacagcaaaactttggagctttaaaccttgggttcataatctcacagctgagaagggtccctccacactcctggaactgtacatccattggaacccttaagggattttatattggaagacatggatcttgctgccaacgagatcagcatttatgacaaactttcagagactgttgatttggtgagacagaccggccatcagtgtggcatgtcagagaaggcaattgaaaaatttatcagacagctgctggaaaagaatgaacctcagagaccccccccgcagtatcctctccttatagttgtgtataaggttctcgcaaccttgggattaatcttgctcactgcctactttgtgattcaacctttcagcccattagcacctgagccagtgctttctggagctcacacctggcgctcactcatccatcacattaggctgatgtccttgcccattgccaagaagtacatgtcagaaaataagggagttcctctgcatgggggtgatgaagacagaccctttccagactttgacccctggtggacaaacgactgtgagcagaatgagtcagagcccattcctgccaactgcactggctgtgcccagaaacacctgaaggtgatgctcctggaagacgccccaaggaaatttgagaggctccatccactggtgatcaagacgggaaagcccctgttggaggaagagattcagcattttttgtgccagtaccctgaggcgacagaaggcttctctgaagggtttttcgccaagtggtggcgctgctttcctgagcggtggttcccatttccttatccatggaggagacctctgaacagatcacaaatgttacgtgagctttttcctgttttcactcacctgccatttccaaaagatgcctctttaaacaagtgctcctttcttcacccagaacctgttgtggggagtaagatgcataagatgcctgacctatttatcattggcagcggtgaggccatgttgcagctcatccctcccttccagtgccgaagacattgtcagtctgtggccatgccaatagagccaggggatatcggctatgtcgacaccacccactggaaggtctacgttatagccagaggggtccagcctttggtcatctgcgatggaaccgctttctcagaactgtaggaaatagaactgtgcacaggaacagcttccagagccgaaaaccaggttgaaaggggaaaaataaaaacaaaaacgatgaaactgctttctgggggttggttacttagttacctgccctttgcatgcatgtgtgaaccagctgtgagctgcaaggcagtggccagagcctcgccctcctgactcttcctgcaggtggctcaggaaggattcagcctggccacttggctaggactctgccagcacccatctgagactgacctcttccgggcctttggacactatgaccttgatgctgcccttcaggcaggaaacagggctggtgcctttcttcacctgcatggccagcttccttccctggcagtggagagggcagccaacaggttctaatgtcagagccatcctttaccaggtgggcctgcttgtccctgtcttgcctgccacatcactctactttttggaaggccatggctgattaaagaagttcttgtagtttcccaagcaaagtggaatctagaaacagtgaaaaaagttcagataactttgaattgcattcaagaagtacacttctttcccattgtccgtggctcttggagtctccgtgatgccaggctagagtctgattatataataattcaaaatggtaactcccaaggtaatgctttcttccatttcatcaggttcttttatccccactgcaccccctccccttctcccttgcctatctggatggcttctcagaagctcggccctagtcctccctgccttggcggggccagagcccactactgctgaggcagcactgctctcgtcagctgtgttgcctttaccaagtgtcttcagagggttatgagttagagtagctggcctggggagagggtgcctccctgggtttgatctttagggtctgactttctgcagagaagatgttttacagatgtgtcaaagctgatgtaatgtggttgggggaggaaatccagacccaaagtgtttgtcagctgggtgtacaactgcctatgtgatcctctgtcttaaaatgatttctgtctgtgctgcgaaacaaagacaaggtgaggtgtttttcttttttgtaataatataaagctgtgtgtttctgattggatgattcactatgtgcattgttttctcctaagtgcttttagtaggtagcaatcaaatggtgtaaataaggatgttcttttcctgttccttttatttttttctctctttattattcttttattgacaccactagatagctggccactggtcatgccattgccaagatgaagaaaaagcaaactacactttggcctctggttctgaattgcagaaatcaaaggatgcagtaggtgtctatgtcagaattatggatcagaggcagacaatgacgagtgaagatggttgtgaagccctcttcattcctggaggagcctgcatctcatctctcaggccctctttctctgtgggtctcatgaacagcagtggggaccattgagcacttgaatggcctgtttgtctatgggcttgcaaaggacaagcagagttcacagagctcaggatagaaacatcagagcctcctccacgggcttcagtgaaactccgatgaactgtacctgagggaattttttcttaatcaaccccttgtgtggatgaatacaggaacaacaaaacttgtgtacgtatgaaagtcatgttgttaagcagttatgatttaagaggttttaagtcagagggatcatctggaggccggctttgtgcaagcttttacagccttctgcagtgtccttaccctggctgtacatggggaagggctatgtgtaaacaagtgctttagaggcctctgagagtttttaaaaatcagacccattaacaaaagagagggtttcttaggaacaaagcaactattttgattactgagatctctgttttgtttctgtgagttactctgtattcctttccccatttcactcttgcccttcacatcttaaatgtccataagaaacccttgcatgtgttggtattctgaggcatcccgtgggaaagtcccctaagtcccattttgtacttcaacaaaaaatgactgtagcagaagataagtggagacttttatggatatactactcattttacttaaaatctacccagttcagacttgaatgtaaacttgtattaggggaaaattctccaaagagggttttctacatacacagaagcagttcaacttctcaagttaattttgataagcagaatctactactggccagagcgacaggagtggctaggggttgccagccagtccctttctgatgatcaaggccctgcacagcaggatgccacaggatgcccctgccatctagctggaagcatcaaaagtccctctgtatgacccggtgtgggaaagagggttgtcaggatgagaaagtggggctgcagggtgacgataagaccacctaaccaactccccacctccaccaccacaataagaacaaaactgtagggctctaaagagagggggtggtttacaagtttattgagcatttactaggaagtgacatggcgatgacctctgtacatgagttaggttcactttcatgtggcctcccactacagagatgcgtatgcccagaagtcagctctctgaggagacaggctactttggccccagtttgaagcattctgtccaaatgtcctgagctctccagcagtcaagtagtgaatggataccatacttattatggttgatgaaaaaaggcagagcttatcctcaattttttttagggaagagaaggaataaaataaaagtggttcaagctgggcatggtggctcacacctgtaattgcagcactttgggaggctgaggcaggcagatcacttgaggtcaggagttcaagaccagcctggccaacagggtgaaaccccatctctactaaaaatacaaaaattacccaggcgtgatggtgggcgcctgtaatcccagctacacaggaagctgaggcaggaaaattgcttgaaccggggaggcggagattgcagtgagccaagattgtgccacttcattccagcctgggcgacagagcgaaactctgtcaaaggaaaggaaagaaaagaaaaaaaaa

SEQ ID NO: 276075 - DNA, 4784 bp, Homo sapiens
acctgtccctgttgggtcacctccttggatcatgaagtctttgataattctgtggaattttgtgccattgtagtaacctcgacgagccaactcagcaaagttcttacaggtctttggagcatgcagcggagtacagctccagcacaatgattcccatgctgcagagggagaggacaacagctccagtaaacaaaaaggtcagggcagacaggagtattatggaactgctccaggactcttgattttcaagcttgtaagtcatgaaattgtgataaccactggatttcatgctcagcaaaggaaaacaccacaatatggtgtcaggaatgggatctaaagtggagcttctagcgacccccaggagcactgagtgaacatgcaaggtacctgcaggatccacttgtgtctattgatctctcacagcagctggggatcacagaacctgcagattggatcgtctgagaacaccagagaaagagaaagactgtccttgccatccacactacagcaaaactttggagctttaaaccttgggttcataatctcacagctgagaagggtccctccacactcctggaactgtacatccattggaacccttaagggattttatattggaagacatggatcttgctgccaacgagatcagcatttatgacaaactttcagagactgttgatttggtgagacagaccggccatcagtgtggcatgtcagagaaggcaattgaaaaatttatcagacagctgctggaaaagaatgaacctcagagaccccccccgcagtatcctctccttatagttgtgtataaggttctcgcaaccttgggattaatcttgctcactgcctactttgtgattcaacctttcagcccattagcacctgagccagtgctttctggagctcacacctggcgctcactcatccatcacattaggctgatgtccttgcccattgccaagaagtacatgtcagaaaataagggagttcctctgcatgggggtgatgaagacagaccctttccagactttgacccctggtggacaaacgactgtgagcagaatgagtcagagcccattcctgccaactgcactggctgtgcccagaaacacctgaaggtgatgctcctggaagacgccccaaggaaatttgagaggctccatccactggtgatcaagacgggaaagcccctgttggaggaagagattcagcattttttgtgccagtaccctgaggcgacagaaggcttctctgaagggtttttcgccaagtggtggcgctgctttcctgagcggtggttcccatttccttatccatggaggagacctctgaacagatcacaaatgttacgtgagctttttcctgttttcactcacctgccatttccaaaagatgcctctttaaacaagtgctcctttcttcacccagaacctgttgtggggagtaagatgcataagatgcctgacctatttatcattggcagcggtgaggccatgttgcagctcatccctcccttccagtgccgaagacattgtcagtctgtggccatgccaatagagccaggggatatcggctatgtcgacaccacccactggaaggtctacgttatagccagaggggtccagcctttggtcatctgcgatggaaccgctttctcagaactgtaggaaatagaactgtgcacaggaacagcttccagagccgaaaaccaggttgaaaggggaaaaataaaaacaaaaacgatgaaactgctttctgggggttggttacttagttacctgccctttgcatgcatgtgtgaaccagctgtgagctgcaaggcagtggccagagcctcgccctcctgactcttcctgcaggtggctcaggaaggattcagcctggccacttggctaggactctgccagcacccatctgagactgacctcttccgggcctttggacactatgaccttgatgctgcccttcaggcaggaaacagggctggtgcctttcttcacctgcatggccagcttccttccctggcagtggagagggcagccaacaggttctaatgtcagagccatcctttaccaggtgggcctgcttgtccctgtcttgcctgccacatcactctactttttggaaggccatggctgattaaagaagttcttgtagtttcccaagcaaagtggaatctagaaacagtgaaaaaagttcagataactttgaattgcattcaagaagtacacttctttcccattgtccgtggctcttggagtctccgtgatgccaggctagagtctgattatataataattcaaaatggtaactcccaaggtaatgctttcttccatttcatcaggttcttttatccccactgcaccccctccccttctcccttgcctatctggatggcttctcagaagctcggccctagtcctccctgccttggcggggccagagcccactactgctgaggcagcactgctctcgtcagctgtgttgcctttaccaagtgtcttcagagggttatgagttagagtagctggcctggggagagggtgcctccctgggtttgatctttagggtctgactttctgcagagaagatgttttacagatgtgtcaaagctgatgtaatgtggttgggggaggaaatccagacccaaagtgtttgtcagctgggtgtacaactgcctatgtgatcctctgtcttaaaatgatttctgtctgtgctgcgaaacaaagacaaggtgaggtgtttttcttttttgtaataatataaagctgtgtgtttctgattggatgattcactatgtgcattgttttctcctaagtgcttttagtaggtagcaatcaaatggtgtaaataaggatgttcttttcctgttccttttatttttttctctctttattattcttttattgacaccactagatagctggccactggtcatgccattgccaagatgaagaaaaagcaaactacactttggcctctggttctgaattgcagaaatcaaaggatgcagtaggtgtctatgtcagaattatggatcagaggcagacaatgacgagtgaagatggttgtgaagccctcttcattcctggaggagcctgcatctcatctctcaggccctctttctctgtgggtctcatgaacagcagtggggaccattgagcacttgaatggcctgtttgtctatgggcttgcaaaggacaagcagagttcacagagctcaggatagaaacatcagagcctcctccacgggcttcagtgaaactccgatgaactgtacctgagggaattttttcttaatcaaccccttgtgtggatgaatacaggaacaacaaaacttgtgtacgtatgaaagtcatgttgttaagcagttatgatttaagaggttttaagtcagagggatcatctggaggccggctttgtgcaagcttttacagccttctgcagtgtccttaccctggctgtacatggggaagggctatgtgtaaacaagtgctttagaggcctctgagagtttttaaaaatcagacccattaacaaaagagagggtttcttaggaacaaagcaactattttgattactgagatctctgttttgtttctgtgagttactctgtattcctttccccatttcactcttgcccttcacatcttaaatgtccataagaaacccttgcatgtgttggtattctgaggcatcccgtgggaaagtcccctaagtcccattttgtacttcaacaaaaaatgactgtagcagaagataagtggagacttttatggatatactactcattttacttaaaatctacccagttcagacttgaatgtaaacttgtattaggggaaaattctccaaagagggttttctacatacacagaagcagttcaacttctcaagttaattttgataagcagaatctactactggccagagcgacaggagtggctaggggttgccagccagtccctttctgatgatcaaggccctgcacagcaggatgccacaggatgcccctgccatctagctggaagcatcaaaagtccctctgtatgacccggtgtgggaaagagggttgtcaggatgagaaagtggggctgcagggtgacgataagaccacctaaccaactccccacctccaccaccacaataagaacaaaactgtagggctctaaagagagggggtggtttacaagtttattgagcatttactaggaagtgacatggcgatgacctctgtacatgagttaggttcactttcatgtggcctcccactacagagatgcgtatgcccagaagtcagctctctgaggagacaggctactttggccccagtttgaagcattctgtccaaatgtcctgagctctccagcagtcaagtagtgaatggataccatacttattatggttgatgaaaaaaggcagagcttatcctcaattttttttagggaagagaaggaataaaataaaagtggttcaagctgggcatggtggctcacacctgtaattgcagcactttgggaggctgaggcaggcagatcacttgaggtcaggagttcaagaccagcctggccaacagggtgaaaccccatctctactaaaaatacaaaaattacccaggcgtgatggtgggcgcctgtaatcccagctacacaggaagctgaggcaggaaaattgcttgaaccggggaggcggagattgcagtgagccaagattgtgccacttcattccagcctgggcgacagagcgaaactctgtcaaaggaaaggaaagaaaagaaaaaaaaa

SEQ ID NO: 276076 - DNA, 4457 bp, Homo sapiens
ggccgctgagggaaagggaacccagaaggctggcatgccagcaaaagagtaagaatttcttaccagtcagatttttggcttctctctctctgtgcaaatggttgaatgaatgaacctgcagattggatcgtctgagaacaccagagaaagagaaagactgtccttgccatccacactacagcaaaactttggagctttaaaccttgggttcataatctcacagctgagaagggtccctccacactcctggaactgtacatccattggaacccttaagggattttatattggaagacatggatcttgctgccaacgagatcagcatttatgacaaactttcagagactgttgatttggtgagacagaccggccatcagtgtggcatgtcagagaaggcaattgaaaaatttatcagacagctgctggaaaagaatgaacctcagagaccccccccgcagtatcctctccttatagttgtgtataaggttctcgcaaccttgggattaatcttgctcactgcctactttgtgattcaacctttcagcccattagcacctgagccagtgctttctggagctcacacctggcgctcactcatccatcacattaggctgatgtccttgcccattgccaagaagtacatgtcagaaaataagggagttcctctgcatgggggtgatgaagacagaccctttccagactttgacccctggtggacaaacgactgtgagcagaatgagtcagagcccattcctgccaactgcactggctgtgcccagaaacacctgaaggtgatgctcctggaagacgccccaaggaaatttgagaggctccatccactggtgatcaagacgggaaagcccctgttggaggaagagattcagcattttttgtgccagtaccctgaggcgacagaaggcttctctgaagggtttttcgccaagtggtggcgctgctttcctgagcggtggttcccatttccttatccatggaggagacctctgaacagatcacaaatgttacgtgagctttttcctgttttcactcacctgccatttccaaaagatgcctctttaaacaagtgctcctttcttcacccagaacctgttgtggggagtaagatgcataagatgcctgacctatttatcattggcagcggtgaggccatgttgcagctcatccctcccttccagtgccgaagacattgtcagtctgtggccatgccaatagagccaggggatatcggctatgtcgacaccacccactggaaggtctacgttatagccagaggggtccagcctttggtcatctgcgatggaaccgctttctcagaactgtaggaaatagaactgtgcacaggaacagcttccagagccgaaaaccaggttgaaaggggaaaaataaaaacaaaaacgatgaaactgctttctgggggttggttacttagttacctgccctttgcatgcatgtgtgaaccagctgtgagctgcaaggcagtggccagagcctcgccctcctgactcttcctgcaggtggctcaggaaggattcagcctggccacttggctaggactctgccagcacccatctgagactgacctcttccgggcctttggacactatgaccttgatgctgcccttcaggcaggaaacagggctggtgcctttcttcacctgcatggccagcttccttccctggcagtggagagggcagccaacaggttctaatgtcagagccatcctttaccaggtgggcctgcttgtccctgtcttgcctgccacatcactctactttttggaaggccatggctgattaaagaagttcttgtagtttcccaagcaaagtggaatctagaaacagtgaaaaaagttcagataactttgaattgcattcaagaagtacacttctttcccattgtccgtggctcttggagtctccgtgatgccaggctagagtctgattatataataattcaaaatggtaactcccaaggtaatgctttcttccatttcatcaggttcttttatccccactgcaccccctccccttctcccttgcctatctggatggcttctcagaagctcggccctagtcctccctgccttggcggggccagagcccactactgctgaggcagcactgctctcgtcagctgtgttgcctttaccaagtgtcttcagagggttatgagttagagtagctggcctggggagagggtgcctccctgggtttgatctttagggtctgactttctgcagagaagatgttttacagatgtgtcaaagctgatgtaatgtggttgggggaggaaatccagacccaaagtgtttgtcagctgggtgtacaactgcctatgtgatcctctgtcttaaaatgatttctgtctgtgctgcgaaacaaagacaaggtgaggtgtttttcttttttgtaataatataaagctgtgtgtttctgattggatgattcactatgtgcattgttttctcctaagtgcttttagtaggtagcaatcaaatggtgtaaataaggatgttcttttcctgttccttttatttttttctctctttattattcttttattgacaccactagatagctggccactggtcatgccattgccaagatgaagaaaaagcaaactacactttggcctctggttctgaattgcagaaatcaaaggatgcagtaggtgtctatgtcagaattatggatcagaggcagacaatgacgagtgaagatggttgtgaagccctcttcattcctggaggagcctgcatctcatctctcaggccctctttctctgtgggtctcatgaacagcagtggggaccattgagcacttgaatggcctgtttgtctatgggcttgcaaaggacaagcagagttcacagagctcaggatagaaacatcagagcctcctccacgggcttcagtgaaactccgatgaactgtacctgagggaattttttcttaatcaaccccttgtgtggatgaatacaggaacaacaaaacttgtgtacgtatgaaagtcatgttgttaagcagttatgatttaagaggttttaagtcagagggatcatctggaggccggctttgtgcaagcttttacagccttctgcagtgtccttaccctggctgtacatggggaagggctatgtgtaaacaagtgctttagaggcctctgagagtttttaaaaatcagacccattaacaaaagagagggtttcttaggaacaaagcaactattttgattactgagatctctgttttgtttctgtgagttactctgtattcctttccccatttcactcttgcccttcacatcttaaatgtccataagaaacccttgcatgtgttggtattctgaggcatcccgtgggaaagtcccctaagtcccattttgtacttcaacaaaaaatgactgtagcagaagataagtggagacttttatggatatactactcattttacttaaaatctacccagttcagacttgaatgtaaacttgtattaggggaaaattctccaaagagggttttctacatacacagaagcagttcaacttctcaagttaattttgataagcagaatctactactggccagagcgacaggagtggctaggggttgccagccagtccctttctgatgatcaaggccctgcacagcaggatgccacaggatgcccctgccatctagctggaagcatcaaaagtccctctgtatgacccggtgtgggaaagagggttgtcaggatgagaaagtggggctgcagggtgacgataagaccacctaaccaactccccacctccaccaccacaataagaacaaaactgtagggctctaaagagagggggtggtttacaagtttattgagcatttactaggaagtgacatggcgatgacctctgtacatgagttaggttcactttcatgtggcctcccactacagagatgcgtatgcccagaagtcagctctctgaggagacaggctactttggccccagtttgaagcattctgtccaaatgtcctgagctctccagcagtcaagtagtgaatggataccatacttattatggttgatgaaaaaaggcagagcttatcctcaattttttttagggaagagaaggaataaaataaaagtggttcaagctgggcatggtggctcacacctgtaattgcagcactttgggaggctgaggcaggcagatcacttgaggtcaggagttcaagaccagcctggccaacagggtgaaaccccatctctactaaaaatacaaaaattacccaggcgtgatggtgggcgcctgtaatcccagctacacaggaagctgaggcaggaaaattgcttgaaccggggaggcggagattgcagtgagccaagattgtgccacttcattccagcctgggcgacagagcgaaactctgtcaaaggaaaggaaagaaaagaaaaaaaaa

SEQ ID NO: 276077 - DNA, 4326 bp, Homo sapiens
ttctgttttgggcggaagcgctggacgagaggaggaattactctagggtacaaggcctcgccccaggagtggggggttgcttccgggtcgcgctcccggaaacaggaagttgcccatcctcctcgcccggcggcagctgtccccgaggcgggaggagcccgagggggcgcgagccccgcatggattttatattggaagacatggatcttgctgccaacgagatcagcatttatgacaaactttcagagactgttgatttggtgagacagaccggccatcagtgtggcatgtcagagaaggcaattgaaaaatttatcagacagctgctggaaaagaatgaacctcagagaccccccccgcagtatcctctccttatagttgtgtataaggttctcgcaaccttgggattaatcttgctcactgcctactttgtgattcaacctttcagcccattagcacctgagccagtgctttctggagctcacacctggcgctcactcatccatcacattaggctgatgtccttgcccattgccaagaagtacatgtcagaaaataagggagttcctctgcatgggggtgatgaagacagaccctttccagactttgacccctggtggacaaacgactgtgagcagaatgagtcagagcccattcctgccaactgcactggctgtgcccagaaacacctgaaggtgatgctcctggaagacgccccaaggaaatttgagaggctccatccactggtgatcaagacgggaaagcccctgttggaggaagagattcagcattttttgtgccagtaccctgaggcgacagaaggcttctctgaagggtttttcgccaagtggtggcgctgctttcctgagcggtggttcccatttccttatccatggaggagacctctgaacagatcacaaatgttacgtgagctttttcctgttttcactcacctgccatttccaaaagatgcctctttaaacaagtgctcctttcttcacccagaacctgttgtggggagtaagcggtgaggccatgttgcagctcatccctcccttccagtgccgaagacattgtcagtctgtggccatgccaatagagccaggggatatcggctatgtcgacaccacccactggaaggtctacgttatagccagaggggtccagcctttggtcatctgcgatggaaccgctttctcagaactgtaggaaatagaactgtgcacaggaacagcttccagagccgaaaaccaggttgaaaggggaaaaataaaaacaaaaacgatgaaactgctttctgggggttggttacttagttacctgccctttgcatgcatgtgtgaaccagctgtgagctgcaaggcagtggccagagcctcgccctcctgactcttcctgcaggtggctcaggaaggattcagcctggccacttggctaggactctgccagcacccatctgagactgacctcttccgggcctttggacactatgaccttgatgctgcccttcaggcaggaaacagggctggtgcctttcttcacctgcatggccagcttccttccctggcagtggagagggcagccaacaggttctaatgtcagagccatcctttaccaggtgggcctgcttgtccctgtcttgcctgccacatcactctactttttggaaggccatggctgattaaagaagttcttgtagtttcccaagcaaagtggaatctagaaacagtgaaaaaagttcagataactttgaattgcattcaagaagtacacttctttcccattgtccgtggctcttggagtctccgtgatgccaggctagagtctgattatataataattcaaaatggtaactcccaaggtaatgctttcttccatttcatcaggttcttttatccccactgcaccccctccccttctcccttgcctatctggatggcttctcagaagctcggccctagtcctccctgccttggcggggccagagcccactactgctgaggcagcactgctctcgtcagctgtgttgcctttaccaagtgtcttcagagggttatgagttagagtagctggcctggggagagggtgcctccctgggtttgatctttagggtctgactttctgcagagaagatgttttacagatgtgtcaaagctgatgtaatgtggttgggggaggaaatccagacccaaagtgtttgtcagctgggtgtacaactgcctatgtgatcctctgtcttaaaatgatttctgtctgtgctgcgaaacaaagacaaggtgaggtgtttttcttttttgtaataatataaagctgtgtgtttctgattggatgattcactatgtgcattgttttctcctaagtgcttttagtaggtagcaatcaaatggtgtaaataaggatgttcttttcctgttccttttatttttttctctctttattattcttttattgacaccactagatagctggccactggtcatgccattgccaagatgaagaaaaagcaaactacactttggcctctggttctgaattgcagaaatcaaaggatgcagtaggtgtctatgtcagaattatggatcagaggcagacaatgacgagtgaagatggttgtgaagccctcttcattcctggaggagcctgcatctcatctctcaggccctctttctctgtgggtctcatgaacagcagtggggaccattgagcacttgaatggcctgtttgtctatgggcttgcaaaggacaagcagagttcacagagctcaggatagaaacatcagagcctcctccacgggcttcagtgaaactccgatgaactgtacctgagggaattttttcttaatcaaccccttgtgtggatgaatacaggaacaacaaaacttgtgtacgtatgaaagtcatgttgttaagcagttatgatttaagaggttttaagtcagagggatcatctggaggccggctttgtgcaagcttttacagccttctgcagtgtccttaccctggctgtacatggggaagggctatgtgtaaacaagtgctttagaggcctctgagagtttttaaaaatcagacccattaacaaaagagagggtttcttaggaacaaagcaactattttgattactgagatctctgttttgtttctgtgagttactctgtattcctttccccatttcactcttgcccttcacatcttaaatgtccataagaaacccttgcatgtgttggtattctgaggcatcccgtgggaaagtcccctaagtcccattttgtacttcaacaaaaaatgactgtagcagaagataagtggagacttttatggatatactactcattttacttaaaatctacccagttcagacttgaatgtaaacttgtattaggggaaaattctccaaagagggttttctacatacacagaagcagttcaacttctcaagttaattttgataagcagaatctactactggccagagcgacaggagtggctaggggttgccagccagtccctttctgatgatcaaggccctgcacagcaggatgccacaggatgcccctgccatctagctggaagcatcaaaagtccctctgtatgacccggtgtgggaaagagggttgtcaggatgagaaagtggggctgcagggtgacgataagaccacctaaccaactccccacctccaccaccacaataagaacaaaactgtagggctctaaagagagggggtggtttacaagtttattgagcatttactaggaagtgacatggcgatgacctctgtacatgagttaggttcactttcatgtggcctcccactacagagatgcgtatgcccagaagtcagctctctgaggagacaggctactttggccccagtttgaagcattctgtccaaatgtcctgagctctccagcagtcaagtagtgaatggataccatacttattatggttgatgaaaaaaggcagagcttatcctcaattttttttagggaagagaaggaataaaataaaagtggttcaagctgggcatggtggctcacacctgtaattgcagcactttgggaggctgaggcaggcagatcacttgaggtcaggagttcaagaccagcctggccaacagggtgaaaccccatctctactaaaaatacaaaaattacccaggcgtgatggtgggcgcctgtaatcccagctacacaggaagctgaggcaggaaaattgcttgaaccggggaggcggagattgcagtgagccaagattgtgccacttcattccagcctgggcgacagagcgaaactctgtcaaaggaaaggaaagaaaagaaaaaaaaa

SEQ ID NO: 276078 - DNA, 3165 bp, Homo sapiens
  misc_feature (2952)..(2952): n is a, c, g, or t
  misc_feature (2956)..(2956): n is a, c, g, or t
  misc_feature (2961)..(2961): n is a, c, g, or t
  misc_feature (2999)..(2999): n is a, c, g, or t
  misc_feature (3059)..(3060): n is a, c, g, or t
  misc_feature (3104)..(3104): n is a, c, g, or t
  misc_feature (3131)..(3131): n is a, c, g, or t
ttctgttttgggcggaagcgctggacgagaggaggaattactctagggtacaaggcctcgccccaggagtggggggttgcttccgggtcgcgctcccggaaacaggaagttgcccatcctcctcgcccggcggcagctgtccccgaggcgggaggagcccgagggggcgcgagccccgcatggattttatattggaagacatggatcttgctgccaacgagatcagcatttatgacaaactttcagagactgttgatttggtgagacagaccggccatcagtgtggcatgtcagagaaggcaattgaaaaatttatcagacagctgctggaaaagaatgaacctcagagaccccccccgcagtatcctctccttatagttgtgtataaggttctcgcaaccttgggattaatcttgctcactgcctactttgtgattcaacctttcagcccattagcacctgagccagtgctttctggagctcacacctggcgctcactcatccatcacattaggctgatgtccttgcccattgccaagaagtacatgtcagaaaataagggagttcctctgcatgggggtgatgaagacagaccctttccagactttgacccctggtggacaaacgactgtgagcagaatgagtcagagcccattcctgccaactgcactggctgtgcccagaaacacctgaaggtgatgctcctggaagacgccccaaggaaatttgagaggctccatccactggtgatcaagacgggaaagcccctgttggaggaagagattcagcattttttgtgccagtaccctgaggcgacagaaggcttctctgaagggtttttcgccaagtggtggcgctgctttcctgagcggtggttcccatttccttatccatggaggagacctctgaacagatcacaaatgttacgtgagctttttcctgttttcactcacctgccatttccaaaagatgcctctttaaacaagtgctcctttcttcacccagaacctgttgtggggagtaagatgcataagatgcctgacctatttatcattggcagcggtgaggccatgttgcagctcatccctcccttccagtgccgaagacattgtcagtctgtggccatgccaatagagccaggggatatcggctatgtcgacaccacccactggaaggtctacgttatagccagaggggtccagcctttggtcatctgcgatggaaccgctttctcagaactgtaggaaatagaactgtgcacaggaacagcttccagagccgaaaaccaggttgaaaggggaaaaataaaaacaaaaacgatgaaactgctttctgggggttggttacttagttacctgccctttgcatgcatgtgtgaaccagctgtgagctgcaaggcagtggccagagcctcgccctcctgactcttcctgcaggtggctcaggaaggattcagcctggccacttggctaggactctgccagcacccatctgagactgacctcttccgggcctttggacactatgaccttgatgctgcccttcaggcaggaaacagggctggtgcctttcttcacctgcatggccagcttccttccctggcagtggagagggcagccaacaggttctaatgtcagagccatcctttaccaggtgggcctgcttgtccctgtcttgcctgccacatcactctactttttggaaggccatggctgattaaagaagttcttgtagtttcccaagcaaagtggaatctagaaacagtgaaaaaagttcagataactttgaattgcattcaagaagtacacttctttcccattgtccgtggctcttggagtctccgtgatgccaggctagagtctgattatataataattcaaaatggtaactcccaaggtaatgctttcttccatttcatcaggttcttttatccccactgcaccccctccccttctcccttgcctatctggatggcttctcagaagctcggccctagtcctccctgccttggcggggccagagcccactactgctgaggcagcactgctctcgtcagctgtgttgcctttaccaagtgtcttcagagggttatgagttagagtagctggcctggggagagggtgcctccctgggtttgatctttagggtctgactttctgcagagaagatgttttacagatgtgtcaaagctgatgtaatgtggttgggggaggaaatccagacccaaagtgtttgtcagctgggtgtacaactgcctatgtgatcctctgtcttaaaatgatttctgtctgtgctgcgaaacaaagacaaggtgaggtgtttttcttttttgtaataatataaagctgtgtgtttctgattggatgattcactatgtgcattgttttctcctaagtgcttttagtaggtagcaatcaaatggtgtaaataaggatgttcttttcctgttccttttatttttttctctctttattattcttttattgacaccactagatagctggccactggtcatgccattgccaagatgaagaaaaagcaaactacactttggcctctggttctgaattgcagaaatcaaaggatgcagtaggtgtctatgtcagaattatggatcagaggcagacaatgacgagtgaagatggttgtgaagccctcttcattcctggaggagcctgcatctcatctctcaggccctctttctctgtgggtctcatgaacagcagtggggaccattgagcacttgaatggcctgtttgtctatgggcttgcaaaggacaagcagagttcacagagctcaggatagaaacatcagagcctcctccacgggcttcagtgaaactccgatgaactgtacctgagggaattttttcttaatcaaccccttgtgtggatgaatacaggaacaacaaaacttgtgtacgtatgaaaaagtccaatggttgtttaaancaantttangaatttaaaggagggttttaaagtccagaaggggaatnaatctgggaagggcccgggcttttggtggcaaagcctttttaacaagcccttcctgcaanntggtccccttaacccctgggccttgttacaattggggggaaaangggcctaatggtttttaaaacaaaagntggcttttaaaaagggccctcctgaaaaagtttt

SEQ ID NO: 276079 - DNA, 3741 bp, Homo sapiens
ggtttctgctggaactacctttgttaaattgcaattaggtatttttctttggcttactttgaagctgtggctaaaaatagttgcaaattacaaagctcatgcaggatctactctggggctctcgttgagggtattgcccactaaatcacacagtgcctctttaggagaacccatagaagagattttactctggtcttagtaccaagagatgccattcttaggagaaagtagtttgtttttgtcttttggacataattgcaaatttttgttattggttctatttcctctttgcttatgctaggaaactcagagccatatgtgaaagcatttttatttactaaaccccctggttttatttcgttttctttgccttccttttcctcccctcctcattctttcctccagatgcataagatgcctgacctatttatcattggcagcggtgaggccatgttgcagctcatccctcccttccagtgccgaagacattgtcagtctgtggccatgccaatagagccaggggatatcggctatgtcgacaccacccactggaaggtctacgttatagccagaggggtccagcctttggtcatctgcgatggaaccgctttctcagaactgtaggaaatagaactgtgcacaggaacagcttccagagccgaaaaccaggttgaaaggggaaaaataaaaacaaaaacgatgaaactgctttctgggggttggttacttagttacctgccctttgcatgcatgtgtgaaccagctgtgagctgcaaggcagtggccagagcctcgccctcctgactcttcctgcaggtggctcaggaaggattcagcctggccacttggctaggactctgccagcacccatctgagactgacctcttccgggcctttggacactatgaccttgatgctgcccttcaggcaggaaacagggctggtgcctttcttcacctgcatggccagcttccttccctggcagtggagagggcagccaacaggttctaatgtcagagccatcctttaccaggtgggcctgcttgtccctgtcttgcctgccacatcactctactttttggaaggccatggctgattaaagaagttcttgtagtttcccaagcaaagtggaatctagaaacagtgaaaaaagttcagataactttgaattgcattcaagaagtacacttctttcccattgtccgtggctcttggagtctccgtgatgccaggctagagtctgattatataataattcaaaatggtaactcccaaggtaatgctttcttccatttcatcaggttcttttatccccactgcaccccctccccttctcccttgcctatctggatggcttctcagaagctcggccctagtcctccctgccttggcggggccagagcccactactgctgaggcagcactgctctcgtcagctgtgttgcctttaccaagtgtcttcagagggttatgagttagagtagctggcctggggagagggtgcctccctgggtttgatctttagggtctgactttctgcagagaagatgttttacagatgtgtcaaagctgatgtaatgtggttgggggaggaaatccagacccaaagtgtttgtcagctgggtgtacaactgcctatgtgatcctctgtcttaaaatgatttctgtctgtgctgcgaaacaaagacaaggtgaggtgtttttcttttttgtaataatataaagctgtgtgtttctgattggatgattcactatgtgcattgttttctcctaagtgcttttagtaggtagcaatcaaatggtgtaaataaggatgttcttttcctgttccttttatttttttctctctttattattcttttattgacaccactagatagctggccactggtcatgccattgccaagatgaagaaaaagcaaactacactttggcctctggttctgaattgcagaaatcaaaggatgcagtaggtgtctatgtcagaattatggatcagaggcagacaatgacgagtgaagatggttgtgaagccctcttcattcctggaggagcctgcatctcatctctcaggccctctttctctgtgggtctcatgaacagcagtggggaccattgagcacttgaatggcctgtttgtctatgggcttgcaaaggacaagcagagttcacagagctcaggatagaaacatcagagcctcctccacgggcttcagtgaaactccgatgaactgtacctgagggaattttttcttaatcaaccccttgtgtggatgaatacaggaacaacaaaacttgtgtacgtatgaaagtcatgttgttaagcagttatgatttaagaggttttaagtcagagggatcatctggaggccggctttgtgcaagcttttacagccttctgcagtgtccttaccctggctgtacatggggaagggctatgtgtaaacaagtgctttagaggcctctgagagtttttaaaaatcagacccattaacaaaagagagggtttcttaggaacaaagcaactattttgattactgagatctctgttttgtttctgtgagttactctgtattcctttccccatttcactcttgcccttcacatcttaaatgtccataagaaacccttgcatgtgttggtattctgaggcatcccgtgggaaagtcccctaagtcccattttgtacttcaacaaaaaatgactgtagcagaagataagtggagacttttatggatatactactcattttacttaaaatctacccagttcagacttgaatgtaaacttgtattaggggaaaattctccaaagagggttttctacatacacagaagcagttcaacttctcaagttaattttgataagcagaatctactactggccagagcgacaggagtggctaggggttgccagccagtccctttctgatgatcaaggccctgcacagcaggatgccacaggatgcccctgccatctagctggaagcatcaaaagtccctctgtatgacccggtgtgggaaagagggttgtcaggatgagaaagtggggctgcagggtgacgataagaccacctaaccaactccccacctccaccaccacaataagaacaaaactgtagggctctaaagagagggggtggtttacaagtttattgagcatttactaggaagtgacatggcgatgacctctgtacatgagttaggttcactttcatgtggcctcccactacagagatgcgtatgcccagaagtcagctctctgaggagacaggctactttggccccagtttgaagcattctgtccaaatgtcctgagctctccagcagtcaagtagtgaatggataccatacttattatggttgatgaaaaaaggcagagcttatcctcaattttttttagggaagagaaggaataaaataaaagtggttcaagctgggcatggtggctcacacctgtaattgcagcactttgggaggctgaggcaggcagatcacttgaggtcaggagttcaagaccagcctggccaacagggtgaaaccccatctctactaaaaatacaaaaattacccaggcgtgatggtgggcgcctgtaatcccagctacacaggaagctgaggcaggaaaattgcttgaaccggggaggcggagattgcagtgagccaagattgtgccacttcattccagcctgggcgacagagcgaaactctgtcaaaggaaaggaaagaaaagaaaaaaaaa

SEQ ID NO: 276080 - DNA, 410 bp, Homo sapiens
gaaagtgaaagaaactggaaactaaccgactcctattggaaacaaatgccgctgccagggtgaagggctgttgctggccaactctggcaggaacaggaagcaaacagagaggagccggtcccctctcccaccctgtccttccaggctccctatggtgtccccttgtcagcagagacacttagtaaactagcagtgctgtttacagagtccggccctctccacacaaagcggtgtgtaggagggagtgtttggaggggagagacaatggcttgataacaggcatggtcccaaatacgctaggtgacaatgactctcatgttctgaagctagttgctagactacctcagcaggacttgcagaagaaatgactgaaatgttttttattgtggtaaaatatgcataatataaaa

SEQ ID NO: 276081 - DNA, 492 bp, Homo sapiens
aaggtggaccagggatacaagacagtaccagaaaggccttggcacaggagaggggaaggaatagatccttgcagccaagtgatttagaagactccagaggagagtatatctgcagtaagaagcccaccagcccctggagtttgattctagctgattaagaggcacccaggacctgtatttcagcaagacaaccaagaaataagccaagggaaaatgttaatctgtgtgccagggattcccaacaatgcagttccagaccagccccaaacatcctaattcagacccagtgtgtgggaacttgcctgggtgggagcaggaggagggagtgggggaagcaggaagaaattaggcttgcacaaacttagtaattgaaatcattaatagcagtaaaataagttgtctgtcctacatgtaatttgtagtaatgtttcgttactgagattaatttctagtaatgaaatactaattaaaccatttattgagtaatgtatt

SEQ ID NO: 276082 - DNA, 508 bp, Homo sapiens
cctgtatcactcgagaagccctgtatgtcacatttattattccttttagacacatcctcagccaagtgtagtaaatgtccacactccctccctgcttccctcccttccttccctcttttttcaagaagaggaggtttgtgttgccttcagatgactgttgatttaattgacaggcagcttttcttcattgtgtgctttttgctattgctcacaaaagtgcattcactattctatagtatgttgaaacttttaaatggaaacggcttttcattaacaaaggaagcattttcttccccccttccatgccttagctttctccgctaagtcttggcttcttcagcagctgtacctccaccagaaatgacaaaaggtgcaattgtgctaggagatggcgatgaagatatgccagtggagttttgtgtgtgggctgctggggactgttttccttctgtgtttggttttgttttatttttgttattccagaaagttgagagcacatctaaaaacc

SEQ ID NO: 276083 - DNA, 896 bp, Homo sapiens
  misc_feature (204)..(204): n is a, c, g, or t
gagagagtgtcagttccccaagtagcaggggcagcctggtattgtgtgcatgccagagttaggaacctgccttcctagttctacctttttggtgccatcttcagagaagtgctgggcttccttctagcatggcagcagtagccttcaaggcagaaggccagcaaagcaatgctgaagttcctgcatttgtggaacccacatccntcccaactggggcctgcctgtcttttctggactgttccaaagttgcataccagcacttgccgcgctcgctcggtctcccatttaagactggctttgatctcactgacagtcacgtagccattcttctgaaggaaggaggaatggggattgaatcagttaagagtgcaccttcccttagaacccaggatctgcccaggaacaagagacttacccagacaggaggaaaagctgtcaagcatgagagaacacagaaaatgtttaaaggttccagcggggagagagagaagtgactttcagcatgacagagcctggcccagtgctttgcactgtagctgctcaataaatgtctgctgaacaagcacaggcctgagtagttcatccactggatagtctcagcaaaagacctgcataatggggagcacgagctgagaactgctccagacttgcctcacagactgtcccttgcacacacacacactcgaaggtgcaccagtacctctgccagctgcagcaccacggtgtgatccatattgagctcagctggaacagactgaatgagagaagtccagagtccagttcacaggacctagccaccctcacctccattccgatgcttcagcgccaggcacacttcgataatttggacacctagttcgtaatagaagtcccccacgcccagcatctcagaccaa

SEQ ID NO: 276084 - DNA, 2012 bp, Homo sapiens
  misc_feature (204)..(204): n is a, c, g, or t
gagagagtgtcagttccccaagtagcaggggcagcctggtattgtgtgcatgccagagttaggaacctgccttcctagttctacctttttggtgccatcttcagagaagtgctgggcttccttctagcatggcagcagtagccttcaaggcagaaggccagcaaagcaatgctgaagttcctgcatttgtggaacccacatccntcccaactggggcctgcctgtcttttctggactgttccaaagttgcataccagcacttgccgcgctcgctcggtctcccatttaagactggctttgatctcactgacagtcacgtagccattcttctgaaggaaggaggaatggggattgaatcagttaagagtgcaccttcccttagaacccaggatctgcccaggaacaagagacttacccagacaggaggaaaagctgtcaagcatgagagaacacagaaaatgtttaaaggttccagcggggagagagagaagtgactttcagcatgacagaggtaggttggtgggttcaatcctaaaactggggtaccggccaggcacggcagctcatgcctgtaatcctagcactttttgggaggccgaggtgggtggatcacctgacgtcaggagttcgagaccagcctggccaacatggtgaaaccccatctctactaaaaatacaaaaattagccaggcatggtggcacacgcctgtaatcccagctactcgggaggctgaggcagaagaatcactggaacctgggagatggaggctgcagtgagccggagattgcaccactgcacaccagcctgggtgacagagcgagactccatctcaaaaaacaaaaaagtggggtcccttgtactaacatactgagttagacttctgcaaagcactctagagcatgacaagggaagattctggacaattaattgatgggaagaaatgatgataatcataaactgctaataacctccattatttaaatattcagcccttgccctgcctcattctactcatcctccaatacagaaaagcccctcccttatttagttctgttttacgtcataaaggaaactgggccgggtacggtggctcacccctgtaatcccagcacttagagaggctaaggtgggtggatcacctgaggtcgggagttcgagaccaaactcaggcctggccaacatggagaaaccccatctctactaaaaatacaaaattagctgggcgtggtggcacacacctgtaatcccagctactcgggaggctgaggcaggagaatcacttgaacccgggaggctgacattgtagtgagctgagatcacgccattgcactctggcctaggcaacgagtgaaactccatctcaaaaataataaaactgaacacatctaaatacctgatggggatttgggggaagatggcatatgcttaaggcatgatgagggatgggggcatggcaaacaagattttttaaaatctgtttttgaagaatccataaagtagtttcaaaagacatcaaagagtctggctacccaaagaaatctagttagttgtctgcatgtctgtctacctgactagactgtaagctccttgagagcaggaattttatcatctttatatgccccacagcctggcccagtgctttgcactgtagctgctcaataaatgtctgctgaacaagcacaggcctgagtagttcatccactggatagtctcagcaaaagacctgcataatggggagcacgagctgagaactgctccagacttgcctcacagactgtcccttgcacacacacacactcgaaggtgcaccagtacctctgccagctgcagcaccacggtgtgatccatattgagctcagctggaacagactgaatgagagaagtccagagtccagttcacaggacctagccaccctcacctccattccgatgcttcagcgccaggcacacttcgataatttggacacctagttcgtaatagaagtcccccacgcccagcatctcagaccaa

SEQ ID NO: 276085 - DNA, 2265 bp, Homo sapiens
  misc_feature (2171)..(2171): n is a, c, g, or t
ctgtgaatgtggttcgctattggattcatcatgggataaacaaaagaactcttgtaatgcagaatcattggggacttccatgccatcagaaactggtgttagtgcttgtgtctctttttctccaactagtctttgttgtgatccatctgtgtactcactggtgacctttcctctccaagaagggggacctggagtcagcccgtcacacctggtttcctctctgctagggtccctcctcccacagagcactggagggcagctgaggaggagctaccttaaaaaaggaggtgtgtgccagggagctgggtaggagcctggctatatatctgcccagcagcggtactctcgggacagagatggcactgatgcaggaactgtatagcacaccagcctccaggctggactccttcgtggctcagtggctgcagccccaccgggagtggaaggaagaggtgctagacgctgtgcggaccgtggaggagtttctgaggcaggagcatttccaggggaagcgtgggctggaccaggatgtgcgggtgctgaaggtagtcaaggtgggctccttcgggaatggcacggttctcaggagcaccagagaggtggagctggtggcgtttctgagctgtttccacagcttccaggaggcagccaagcatcacaaagatgttctgaggctgatatggaaaaccatgtggcaaagccaggacctgctggacctcgggctcgaggacctgaggatggagcagagagtccccgatgctcttgtcttcaccatccagaccagggggactgcggagcccatcacggtcaccattgtgcctgcctacagagccctggggccttctcttcccaactcccagccaccccctgaggtctatgtgagcctgatcaaggcctgcggtggtcctggaaatttctgcccatccttcagcgagctgcagagaaatttcgtgaaacatcggccaactaagctgaagagcctcctgcgcctggtgaaacactggtaccagcagtatgtgaaagccaggtcccccagagccaatctgccccctctctatgctcttgaacttctaaccatctatgcctgggaaatgggtactgaagaagacgagaatttcatgttggacgaaggcttcaccactgtgatggacctgctcctggagtatgaagtcatctgtatctactggaccaagtactacacactccacaatgcaatcattgaggattgtgtcagaaaacagctcaaaaaagagaggcccatcatcctggatccggccgaccccaccctcaacgtggcagaagggtacagatgggacatcgttgctcagagggcctcccagtgcctgaaacaggactgttgctatgacaacagggagaaccccatctccagctggaacgtgaagagggcacgagacatccacttgacagtggagcagaggggttacccagatttcaacctcatcgtgaacccttatgagcccataaggaaggttaaagagaaaatccggaggaccaggggctactctggcctgcagcgtctgtccttccaggttcctggcagtgagaggcagcttctcagcagcaggtgctccttagccaaatatgggatcttctcccacactcacatctatctgctggagaccatcccctccgagatccaggtcttcgtgaagaatcctgatggtgggagctacgcctatgccatcaaccccaacagcttcatcctgggtctgaagcagcagattgaagaccagcaggggcttcctaaaaagcagcagcagctggaattccaaggccaagtcctgcaggactggttgggtctggggatctatggcatccaagacagtgacactctcatcctctcgaagaagaaaggagaggctctgtttccagccagttagttttctctgggagacttctctgtacatttctgccatgtactccagaactcatcctgtcaatcactctgtcccattgtctactgggaaggtcccaggtcttcaccagttttacaatgagttatcccaggccagacgtggtagctcacacctgtaatcccagaactttgggaggccgaggtgggaggagcgcttgagccgaggagttcaagaccagcctgggtatcatagggagaccccgtctctacaaaataaaaaaataattcactgggnaaaaaaaaatcattttattatataatattattatatttaaaataaaaacctcgaggggggggcccggacccaaattcgccctatagtgagtcca

SEQ ID NO: 276086 - DNA, 1760 bp, Homo sapiens
  misc_feature (1666)..(1666): n is a, c, g, or t
ctgtgaatgtggttcgctattggattcatcatgggataaacaaaagaactcttgtaatgcagaatcattggggacttccatgccatcagaaactggtgttagtgcttgtgtctctttttctccaactagtctttgttgtgatccatctgtgtactcactggtgacctttcctctccaagaagggggacctggagtcagcccgtcacacctggtttcctctctgctagggtccctcctcccacagagcactggagggcagctgaggaggagctaccttaaaaaaggaggtgtgtgccagggagctgggtaggagcctggctatatatctgcccagcagcggtactctcgggacagagatggcactgatgcaggaactgtatagcacaccagcctccaggctggactccttcgtggctcagtggctgcagccccaccgggagtggaaggaagaggtgctagacgctgtgcggaccgtggaggagtttctgaggcaggagcatttccaggggaagcgtgggctggaccaggatgtgcgggtgctgaaggtagtcaaggtgggctccttcgggaatggcacggttctcaggagcaccagagaggtggagctggtggcgtttctgagctgtttccacagcttccaggaggcagccaagcatcacaaagatgttctgaggctgatatggaaaaccatgtggcaaagccaggacctgctggacctcgggctcgaggacctgaggatggagcagagagtccccgatgctcttgtcttcaccatccagaccagggggactgcggagcccatcacggtcaccattgtgcctgcctacagagccctggggccttctcttcccaactcccagccaccccctgaggtctatgtgagcctgatcaaggcctgcggtggtcctggaaatttctgcccatccttcagcgagctgcagagaaatttcgtgaaacatcggccaactaagctgaagagcctcctgcgcctggtgaaacactggtaccagcagtatgtgaaagccaggtcccccagagccaatctgccccctctctatgctcttgaacttctaaccatctatgcctgggaaatgggtactgaagaagacgagaatttcatgttggacgaaggcttcaccactgtgatggacctgctcctggagtatgaagtcatctgtatctactggaccaagtactacacactccacaatgcaatcattgaggattgtgtcagaaaacagctcaaaaaagagaggcccatcatcctggatccggccgaccccaccctcaacgtggcagaagggactggttgggtctggggatctatggcatccaagacagtgacactctcatcctctcgaagaagaaaggagaggctctgtttccagccagttagttttctctgggagacttctctgtacatttctgccatgtactccagaactcatcctgtcaatcactctgtcccattgtctactgggaaggtcccaggtcttcaccagttttacaatgagttatcccaggccagacgtggtagctcacacctgtaatcccagaactttgggaggccgaggtgggaggagcgcttgagccgaggagttcaagaccagcctgggtatcatagggagaccccgtctctacaaaataaaaaaataattcactgggnaaaaaaaaatcattttattatataatattattatatttaaaataaaaacctcgaggggggggcccggacccaaattcgccctatagtgagtcca

SEQ ID NO: 276087 - DNA, 511 bp, Homo sapiens
ctgtagcaatcatgtttctatctatctatatatatctcataatgttatgctgtaaatctcaaatatatacaataaaacttgttaaaaaaagaaaactaacatagtggaaattctgttttgattgcaattctgtatctgctaactttttgtgtctaagaaggggacaatccatagcaaaaacaaactgacaaatacttttccttcctggtaatcccacacttatggaagttaagaaatttatcttgcttcagtgttaagaaatgactttttattttatttttcttaagagatagctttttaaatgtttgtttttagtgtatctgatgaaattacagactatatctattaaaatagcaagtgttatatatgtgtatgttatttggtcacttgatataaaagcaggtttatggcctgaaatgaatactttttacctttccatccctggtttgggcactagtagctgcctcaaagaacagtcatattcaaaagcaagtcttggcagaatgctcat

SEQ ID NO: 276088 - DNA, 1141 bp, Homo sapiens
aggtcatctagggcgaaattccagtctgagccctgagcagtgacttaagttttcccgataaggctcaagaagggacacagattgtcctccccacaccccgcactctgtcagcacctccactctggtgaagcctctgctgcagacagcccggctcgagaagagacaaagatagacttgggacagataaggacagagacagccagggagagaggggcaaggagctcagagaataatgctgtgtgctccctctttgcctgctactgaacaatgacgtctcttgttgtgaaccccactggcagagcacggaccatggaagcatcttttggcagcaccagagaactgagcatctcaaaggagttcttctgtttcttctgcgtgggttgaccatgggcatcaggcatcagagatacaactctggatcttgtccatccattgctgggcactctgtccatcctgggcgcagaagttatacacacgtttgctggtcttgagctacaaaaccaaatgacagtgaaccagagatgaagggcagggctgttttatggatttggggaaacagatccagatggaggaaacatctgataaagtttgcctaagcagccagcagtctatcaatcatgactcttccaaccctcatcctgcatctatatctagattcaaagaagtccatgcaggaggcagtctacacttttcaagagaaaatggaaggacttcagagttgatttgatgaagctcagtaaaaaacataattttatgtttctcttttaagttgttggctgtttgtttattatgaagccatttaaagagttttcttgtttagcagtgtatatatactgcagatcatggttactgagactctagatgacagaagcgtgtagtctgtgtccttgggtgacttaaaaataaaagcagaacttttatacctttttcaaatagtcaatctattactaacatgagcccactttgtttttaatagggaggaaaatgtgttggggtgaggcaaaaagtagttctttaaaaggccatgaagggtgtctcagcagtggtgtcttgcttggaatgaagtgacatagtcaaaatcaacatgcattttaccagtttatcaaaaaaaaaaaaaaaaaaagactcaagcccaagatgg

SEQ ID NO: 276089 - DNA, 676 bp, Homo sapiens
ctgtctctcctctcaggcatggtatgagcagggctaagtggaaaaaactgtatctatctttcatgttaaagaagtccagaagactgggaaacagatccagatggaggaaacatctgataaagtttgcctaagcagccagcagtctatcaatcatgactcttccaaccctcatcctgcatctatatctagattcaaagaagtccatgcaggaggcagtctacacttttcaagagaaaatggaaggacttcagagttgatttgatgaagctcagtaaaaaacataattttatgtttctcttttaagttgttggctgtttgtttattatgaagccatttaaagagttttcttgtttagcagtgtatatatactgcagatcatggttactgagactctagatgacagaagcgtgtagtctgtgtccttgggtgacttaaaaataaaagcagaacttttatacctttttcaaatagtcaatctattactaacatgagcccactttgtttttaatagggaggaaaatgtgttggggtgaggcaaaaagtagttctttaaaaggccatgaagggtgtctcagcagtggtgtcttgcttggaatgaagtgacatagtcaaaatcaacatgcattttaccagtttatcaaaaaaaaaaaaaaaaaaagactcaagcccaagatgg

SEQ ID NO: 276090 - DNA, 708 bp, Homo sapiens
tggctatagagcgtggctgctcttcgctccactccattggatggggagatgctggaattctgttcctcccccatgctgctgtctgggagatgtagcagagacctcttctgataggaagggaaacagatccagatggaggaaacatctgataaagtttgcctaagcagccagcagtctatcaatcatgactcttccaaccctcatcctgcatctatatctagattcaaagaagtccatgcaggaggcagtctacacttttcaagagaaaatggaaggacttcagagttgatttgatgaagctcagtaaaaaacataattttatgtttctcttttaagttgttggctgtttgtttattatgaagccatttaaagagttttcttgtttagcagtgtatatatactgcagatcatggttactgagactctagatgacagaagcgtgtagtctgtgtccttgggtgacttaaaaataaaagcagaacttttatacctttttcaaatagtcaatctattactaacatgagcccactttgtttttaatagggaggaaaatgtgttggggtgaggcaaaaagtagttctttaaaaggccatgaagggtgtctcagcagtggtgtcttgcttggaatgaagtgacatagtcaaaatcaacatgcattttaccagtttatcaaaaaaaaaaaaaaaaaaagactcaagcccaagatgg

SEQ ID NO: 276091 - DNA, 255 bp, Homo sapiens
gtaaaaaaaaaaaaatcaagaaagatctaaatagatgttgagatattccatgttcatgaataggaagactcaacattattaagatgccaattcttcccaacttgatctgtagatacaaaacaatctcaatcaaagtcccagcaaattattttgtgactatcaacaatcagaatctaacaaagttggaagactgacgttttttaactgcaagacatactataaagctatagtaatcaaagtcttatggtatgggtg

SEQ ID NO: 276092 - DNA, 299 bp, Homo sapiens
gaaacaatgagattggattattcttctgcccacccactgggcatttggagctcagtgctcacagaagtgagttgacagaagtcaattcacttgaataggctgcacagcaccttctcttctttcatgagccccaagaacacatctaacaactgggcacatcaggggagagtgacccagaaccaaattccatgcttgctgtagtcatttttatatttaaacccagtttaatgtcttaatttcaattcctggggattcagattctttgcgttgggtttagattcatgccttggggctttttt

SEQ ID NO: 276093 - DNA, 147 bp, Homo sapiens
tgattggtgccttctgggttaaaaggagtgaccaataatttatctagacagagaataactcaaaaacaaggcagggcttgaattaagtcttgaaagaaggtacatatggaggaataatgagaggtttggagagataggtagtttagg

SEQ ID NO: 276094 - DNA, 730 bp, Homo sapiens
gtgctctgatgacccacgacccctcctctttcagctgacttctaacttatgcaacaacagaaattaaattgatgggcttttaaaattaattggttacaataatatactcatattttcagtgctattttatccaatttttggctttatatatttctatcctctatacttctccaatacttgtcttagcttgtttttcattttctatcttaaactcttgacaatattttcattttctatcttgtatctatcttccaattttcttctaagtatgtacattttgcccttagctttttgtttcctagcttgtcttttttcttctgcttcctacttttcaggtttaaatttaacttttttcttctaaaagtatgtttttatctactaatttccctatcttctctattcttttcttcttttcccgagttgcagagttcaaagccttgaagtcatactggatgcttcttttcctctcacacctcacatctgacctatcagcagatctgtctgattaaccttcagcatatgtccagaatctgaccaattctcaccacttccactactaccactgctgtcttttacctaaattactgtgggaacctccaaactagtctcccagcttccatctttgacatgttgagattcttctcaacacagaagcctgggccaggcacagtggctcatgactgtaatcccagaactttgggaggccaaggcacaaagatctcttaagccc

SEQ ID NO: 276095 - DNA, 476 bp, Homo sapiens
gtctgcatgtctcccctataccccagattcacatatccagctgcctccttaatattatcacttgaataaaagacatctcaagtttaacaagtcctaaactgaactcctgattgctgcttgtcactgccctaccaccaaatcctgttccttttcttcttttcccgagttgcagagttcaaagccttgaagtcatactggatgcttcttttcctctcacacctcacatctgacctatcagcagatctgtctgattaaccttcagcatatgtccagaatctgaccaattctcaccacttccactactaccactgctgtcttttacctaaattactgtgggaacctccaaactagtctcccagcttccatctttgacatgttgagattcttctcaacacagaagcctgggccaggcacagtggctcatgactgtaatcccagaactttgggaggccaaggcacaaagatctcttaagccc

SEQ ID NO: 276096 - DNA, 452 bp, Homo sapiens
tcatgtacatttacctgtcagtactcaactgaagattctaaataaactatgtgccacaaatctccaaatgtttctctttgaatctttctcttcttgttaacatgccacggaaattttacctcctttggtctcacagaccctcaggtttgtatgatcatctcagggaagcttctattagctacctgtgttctccctctccgtgctacagcctggcaactttctacaggctgtgaactgtggtaatgtagggataacttggtttgtttcccccctcccaagaatcactgcactgtattatatcatgtccagtgtcaaaaacaattgcttttgcttttatttttttctcattgtttcaggtgaaagaataaaatagtttctgttattccatttatgccagaagcagaaatcatatttataatttaaaaataaactgatgtattccttaacccaca

SEQ ID NO: 276097 - DNA, 628 bp, Homo sapiens
ctgccaccaccaattgggaattattcataactgtaatagctgacacttactgagagtttattatgtgccggcactgcctcaaaaatattacacgaattaacacaaataatctgtctggtcctaacaatagtaccatgaggtaggttgtggtaatagtgatagctaatatagctcctagtatgtaccaggcacagttttaagcatgttacagatattaactcattgaattcttatcatagattcatgaggtagatactgttattatctctaattgataggtaagaaaactgaattacagagagattaagttacttgctccacgtccctcggttaaaacctgcctcccgggctgggtgcagtggctcacacctgtaatcacaacactttgggaggccgaggtgggtggatcatgaggtcaggagttcgagaccagcctggccaacatagtgaaaccccatctgtactaaaaatacaaaaattagctgggcatggtggcgggcacctgcagtcccggctacttgggaggctgaggcaggagaattgcttgaacccgggaggtggaggttgtaatgagccaagatcacaccacagcactccagcctgggcgacagagtgagagtctttctca

SEQ ID NO: 276098 - DNA, 458 bp, Homo sapiens
aaatgtcgaatccctgccagcaatcactgtcctcaccaatcactggcttctttgcaaatcctaagagagaacattcagtgttaattatcatcttaaagtttatgcttctctaaaggtttgtcttgtctaccctgggttgttaaaaactccacgaggggtaaccagcaactgcaaaaacatacaaaattgtaaagaccattgacactatgaagaaactgcatcaactgaaggacaaaataaccagctagcatcataatgacaggatcaaattcacacataacaatattaaccttaaatgtaaatgggctaaaagccccaattaaaagacacagaatggcaaattggatagagtcaagacccattggtctgctgtattcaggagatccatctcacgtgcaaagacacacataggctcaaaataaaaggataggggaatatttaccaagcaaatggaaagc

SEQ ID NO: 276099 - DNA, 281 bp, Homo sapiens
accctgtctctactaaaaatacagaactgacaactcagctgtttcctgcattccttgagcatgttcactgtcagtctatgtggaccgccttgaccaggttcaagagttccttttcattccagtttattgagactttttcttttttgagtcggagttttgctcttgttgcccaggctggtgtgcaatagtgcaatctcagctcactgcaacctccacctcctggattcaagcgattctccagcctcagcctcccgagtagctgggatgacagccacccgcca

SEQ ID NO: 276100 - DNA, 396 bp, Homo sapiens
tgtgtactatatcatactgttcctcaaaacaatccagtgacttccaattttatttagaataaaatttcaaattctttttatggtttatcaagtattacctgcctctctaattgttcttacaatgtttcagcttcaattattttctttgaactcctgtaatacaccaaggtctttaccagctcggagcctttgcacaagctgttctttcttcctgaaatgctgtttccctgaagtcctttcattattggttctttcttagcatttggacctctgttcatattatctggtcatgctcttgaaatagatgtcccttcaatcccacagaaacatgtaatttttccatttttgataatttgattgcttcttaattctcaacagaattggtgattttgcttt

SEQ ID NO: 276101 - DNA, 531 bp, Homo sapiens
ccagaggctgtgtttttgccctttggtcatgcagatggggctaaagcgaagttacaacattggaaaatgtcttcttaacgtcacactgatctccttaaggcaacgagccccacatgctctctgaggcctgtgcacgtgttctgaggacccagttatgtgctgcgtgattccagaggtgaacagaccctcacagatcacctctcctcaccctctcatgagagggaaactgaggctcagggggagaattggcaaaggttacacttggtggtgggtttggaatctgccctgtggacgcccgactaaccatttctgccagatgcgcgtgggaagtaaaatgggaagaggtgctccataggaggaggggacgtgggtacagtcacgtggacccgtgagccggtcacctgcgaggcaccagggcctacaggaaaggtgcccgctgtcggcttccgcagggaatttcgttatctttgtgaggtagggtggaacttgcatcctgaacattaaagtttacatgccaaggaaaaaagtgga

SEQ ID NO: 276102 - DNA, 400 bp, Homo sapiens
ctggatagttaccagcaaacagtgtggttcagaaactaattctaaattcgtatgtggttcttgaaggcccagaaagaggaaaaatagaaaatagtagaggagtttctgactgagttatcatacagcaaagcctaggaggttgaggggattgaagggaagaagtggccgactctgccacgttggggttagggaaatagggagtgtcaccaaagaggacactgcagttatctgagttaggtggtctggagggaggacattttccagagtccaggagaacacaagtcaaagtcataatcatccatctctcctatgttgggttcataccattagataaagtatgataatatcacaacaatttaggtcagaggttcagaggttctctgaaatgaaccatttcata

SEQ ID NO: 276103 - DNA, 110 bp, Homo sapiens
gcttccctataatagaggattttttattctctttgagtatgagggtgcacagcacacacacacacacacacatacacacacacctgttttgtattcaaactgagaatgtt

SEQ ID NO: 276104 - DNA, 3110 bp, Homo sapiens
  misc_feature (739)..(739): n is a, c, g, or t
  misc_feature (1387)..(1387): n is a, c, g, or t
  misc_feature (1877)..(1877): n is a, c, g, or t
  misc_feature (2026)..(2026): n is a, c, g, or t
  misc_feature (2046)..(2046): n is a, c, g, or t
  misc_feature (2084)..(2084): n is a, c, g, or t
  misc_feature (2144)..(2144): n is a, c, g, or t
  misc_feature (2228)..(2228): n is a, c, g, or t
  misc_feature (2360)..(2360): n is a, c, g, or t
  misc_feature (2479)..(2479): n is a, c, g, or t
  misc_feature (2482)..(2482): n is a, c, g, or t
  misc_feature (2484)..(2484): n is a, c, g, or t
  misc_feature (2486)..(2486): n is a, c, g, or t
  misc_feature (2728)..(2728): n is a, c, g, or t
  misc_feature (2754)..(2754): n is a, c, g, or t
  misc_feature (2781)..(2781): n is a, c, g, or t
  misc_feature (2815)..(2815): n is a, c, g, or t
  misc_feature (2821)..(2821): n is a, c, g, or t
  misc_feature (2956)..(2956): n is a, c, g, or t
  misc_feature (2997)..(2997): n is a, c, g, or t
ctctagaaaaatgttcctgtgtacatgcacatcaagtatcacatactgtttcaggctgttcaaagactacaaagtctgttcatgacctaatggtccatgttccctcagttaagagctccagagataaaggatgtggaactcaaaggtaagtacccagagccttgaaaactccatttgtgacttggaagaattctacaatttgaattaactttgtggagagagatatatttttgaaaaattgtgtgtaccaaaaaaatttcatatcaaataatattttcctgtagtgcattcaaggatctggttccacagcaaaaaattgttttggtctcagttcctcaaaatcacatttaaggagcttgagatttatattttctacttaataagtcttacaaaagcaagttaagaaggaaaatggacaatcatttctgcacatatagggtttaataaaacatgtataataaaatatctcatattttaaatttccaccttattggtagctttcatgacaaagggctagggtgctgatggccatacaattaaggtttttggttagttagttagcagaactaactgactcctacctggtgggtttttcttttgtttggttggttggttggttggttttttcccagatggctcaggaggaaggtaaatagcagtcattgtatgtgtgacagagtttgagatagaatgagcatattgaatctcacatcctattcttattactgtcaggcagcgntgacctagcagtataaaactatctgaagcaatgtagtcactcagttctcataaagtttatttcaagtactgtaacaattcatgtttggattagaaaagtcactagaaatttgacttccatatagtaatctatacttttttctctcatttccttcattttttgagccgtaagtgtaaggcattttgctggtattattacaatggttatgaggagtttctttgcttgcccaaggtcacatagctagcaagttaaagtagattcaaatccaggcctgctagataccaaattattatttaagagtacttttcactactcctaaataatgacacagatacgtttgtcttacacatttcactttattgtcaagttattagtatgtttattttcaaaagttattttttgcaatttctttttattattccgtactttttaaatttacttcattatcacgtcttcctttattctttttaaatagtttttgcttttgttattttgttttcccttttttactcttggtttgtaatacctctttccttatttgctcctttctcatttgatctcaatgttaatccaactgttttccacatctgattcactaaaattttagcccttaaaaaaaaaattcctgtttttcctatctccttttgnccattctcttctccttgcctcacttcttttatctttttccattttactttcattttttgtttctctagatgttgttttgacatatgagttaatgtactggtacaattttgcatctgtaaattagagcttcagaatcaactgagtgtatttattctttatttttaggcctaaatttatcttaccttttattgattttataatatactatactctttcattttagtctgcatatgttagccaaagaagatatgcccctgttttaagaaatctctgtaaaaaatgtcaagtgtgacaagaattcttcaagaaacaagctcctctagtttgtcttctatatttagagcttcaacagttacctatattactggtaactcccaaatataccttcaaacttgttttttgggcccaagttttttgcttcatatatatctgttttgaatatcccataaataattgcatctaaagcatacctccactccattgttctcanagataaaaccaaacctgtgctgcttcttatatttctagtatttaagcgtcacctgccacccctttacctgagctacaagtcacgcattgcattagactcctctgctttcttctttcacctctaactagactattaaccaaaaatttttnaatataactttcaaaaggtnttttattacatcatttccatcctttatgtttgggttcnagccctcattaactttaacatggattcttggagtaccctccttactgattttgttacacntgtccctcttttagtcagtactaccatgataataccatggataataattttttcatttttatttttagtcttgctctgtcgccnaggctagagtgcagtggcgcgatctcagctcactgcaacctccacctcccgggttcaagtgattctcctgcctcagcctactgagtagctgggattacaggcacctgccacagctcctggctaatttttgtntttttagtagagatggagtttcaccgtcttgaactcctgacctcatgatccaccctcctcggcctcccaaagtgctgggattacaggcatgggccactgcgcccggccaataatttttnttntntntgtgctaatcatactacattttctttagaataaaagatcacatacttgtttgccattcgcagtctggccccattgtgccattctagacttacctcctgccactccccaccagctttgttttgtcttagccacacaaaataatctagcgtctctaaccagtcaaacattttaccttgtgccttggctcactctgtgccttttctccagaatatctttctgtgtacttttctcccatccttttncctttaaacctgctgctatggtttgnatgttgtttggcccctccaaaactcangttgtagttcaattgccaatgtaatagtgttggnagatgntacttttaagaggtaattaggttgctaagatggattaacatctttctcttgacactgagactgggttctcctgggaatggttagttcccaagagagtgagttgttataaaacaatgctgcctcttctattttgcnctttttgtttgcacaaactcggtccccttctgtttctctangatgttttgatgcagcatgaggcagtcatgagaacccaccagatacagctgcctgatcctgaatttcccagccaacagaaccaagtgctaaataaaactctttttaataagtt

SEQ ID NO: 276105 - DNA, 506 bp, Homo sapiens
ctatttgtcaaaagcaacaccatgctcatttatgtaggcttggcaccacctgactcctcccactcctgagcctgcatttcaagttctgtaaatataaactctgtactagcatcattatatctctcttttccactcctgctgctcccctcttagttcatgcttcctctcatttgatcagctcatctttggcaagattttgcaataatatactaagctagctccctgcccccacatcctagcactccagagagttattcattctcatcacatcagtgatctttctgaaatcagaaattcaaccacgtcacttttcagcttaccattcaatgaatttcttcgaatgctaaacatagaattgccacacaaccaagcaattccactcctaggtatatatccaagagagatgaaaacatgtccacataaaaactggggggctgagcaccatggcatgcacctgtaatccaagctactcaggaggctgaggcaggaggatcacttgagcccag

SEQ ID NO: 276106 - DNA, 428 bp, Homo sapiens
accattggaaaaatcctgtagtccaaaaagttattaggatatatgtttttttctatatgtatacttaggtaaagaaacagtgtacagggctgagtgttctgggatttctctagaggctggcaagaaccagttgttttgtcttgcgggtctgtcagggttggaaagtccaagcagtaggacccagtttcctttcttagctgatgtctttggccagaacaccgtgggctgttacttgctttgagttggaagcggtttgcatttacgcctgtaaatgtattcattcttaatttatgtaaggttttttttgtacgcaattctcgattctttgaagagatgacaacaaattttggttttctactgttatgtgagaacattaggccccagcaacacgtcattgtgtaaggaaaaataaaagtgctgccgtaacc

SEQ ID NO: 276107 - DNA, 803 bp, Homo sapiens
aaggaataaatcgtccctgccgaagaatttcaaataattttaaaatgtagaaggaatgagggaagtagaaaatcaacattagaacaacacagtaataattgctacaggctagcaattcatctgccaatgaatgctaaaattagtgggagaaacttagaggagaaacagaatacttgcacagtctcaaagtatctcctccaaaatatttattaattactgtggttattttaacacacgtccccaaattctttgatactcctccctctagaagaatagcttaattttcttcttgagcatggggctaaactttatgacttgcatctaacaaaaactttgaaagaaggaaaaacagtaactttacgacgaaaaaatatggcagacaccacttcaagtgatcaaggttaatatcatcagtaacaaatcatgttaatataatgcattatatgttgcaataaaaagggcactttaccttcggggtattcatcccaaaagcgcataaccccaggctaatcatgagataaacccaaactaagggtttatacaaaatacctgaccaatactcttccaaagtgtcatgctcactaaatagaaggaaagactgagaaactgtcatacactagagaaggctaataagacatgacagctaaatgcatcatggtatcccagactagatctgggacattaaagaacattagtgaaaacaagtgaaatccaaatatattctgtagtttaatgaatggtactgtcccaatattaatatctttgttttaataaatgttacatggctatgtatgatgctaaca

SEQ ID NO: 276108 - DNA, 460 bp, Homo sapiens
ggccattgctcaaagaatgcagcctcctggtcacccatgttgtccccttgccaacaaaaagagtgaaacactgtgcaatgtttgaagagatttattctgagccaaatctaagtgactgtggcccgtcacacggcctcagaagatcctgagaacttgtacccagagtggtcagcctgcaactgggttttacaaattttagggagacataagacatcaatgaatacttgcaggatggacattggtttggtccagaaaggtggggacaactggaagtgacagagggacttctaggtcataggcagattcaaagattttctgattggcaattgattgaaagagttaagttgaccgggcatggtgggccatttctataatccttgccatggggaggctgaggaccatttgagcccaggagttagataccagcttgggcaacatagagagacctcacttctccaaa

SEQ ID NO: 276109 - DNA, 438 bp, Homo sapiens
gccataagcgtctgcacagagccagtgaaagattccatgagatccacaaaacacttcatgaatgagaacagcctttagttcccaccgtgcccagagatcactgaactcagttcacgccagtgccagtcgaaaagaacattttggccatatgcggtggctcatacctgtaatcctagtactttgggaggctgagatgggaggatcgcttaaggccaggagtttcagaccagcctgagcattatagtgagatgtcatctccaaaaatatattaaaaaaatttttttaaaaagctaggcatagtggcaagcacttgtagtcccagctactcagaaggctgaggcgggaggatggcttgagcccaggaattcaaggcttcagtgagccaagatcgcaccgatgctctccagcctgggtgacaagcaagaccctgtcccttaa

SEQ ID NO: 276110 - DNA, 409 bp, Homo sapiens
tcttgggagggtgtatgtgtccaggaatttatccatttcttctagattttctagtttatttgcatagaggtgtttatagtattctctgatggtagtttgtatttccgtgggatcggagccatcaccaagatttaatagatgacatgtcctgcaaggtgggtccctggctacttctctgacctcagctcctaccactgctcctcctgctcacatactgttttccaggcatgtttactcacttgccttagcagacatttgttgagtcatgtgctgatgtggacactggggatacagccgtgaacaagcagaggaagatcctgccaccaagcagttaccttctagcacaggaacagtagacctagcacatgataaattgtgtattatggcagaagtggaaggtgctatagaa

SEQ ID NO: 276111 - DNA, 434 bp, Homo sapiens
  misc_feature (20)..(20): n is a, c, g, or t
  misc_feature (22)..(23): n is a, c, g, or t
  misc_feature (26)..(26): n is a, c, g, or t
gagacaaagtctccctctgntnncancccaggctggagtgcagtggcgtgatcttggctcactgcaacctctgcctcccaggttcaagcaattcttgtgcctcagcctcccgagtagctgggactagaggcatgcgccaccatgcctggctaatttttgtatttttagtagagacggggtttcgccaggctaggctggtctcgaactcctgacctcaggtgatccacccgcctcggcctcccaaagtgctgggattacaggtgtgagccaccgcacccggctgaaattttctactctgtgattctttatggcaaattttcaatttcagggcagcttctccttttctacctaacacacttctactacttttaccccactgtcctgtggctggtatctcaaaagagttttatattgacccaatgagggagagccta

SEQ ID NO: 276112 - DNA, 408 bp, Homo sapiens
tgggaagcaagcaatgacaagaaagtgctaaaccagagaaggaaagaaggtaaagaatagcacgtgcactgtgagagaattgtgctcatgattggactcattaggtttcaatgggtttgtttcgaaaccataagaaccaaaggcctgtgcctactttagacccaccaaaatgaagcctttaaaaaggcttaataagattaacaagacagacataatttgaaagctgagttccactaagttagagggacttgggaaagaccttggccttttcacaaattcagtttcacaaggtcataaaaccaagtctttgcaagtacaaggtgatccattttaagtaaaatttctgctaatattgaatcagagtttttacattgtataatccaaatatccaaggttttcaataaagaa

SEQ ID NO: 276113 - DNA, 503 bp, Homo sapiens
aactttctactggagagattaggcgtgtgacacctggatccaattaaccacctctgcagaaagccaagaaaagaaatagggttatccaggaaagatctgtggaaaatgctcatgtctaatggcatgggatcttttgacatacatgaaagatgcacatggaatattagaatgttataccactacatacactgccagcttggactgaagggaacagagatggcatgaaatgaagaaaggctgtgcaacctctgaaatactgcatgaggaaaacagaccgataaagctacttggctgcaaacatctctcatctttcaagaaaagggatgaatgactctgagtgtggtttagaggtcagcggatcttattcccttctgcttaaggggatggataccccattctccgtgatgtgtctatttcatataacatgcctatatcaaaacttgtcatgtaccccataaatatatgcacctactatgtaccctcaaaaattgttttaaattaat

SEQ ID NO: 276114 - DNA, 404 bp, Homo sapiens
aactaaaataacaatatctgctttagataaattggcaaacgtttaggattgcaaatattcagtgggggtgtttggctttttcagtaacacgtattattgctggtgcattcttgagggatggaggaggtggaagaaataattagctgcacattttctataaattagttcatatatgtcagttaaataggaacagtatgtggatttaaggtttagttgtgtggccgtaatcacatccaacaccaagtcggccaaccatatgtgagcttaatcccacagaattcttatgttagacctccctcttcagataatagaggagattttttttaagtatacgtgcacagaggaagtgacttctttctgcgcactctgttgtcactggaattaaaattaaattacaatctaaa

SEQ ID NO: 276115 - DNA, 1023 bp, Homo sapiens
ctgacataacttttctgcatttcttgcaagctaacagctgaaccaacaaaacccaagccctaattttaaaaaagatagttggccaggctcaatggctcacacctgtaatcccaacactttgggaggctgagatgggaggaccgcttgagcccaggagttggagaccagcttgggcaacatagtaagattctgcctctacaaaaaataaaaaataaataaataaattagccaggcatggtggtgtttgcctgtgattgcagctactcaggaggttgaggtgggaggatcgcttgagcctgggaagttaaggctgcagtgaactatgatcatgccacttgcacttcagcctgagtggcaaggcaagacccagtctcaaaaaaaaaaaaaaaaaaaaattgaagcttaataaacagaaacacaatacagctaaagagtaatcaacttgctccaaacttaatacagctcccagttctcaaatgaatccaaactcctaatacatatcaaaccaccatcaagtatgcgtttttttcccattctaaacttttattctcattactcattgactcatatactctactccagtacataatgtccaaggatatgaatctagagtttactgtacatgtatatgtgtaagctgcattcttatcccttccctgaccactttgttgacatcatttgttgcaggatgaatagcagtttgctatgtcgaccaggagagagaggagaggagcagaatatattctaggcatatttttcccactatagatagaatgcccttcttttcattctgtgccttcagtctcgtctcttccctaaagcactgattaaaatttaacttcatgaagccttctgaaactgattccaaccaaatgcagaaatttcaacaaactccaatatattcattttagagttaacagttttcttatacattttagcttgtttagaagccttcccattttgtatgtctcaatattgtgagcaagtttgtatgctgataaaattcacattattattaaaaac

SEQ ID NO: 276116 - DNA, 400 bp, Homo sapiens
acggggtttcaccgtgttggccaggctggtctcaaactcctgaccccgtgatctgcccaccttttcctccattatgctgggattacaggagtgagccaccgagcccaacgtcatgcaagtttttaatatgtctatctccatgaattttttctttttcatgtatcttttgtgtcttacttaagaaatatttctctaaatccaagaaatggaggtattctcctatagtttcttctaagtgttttacagttattttcttcacatttagatgtttaacgacaaaagattctttgcttgtccaaacttcagtcaggtttctgagtcttctcctaagcccatccacgtactttcttgtaaaactcagttttggcaagagccctgctgggtcagttcagcaagaacg

SEQ ID NO: 276117 - DNA, 426 bp, Homo sapiens
taccaggaatttacaactcctgttttaattcaagcagcttgcattaggacataaaatctaggtatattttaaaagtgtagttttatgtgaaataactgaagaaaaattgtcctttcctaaaaagtattctttcttcctcggtcttagcttgcctgcctctccctcatacacatatcttggcactcaagaatcaaagttaccaaatccctcttttatgacattgcaattttttggcaaggacaagcttctttccaattctgccacattcatttatttgaagcttgtgggagtcttatggcaagcacattatttctgagaaggctttaaaaaaagaaaaaaaatgcttcatggctaaaccttcactatggcatttaggcaaagaaggtatcccttcctcttagtacaaccacgaatgatcacttacag

SEQ ID NO: 276118 - DNA, 342 bp, Homo sapiens
ggcacacgccaccacacttggccaatttttctatttttaatacagggtttcaccacgttggccaggctggtctcaaactcctgacctcaagtgatctgcctgcctgggccttccaaagtgctgggataacaggtgtgaaccgccacacctggccacaatttccttatgaattattccatcaccaatatctttcaggccagcagtgcttatatctgtgcatgcttagcgccatgaaaaatccattgctgaaggcggggattacaggtatgagcacacgccggcactatctcacttttgctatgatactgtatgtaggaaatatgggctctagtgtcttacctg

SEQ ID NO: 276119 - DNA, 216 bp, Homo sapiens
aggaggcaaaaagacataattagaagaccacccagagggtatggtacagtggaagccaggggaatgggcaactttcagagggagggagctatcaatggggtcaaatgcacagagagatctaggaaataatttaaaagcccactggatttagcaattcaggaactactggttcatcagtagtaaggtaggagcagaagccagatgctgggaattgta

SEQ ID NO: 276120 - DNA, 407 bp, Homo sapiens
cctgagaagcgtctgtgacccacagtaggtcatatggagaagagatcagcaaaaattcagcaaagagagagtgaaaggggcaatttcaataactgctgaagtgggtggtttgtctggatgacaacctttcagaaagcacttaagacagccactccctgggtgttggagtgggtgcctgcatgtccacattcagagaatctggccacatccgctcctcctcactccctctagcttaatcagaggcacctgattttgaattttggggcctctggttcccagcagcacagttaagggctacggattgtctggagagagactgggtcccggtgcaggcttttttttttttttttaaagacggagtattgctccatcgccaggctggagtgcagtggcgcaaagtcggctca

SEQ ID NO: 276121 - DNA, 705 bp, Homo sapiens
gaagaggatctggcagtgagtgctgtggaacctcagcatcccaggccagccaaggcagaggaacaagcagaggagacagaaagaatcacaagggaggaggaaactatcaggaagttcctttagagagcttacaattaactcactgaaatccctccacagctgcctgagataggttttgtcatacctccattttacagttggggaaactgagaccttgagtagttaagtagcatagctctaatgcaggaagtagtcattgacagacccaagatttgaagtgaggctgtcagcctcctgagttccccttcttaatcactactgctttccaagtttctagagtgtttcagtcaaaaacaaatgtgacagttaggtttgtgtaactttactatagtagatgtgtagttctcaatacatactttatcttagctagaaggctaaggaaacgatcaatatgtgttttaaatattgaaaaagagcttatggactttgattattgggtttgtagatgcatagagatctcatgacctggctttgggaatctggtccgatcttgtcattttgcctttggcgaaagtgaaggcccttgttgagggacctacccgacacttcactggagcttgagcctgggtctcttgagtccaaggacagagtttttcccattgtactatgatgtccttggaatgtgtgttcttcacacagacagtg

SEQ ID NO: 276122 - DNA, 951 bp, Homo sapiens
taaatgatgtaatggtctataaggtagtaatctggcacagcttcagtaatgtgtgctgtgtttgtaaaaaggtgaagtactttattggcattttctaagccctctgacattgttagtgtctgggttggttggtttgcattttactattatggtggaatctgtgttccttcaccattggttaagtctgaggaactaacagtgaaattcattgatggccaacttggataaaaatgaagaatgatattttcccagtttactacacatggaccaatagtgattatttgggagagaacactgggtagtattgtttgacttaagaaccttaaatatattgaaaagtaatggcattcttgctcatgatttgcatttgttagtgaggtctcaccatagtattttaatgtagcttcttattaaaattttattcataaatagtttagcagtcacagaggtgaaaaaaaaaagatttgcaccatcatatccgagtctttactaataaaatgaggctgcttaagtacccaagtggagcaagggaagagttactacagttactgtaagtctgagttagaaaaaatacagagcatctagttattgagcaaagcccccttttacctgttcgcttattcaaagagaaacaatagaatttgcttctcagtacatgtttttaaaattgagaatctctgatgtgacaaaatcaatttttacaaaagttgaattaaaaacttttaaaaattgcttgtctttgggggtatgtctacatattcgtttaaatttagaaattcccacatgtttaagatatatgcccatcccctttttagagtaatcaaaatttctatcacagttcacatactggaatacatagtaaaattgagatgtgtccaagagattttcaatgttaattagctcattctaaatagccaatataaggtaacttctgtttaaaaaaaaaaaaaa

SEQ ID NO: 276123 - DNA, 1007 bp, Homo sapiens
taaatgatgtaatggtctataaggtagtaatctggcacagcttcagtaatgtgtgctgtgtttgtaaaaaggtgaagtactttattggcattttctaagccctctgacattgttagtgtctgggttggttggtttgcattttactattatggtggaatctgtgttccttcaccattggttaagtctgaggaactaacagtgaaattcattgatggccaacttggataaaaatgaagaatgatattttcccagtttactacacatggaccaatagtgattatttgggagagaacactgggtagtattgtttgacttaagaaccttaaatatattgaaaagtaatggcattcttgctcatgatttgcatttgttagtgaggtctcaccatagtattttaatgtagcttcttattaaaattttattcataaatagtttagcagtcacagaggtgaaaaaaaaaagatttgcaccatcatatccgagtctttactaataaaatgaggctgcttaagtacccaagtggagcaagggaagagttactacagttactgtaagtctgagttagaaaaaatacagagcatctagttattgagcaaagcccccttttacctgttcgcttattcaaagagaaacaatagaatttgcttctcagtacatgtttttaaaattgagaatctctgatgtgacaaaatcaatttttacaaaagttgaattaaaaacttttaaaaattgcttgtctttgggggtatgtctacatattcgtttaaatttagaaattcccacatgtttaagatatatgcccatcccctttttagagtaatcaaaatttctatcacagttcacatactggaatacatagtaaaattgagatgtgtccaagagattttcaatgttaattagctcattctaaatagccaatataaggtaacttctgtttaaaaaaaaaaaaaagtcgaccggccgcgaatttagtagtagtagtagtagtagtagtagtagtagtaggc

SEQ ID NO: 276124 - DNA, 413 bp, Homo sapiens
ttcatttcactcagcctcagttttcttgtttgtaaaatgagataataattacacataccccaggaggctttcttttaatgatgaaattggaaaatgtatgttttactgcactgaatagcaacatgttcagtaactgtagctgttgctgttattatcatcattattattatttccaccaccattaatgttgccatttaaaattcttactgaatcacaggaggcctttaacttagctaacagtgatttgacaaatagaggtctttttcctaaggttttagttttttccagataaaagtgagctaattgtgggccaaattcagcctgtcctcttttttataaataaagttttgctggattgcatagccttatccatttgtttatgtattagctatggctgctttcatgctacaaca

SEQ ID NO: 276125 - DNA, 802 bp, Homo sapiens
ccttgctgaacgactctcttaacctccaccgctacagcggggacccaggaagcccaatgatgtgccagctacagcagttcgatctgtgggttctgagaggagtcctgaacttcggtggtgagacgtgccctggcctgtttctgtacaccaaggtggaagactacagcaaatggatcacatccaaggctgagagggccggccctcccctgtcctcactccaccactgggaaaagttgatttctttctcccaccatggaccaaatgccaccatgacacagaagacatattctgattctgaactgggccatgttggatcatacttgcagggacaaagaaggaccatcacgcattcacgactaggaaacagctctagagatagtctagatgttagggagaaggatgtaaaggaatcaggcaggtctcctgaggcgtctgtacaacccttatactatgactattacggtggggaggtgggggaaggtaggatttttgcaggtcagaacaggttgtatcagcccgaagaaatcatcttggtttccttcgtgcttgttttcttttgcagcagtatctagtccaggagctaccccaccaaactgaagagtaaactgagaatgctgagtgccaggcattcaccatgctgttttgatgtctgtttttgatagttgcacactggggctgccacggataagcccatggcatacactgggctggctctccctcctctatccctctcccaggtgtgggaaggtcactttcactatgcttgtgaactaaatgctggctaacaagtgtcaaaccaaaa

SEQ ID NO: 276126 - DNA, 434 bp, Homo sapiens
taagccatcgttgttttctttcactttggggaaagaaagaaacaaggaaatggatactctctagaagaggaggaagggtgttctctgcctgtttgcacattcaagttcaaagtggaggaaatcacatgacgatgggtgtcctgaggaaaatcttcgtgaaagatcttgacatgtgtcccctatacaaactccagaagacagaatgcggcagccacacgaaagaggaaaccaagactgcctgcttggtaagaacatcatggagtagaagctaagtgttgagagtaagccttggtcacatccaggggagcctcaggactccccttccctagatggggagctctgtgagggcagggcttgggatgagtggctgtctctggagtgaatagcacttggcagacagtatgcgctcaataaaaatctgctgaatgaactaa

SEQ ID NO: 276127 - DNA, 164 bp, Homo sapiens
ctttgagaactgctgatgaatatgaaaggtggcagacactgccaatgtgtaccgttatgtgttcaatagatgagagtttttatttgtagtctaacataattttgggattcaaaaatgccactgagcatcttttagggtgaagaagacacactaggcaaaagaaa

SEQ ID NO: 276128 - DNA, 1780 bp, Homo sapiens
aaggcctggtacggcccggagttatgtgtgtcaggccagcctgagttcatttctccttgagcaggaacagttcatggacgaactctgaggaccattctgaggacaagaggcatccagtgtcatgagtggaacatgcattttatggctacagagttaaggcaagggttgaattccacgagtcaaaaagcagcccttttcagagacccaactctctggggtgctcaggggcttgggctggattgagaagaaaactgacaagagtaagctgccctctcttctctggccatctcacaaaccacagtgcgggccaactggtcctgcctctttaccacacagaaccaagcactagggataagacagctgcccatggtgtccgcggcgggtctctctggggatggcaagatgcgaggggtgctcctggtgctgctcggccttctctactcttccaccagttgtggcgtccagaaagcttccgttttctacggtcctgaccccaaggagggcttggtcagcagcatggagttcccgtgggtggtgtcgctgcaggactcccagtacacacacctggctttcggctgcatcctgagcgagttctgggtcctcagcatcgcatccgccattcagaacaggaaggacattgtcgttatagtgggtataagtaacatggatcctagcaagattgctcacacagagtatccagtcaataccatcatcatccatgaggactttgataacaactccatgagcaacaacatagccctcctgaagacagacacagcgatgcattttggcaacctggtccagtccatctgcttcctcggcagaatgctgcatacaccaccagtcttgcagaactgctgggtgtcaggatggaatcccacatctgcagaaatcacatgacgatgggtgtcctgaggaaaatcttcgtgaaagatcttgacatgtgtcccctatacaaactccagaagacagaatgcggcagccacacgaaagaggaaaccaagactgcctgcttgggggacccaggaagcccaatgatgtgccagctacagcagttcgatctgtgggttctgagaggagtcctgaacttcggtggtgagacgtgccctggcctgtttctgtacaccaaggtggaagactacagcaaatggatcacatccaaggctgagagggccggccctcccctgtcctcactccaccactgggaaaagttgatttctttctcccaccatggaccaaatgccaccatgacacagaagacatattctgattctgaactgggccatgttggatcatacttgcagggacaaagaaggaccatcacgcattcacgactaggaaacagctctagagatagtctagatgttagggagaaggatgtaaaggaatcaggcaggtctcctgaggcgtctgtacaacccttatactatgactattacggtggggaggtgggggaaggtaggatttttgcaggtcagaacaggttgtatcagcccgaagaaatcatcttggtttccttcgtgcttgttttcttttgcagcagtatctagtccaggagctaccccaccaaactgaagagtaaactgagaatgctgagtgccaggcattcaccatgctgttttgatgtctgtttttgatagttgcacactggggctgccacggataagcccatggcatacactgggctggctctccctcctctatccctctcccaggtgtgggaaggtcactttcactatgcttgtgaactaaatgctggctaacaagtgtcaaaccaaaa

SEQ ID NO: 276129 - DNA, 1434 bp, Homo sapiens
ttctattgagtgtttgctgtgtgccaggcactgtgctgtgctcagcacgtgttacaggcattaactgtgttcccaccttggctcagagaggatttggtcacttgccagggtcccatatctagctaatgatgccaagcttctactccgtcactttaagttagataaagtgtatgtggcagaattcccaagtcccagaggactgctccattgggagtagggaagacccagagcacggccagccaggctggtaagcagttgccaggtggcaggaagtggcttacactaagggttgaagcaaggcagagaagggaaaatgtgagcatttcaggacaaaacagaaacaaacaccaacatttcaggaatgagaagccagaagagagggaaggtttggccaaaggactggaaaggggcaagaaaatgaaatatgaaccaggaagctataggcaatcagcagaagtccacagctaatttgcataataaaaggaaaagtcatcttgttggaatttgtggtggtggctgcctagatttgaaattgtatcctataatttgccccatttccagtgagaaccagcgtaaaacatttctagaacaaacagtatattgcacaaggatagatttacaacaaaaactagtttttctaagacttgaagccttctgtcttttatcacagggggacccaggaagcccaatgatgtgccagctacagcagttcgatctgtgggttctgagaggagtcctgaacttcggtggtgagacgtgccctggcctgtttctgtacaccaaggtggaagactacagcaaatggatcacatccaaggctgagagggccggccctcccctgtcctcactccaccactgggaaaagttgatttctttctcccaccatggaccaaatgccaccatgacacagaagacatattctgattctgaactgggccatgttggatcatacttgcagggacaaagaaggaccatcacgcattcacgactaggaaacagctctagagatagtctagatgttagggagaaggatgtaaaggaatcaggcaggtctcctgaggcgtctgtacaacccttatactatgactattacggtggggaggtgggggaaggtaggatttttgcaggtcagaacaggttgtatcagcccgaagaaatcatcttggtttccttcgtgcttgttttcttttgcagcagtatctagtccaggagctaccccaccaaactgaagagtaaactgagaatgctgagtgccaggcattcaccatgctgttttgatgtctgtttttgatagttgcacactggggctgccacggataagcccatggcatacactgggctggctctccctcctctatccctctcccaggtgtgggaaggtcactttcactatgcttgtgaactaaatgctggctaacaagtgtcaaaccaaaa

SEQ ID NO: 276130 - DNA, 851 bp, Homo sapiens
aacattcttcccaaggcagtagaagaaatccttctgttgaactctactgtgtcaggccagcctgagttcatttctccttgagcaggaacagttcatggacgaactctgaggaccattctgaggacaagaggcatccagtgtcatgagtggaacatgcattttatggctacagagttaaggcaagggttgaattccacgagtcaaaaagcagcccttttcagagacccaactctctggggtgctcaggggcttgggctggattgagaagaaaactgacaagagtaagctgccctctcttctctggccatctcacaaaccacagtgcgggccaactggtcctgcctctttaccacacagaaccaagcactagggataagacagctgcccatggtgtccgcggcgggtctctctggggatggcaagatgcgaggggtgctcctggtgctgctcggccttctctactcttccaccagaaggacattgtcgttatagtgggtataagtaacatggatcctagcaagattgctcacacagagtatccagtcaataccatcatcatccatgaggactttgataacaactccatgagcaacaacatagccctcctgaagacagacacagcgatgcattttggcaacctggtccagtccatctgcttcctcggcagaatgctgcatacaccaccagtcttgcagaactgctgggtgtcaggatggaatcccacatctgcagaaatcacatgacgatgggtgtcctgaggaaaatcttcgtgaaagatcttgacatgtgtcccctatacaaactccagaagacagaatggtaacagttaccattctgtgttggagcggccg

SEQ ID NO: 276131 - DNA, 481 bp, Homo sapiens
agtctaacataattttgggattcaaaaatgccactgagcatcttttagggtgaagaagacacactaggcaaaagaaagaaaaggggttgcggatagcgttagtgatgatcgagacagacagcccacaggagagagggtcctgaggtctccttgccccggcagtgaggccccgcacctgctccgcaggttgtggcgtccagaaagcttccgttttctacggtcctgaccccaaggagggcttggtcagcagcatggagttcccgtgggtggtgtcgctgcaggactcccagtacacacacctggctttcggctgcatcctgagcgagttctgggtcctcagcatcgcatccgccattcagaacaggccagtgcccctgcctttggggcccgcaacatcgccgggggtgagggtgggggcgaccctgtttcctgctcagcctggggaggccctgaaaggtgcattctggggggacagggcttt

SEQ ID NO: 276132 - DNA, 1801 bp, Homo sapiens
aacattcttcccaaggcagtagaagaaatccttctgttgaactctactgtgtcaggccagcctgagttcatttctccttgagcaggaacagttcatggacgaactctgaggaccattctgaggacaagaggcatccagtgtcatgagtggaacatgcattttatggctacagagttaaggcaagggttgaattccacgagtcaaaaagcagcccttttcagagacccaactctctggggtgctcaggggcttgggctggattgagaagaaaactgacaagagtaagctgccctctcttctctggccatctcacaaaccacagtgcgggccaactggtcctgcctctttaccacacagaaccaagcactagggataagacagctgcccatggtgtccgcggcgggtctctctggggatggcaagatgcgaggggtgctcctggtgctgctcggccttctctactcttccaccagttgtggcgtccagaaagcttccgttttctacggtcctgaccccaaggagggcttggtcagcagcatggagttcccgtgggtggtgtcgctgcaggactcccagtacacacacctggctttcggctgcatcctgagcgagttctgggtcctcagcatcgcatccgccattcagaacaggaaggacattgtcgttatagtgggtataagtaacatggatcctagcaagattgctcacacagagtatccagtcaataccatcatcatccatgaggactttgataacaactccatgagcaacaacatagccctcctgaagacagacacagcgatgcattttggcaacctggtccagtccatctgcttcctcggcagaatgctgcatacaccaccagtcttgcagaactgctgggtgtcaggatggaatcccacatctgcagaaatcacatgacgatgggtgtcctgaggaaaatcttcgtgaaagatcttgacatgtgtcccctatacaaactccagaagacagaatgcggcagccacacgaaagaggaaaccaagactgcctgcttgggggacccaggaagcccaatgatgtgccagctacagcagttcgatctgtgggttctgagaggagtcctgaacttcggtggtgagacgtgccctggcctgtttctgtacaccaaggtggaagactacagcaaatggatcacatccaaggctgagagggccggccctcccctgtcctcactccaccactgggaaaagttgatttctttctcccaccatggaccaaatgccaccatgacacagaagacatattctgattctgaactgggccatgttggatcatacttgcagggacaaagaaggaccatcacgcattcacgactaggaaacagctctagagatagtctagatgttagggagaaggatgtaaaggaatcaggcaggtctcctgaggcgtctgtacaacccttatactatgactattacggtggggaggtgggggaaggtaggatttttgcaggtcagaacaggttgtatcagcccgaagaaatcatcttggtttccttcgtgcttgttttcttttgcagcagtatctagtccaggagctaccccaccaaactgaagagtaaactgagaatgctgagtgccaggcattcaccatgctgttttgatgtctgtttttgatagttgcacactggggctgccacggataagcccatggcatacactgggctggctctccctcctctatccctctcccaggtgtgggaaggtcactttcactatgcttgtgaactaaatgctggctaacaagtgtcaaaccaaaa

SEQ ID NO: 276133 - DNA, 1623 bp, Homo sapiens
aacattcttcccaaggcagtagaagaaatccttctgttgaactctactgtgtcaggccagcctgagttcatttctccttgagcaggaacagttcatggacgaactctgaggaccattctgaggacaagaggcatccagtgtcatgagtggaacatgcattttatggctacagagttaaggcaagggttgaattccacgagtcaaaaagcagcccttttcagagacccaactctctggggtgctcaggggcttgggctggattgagaagaaaactgacaagagtaagctgccctctcttctctggccatctcacaaaccacagtgcgggccaactggtcctgcctctttaccacacagaaccaagcactagggataagacagctgcccatggtgtccgcggcgggtctctctggggatggcaagatgcgaggggtgctcctggtgctgctcggccttctctactcttccaccagaaggacattgtcgttatagtgggtataagtaacatggatcctagcaagattgctcacacagagtatccagtcaataccatcatcatccatgaggactttgataacaactccatgagcaacaacatagccctcctgaagacagacacagcgatgcattttggcaacctggtccagtccatctgcttcctcggcagaatgctgcatacaccaccagtcttgcagaactgctgggtgtcaggatggaatcccacatctgcagaaatcacatgacgatgggtgtcctgaggaaaatcttcgtgaaagatcttgacatgtgtcccctatacaaactccagaagacagaatgcggcagccacacgaaagaggaaaccaagactgcctgcttgggggacccaggaagcccaatgatgtgccagctacagcagttcgatctgtgggttctgagaggagtcctgaacttcggtggtgagacgtgccctggcctgtttctgtacaccaaggtggaagactacagcaaatggatcacatccaaggctgagagggccggccctcccctgtcctcactccaccactgggaaaagttgatttctttctcccaccatggaccaaatgccaccatgacacagaagacatattctgattctgaactgggccatgttggatcatacttgcagggacaaagaaggaccatcacgcattcacgactaggaaacagctctagagatagtctagatgttagggagaaggatgtaaaggaatcaggcaggtctcctgaggcgtctgtacaacccttatactatgactattacggtggggaggtgggggaaggtaggatttttgcaggtcagaacaggttgtatcagcccgaagaaatcatcttggtttccttcgtgcttgttttcttttgcagcagtatctagtccaggagctaccccaccaaactgaagagtaaactgagaatgctgagtgccaggcattcaccatgctgttttgatgtctgtttttgatagttgcacactggggctgccacggataagcccatggcatacactgggctggctctccctcctctatccctctcccaggtgtgggaaggtcactttcactatgcttgtgaactaaatgctggctaacaagtgtcaaaccaaaa

SEQ ID NO: 276134 - DNA, 976 bp, Homo sapiens
aacattcttcccaaggcagtagaagaaatccttctgttgaactctactgtgtcaggccagcctgagttcatttctccttgagcaggaacagttcatggacgaactctgaggaccattctgaggacaagaggcatccagtgtcatgagtggaacatgcattttatggctacagagttaaggcaagggttgaattccacgagtcaaaaagcagcccttttcagagacccaactctctggggtgctcaggggcttgggctggattgagaagaaaactgacaagagtaagctgccctctcttctctggccatctcacaaaccacagtgcgggccaactggtcctgcctctttaccacacagaaccaagcactagggataagacagctgcccatggtgtccgcggcgggtctctctggggatggcaagatgcgaggggtgctcctggtgctgctcggccttctctactcttccaccagttgtggcgtccagaaagcttccgttttctacggtcctgaccccaaggagggcttggtcagcagcatggagttcccgtgggtggtgtcgctgcaggactcccagtacacacacctggctttcggctgcatcctgagcgagttctgggtcctcagcatcgcatccgccattcagaacaggaaggtaggatttttgcaggtcagaacaggttgtatcagcccgaagaaatcatcttggtttccttcgtgcttgttttcttttgcagcagtatctagtccaggagctaccccaccaaactgaagagtaaactgagaatgctgagtgccaggcattcaccatgctgttttgatgtctgtttttgatagttgcacactggggctgccacggataagcccatggcatacactgggctggctctccctcctctatccctctcccaggtgtgggaaggtcactttcactatgcttgtgaactaaatgctggctaacaagtgtcaaaccaaaa

SEQ ID NO: 276135 - DNA, 385 bp, Homo sapiens
gatttgggggcaataatactgtctgccacatgctgtcatgaatgctatctagttttagtctcttgataactctgtgaggtaggtattattatcctcattttacagagtggaaaattgaggtttggtgtggctaaccaacttgcccaagatgtagccagtaataagcacagctgcctgaatcgaagccagtaccaatggtatatagccagccttgggcttcttgaggactcattttcatatagatgttgtcattcagtaaacattgataaagcatctactatgtgcctggcgctgtgctgggcattggaaacacagtgatgtgcaagacagacactcttcctactctcatggagtttagagtccaaaggaagagagaggcagacag

SEQ ID NO: 276136 - DNA, 395 bp, Homo sapiens
gttttatgaaacttgcctgaaatcacttactttaaaaatgacataaagttctacctcttgggagcttggtaaaaataaaatttctcaaagaaaaattcaatgggcactacatctccagtacctaacagtacttggctcataaaaggctctcaataagcatttgttgaatgaatactactgaagaatctggctaatgctgcacatataagcagcaccactggaaatatagaacaggttctgaaggcaaagtctgagcaattacttgcaaagtcacacctgtggcaacagcctttgtttgctgctgatatgttggggccatttgcacatcaagctggacaccatcctacttctcagaagtcatcatctataattacatccttcctgagagtctaaaa

SEQ ID NO: 276137 - DNA, 186 bp, Homo sapiens
tggaattacaggcatgagccactgtgcccagtctctcatacatttattttaagggttgtgtactattccgttccgtgaatatatcatgatttatttatacatgctactattttgcagctataaatatttctgcaattctgtaatgaatgccttatgattattccctcattacctcagtatttgggc

SEQ ID NO: 276138 - DNA, 252 bp, Homo sapiens
tctagaggactccccgcaaggtgaatgatgagacatttgaattttttgttcccatggaagaagtaaagaagaggtcactagatgttgcagtgaaaaatagtaggccacttggctcacacagaagaaaggagttaggaaaagtactgattgacttatcaaaagaagatctgattaagggcttttcacaatggtatgagctgactccaaatggacagcccagaagctgatgatgagaattcttatcactcacct

SEQ ID NO: 276139 - DNA, 596 bp, Homo sapiens
cctacccataaattgcaagaaccaattgcaaaatagatataaaggtgtgtgtctgtatgtgtttgtgcttctgggcacaatttttcatgacaatattgaaaatgaaagggtaaataaaaatatcagtctaagcaacttatttgacaacatggacataaacaccaaatgaaaaagctaagaaattaaaatggttgtttctagaaagagacttggaagtgcagaggctgaggcagagcagagcatttaaatatctatacaaaaattcaaataataaaaacatttagttaaagttgggaatcaaaataaataaccaccaagtggaaataagcaaataaatgaaaaaatatccataaaagcaaaactatatagccattaaaaaagaaagaagtccatctagattattttgaattttaacaatgttccagatttattaatttaaaaagtggcaattcatgctatgcatattttagggactgaagcatcaacagtgaacaaaaaaaccagtctgtgtcttccagactttacatatgaatgagagaaagcataaagtatgtacacattaaaaaaattatatttcaaaaagtcatgaattctac

SEQ ID NO: 276140 - DNA, 445 bp, Homo sapiens
ctcccaaagtgctgggattacagtctgagccaccacgcctggcccatatgacaaatatttatgaagtgttttccacagagtagtatggaataactctgggtgtgtgcaagatgaactgagctcagtcacaatacttttttttcccctaatgttaagaattattggctgggcagggtgactcattcctttaatctcagcactttggaaggcagaggtgggaggatcaggtgagcccaggagtttgagaccagcctggatgacaaagtgagaccttgtctatacaaaaaattagctgggcatggtggtgtgacctgtggtcccacctacttgagaggctgagttgggaggatggcttgagccctgggaggttgaagctgcggtgaaccttgatagcgccactgcactccaacccaggcaacagagtgagaccctgtctcaaaaagaa

SEQ ID NO: 276141 - DNA, 443 bp, Homo sapiens
atagaatggataaataaatcaaggaatggataaataaatcaatggaatattgcacagcaataaaaaggatgaactatcgatacatacaaccacatggatgacttttatcaatataatgttgaatgaaaatcagggccgggcgcagtggctcatgcctgtaatctcagcattttgggaggctgtggtgggtggattacttgaggtcaggagttcgagaccagtgtggctaacatggtgaaaccccgtctctactaaagacacaaaaaaattagccgggcatggtggtgggtgcctgtaatgccagttacttgggatactgggaggctgaggcaggagaattgcttgaacccaggaggcagaggttgcagtgagccaagatcatgccattgcacgccagcctgggcaacaggagcaaaactccgtctcaaaaaaacaaaaaaaca

SEQ ID NO: 276142 - DNA, 238 bp, Homo sapiens
aagcatatttgaagggacacaggaatttctcagaacagaagggcaaacagcccagtcagggctcatgggaactgggaattagaaagctttctgcctcgccgagcttcataatctctgggcctccacttcctctcctcccctccctgggctggctgcctctgctcacccattttgcccttgtctcgtcatgccactggcccccaactccacgtcattgcctctcagcccaggggtcacc

SEQ ID NO: 276143 - DNA, 1296 bp, Homo sapiens
tgttgagttgatccttttatcattatataatgtatttctttgtcttttgtaacaatttttaacctgaagtctatattgtctgatattagtatagttactccagctctcttgtttactgtttgcatgaaatatctttccatcctttcactatcaacctatttctgtctttggatctaaggtgtgtctcagcatatatctcaatcatttcttttttaaatccattctcccaatctcctcctcttaattgcagagtttaatcaatttacatttaatgtaattgctgataaagaaggacttctgctattttctaggtcttatacaggcaaccctttcttttttgtcctgtgctttattgcacattgctgatattgcattttttttacaaactaaagattcatggcaaccctgtatcaagcaagtctatcagcatcatttttccaacagcatgtgctcacttcctgtctcttgtgtcacgttttggtaattctcacaatatttcaaactttttcatgattattatatctggtatagtgatttgtgatctttgctatttccagtattctgtttggctttcaacagtttgattataacatgtcttggtgtagatgtctttatcctactttggagtcacagaacttcttggatgtgtagacttatgtctttcattaaatttgattagtgtttgctcattattacttcaaatattctttctgcccctttctctctcattctgggactaccattttgtgtatattggtacacttaatggtgtttcacagatttcttaggctctgtttatttttctttattcttttttctgtttctcagattggataatctcaattgacctatattcaaattagctaattattctgcctgttcaaatctgttctgtcactgtacttttcagctccagaatttctatttgattccttttttataattttatctctttactgatactgtctacttaggacactgtttttcatggtttcctttagttctttgcccatagttcctttagctcttgaggatatgatttaaagtccccattaaaaatgtcaaatgtcttggcttcctttgggacagtttctatcagtttcttttttcctgtgtatgggtcattgtttcttgtttcttatgcctcatattttttgcattttgaatattataaggtggcaactatgaaaatcagattctctccccacccctgggtttgttgttgctgtctgttatagctgttatttgttcagtgacttttttgaactgattttataaagtctattttttgtcata

SEQ ID NO: 276144 - DNA, 1195 bp, Homo sapiens
aggcagttggtatgctccaggatctgagcagctccttctagcatccttcatccttcaggtaccagccatccagacagtgcttgagctgcagaaactgagaccagacctctggcctggccctccccaggggcctcctttcgtatagtcactgcttctgcatcagatactttcagctgcaactccctactgggtggggcacccatttcaggcagaaggttttggtaccctccactgaccctacacccagggctgctactgccgcttgtggcttcaggatgaaaggtgagaccccggtgaacagcactatgagtattgggcaagcacgcaagatggtggaacagcttaagattgaagccagcttgtgtcggataaaggtgtccaaggcagcagcagacctgatgacttactgtgatgcccacgcctgtgaggatcccctcatcacccctgtgcccacttcggagaaccccttccgggagaagaagttcttctgtgctctcctctgagctcccctgtcccttctcacaactcctcccttttccctctcctgggcccttccttaggtcagtaattgttgtgagccccttaggctccttgcatcccatccctaacccttgcctgaccatgtgaggttatctgaagcacaaggcccaccctcacctatctgtcgaccccatttcctaccacctttgtggccgaccccaagcaccccagagatatgaggcaccctttgctccacccacagcagggccccgtcagactctgccagcgcgtcctgcccgcttccctcggtgacctgctcagacaatggagagggatgggccaggttcttgctctcagtctcacctggagctactgggagggtaaagccatttgaagaataaagtcatccagagcctcagaaaaaaaaaaaaaaagacaaaaaaagaaaagaaaaaaaaacaaaaaaaaacaagaaaaaagagggggaaacaatagaacaaacaaaaaaaagggcgggcgcacacacgaaaaaacaccgaggggacacacaaaaagcaaagcacaacacatgatggaaacaaagcgcggccccaaaaaggggagccagaaacgacagaagaagaagagggcgcaaaaaaacgaacgtcggggagaaacagacaaggcaccaacggaagacaaactactgtggggggaacaaacggagacaacacgc

SEQ ID NO: 276145 - DNA, 835 bp, Homo sapiens
aggcagttggtatgctccaggatctgagcagctccttctagcatccttcatccttcaggtaccagccatccagacagtgcttgagctgcagaaactgagaccagacctctggcctggccctccccaggggcctcctttcgtatagtcactgcttctgcatcagatactttcagctgcaactccctactgggtggggcacccatttcaggcagaaggttttggtaccctccactgaccctacacccagggctgctactgccgcttgtggcttcaggatgaaaggtgagaccccggtgaacagcactatgagtattgggcaagcacgcaagatggtggaacagcttaagattgaagccagcttgtgtcggataaaggtgtccaaggcagcagcagacctgatgacttactgtgatgcccacgcctgtgaggatcccctcatcacccctgtgcccacttcggagaaccccttccgggagaagaagttcttctgtgctctcctctgagctcccctgtcccttctcacaactcctcccttttccctctcctgggcccttccttaggtcagtaattgttgtgagccccttaggctccttgcatcccatccctaacccttgcctgaccatgtgaggttatctgaagcacaaggcccaccctcacctatctgtcgaccccatttcctaccaccccgtcagactctgccagcgcgtcctgcccgcttccctcggtgacctgctcagacaatggagagggatgggccaggttcttgctctcagtctcacctggagctactgggagggtaaagccatttgaagaataaagtcatccagagcctcag

SEQ ID NO: 276146 - DNA, 432 bp, Homo sapiens
atgagtattgggcaagcacgcaagatggtggaacagcttaagattgaagccagcttgtgtcggataaaggtaggtgggaccctggctggctcccattagttggccaggctgtgctgtgctgcaggttcccaaagctcaagataagagatgcgttctttccttcactccctgaggtcaggggaggagtctggggctctgtagagagagctgtccccaggcctctgggggggatgagggagaagacaagtcgtaaggagccctggagatggcaaaagagaacccatttggggagggaggctgcagtccccttcagaggtcctggctaacaatacccttcctggctgtgtcccaggtgtccaaggcagcagcagacctgatgacttactgtgatgcccacgcctgtgaggatcccctcatcacccctgtgcccac

SEQ ID NO: 276147 - DNA, 899 bp, Homo sapiens
aggcagttggtatgctccaggatctgagcagctccttctagcatccttcatccttcaggtaccagccatccagacagtgcttgagctgcagaaactgagaccagacctctggcctggccctccccaggggcctcctttcgtatagtcactgcttctgcatcagatactttcagctgcaactccctactgggtggggcacccatttcaggcagaaggttttggtaccctccactgaccctacacccagggctgctactgccgcttgtggcttcaggatgaaaggtgagaccccggtgaacagcactatgagtattgggcaagcacgcaagatggtggaacagcttaagattgaagccagcttgtgtcggataaaggtgtccaaggcagcagcagacctgatgacttactgtgatgcccacgcctgtgaggatcccctcatcacccctgtgcccacttcggagaaccccttccgggagaagaagttcttctgtgctctcctctgagctcccctgtcccttctcacaactcctcccttttccctctcctgggcccttccttaggtcagtaattgttgtgagccccttaggctccttgcatcccatccctaacccttgcctgaccatgtgaggttatctgaagcacaaggcccaccctcacctatctgtcgaccccatttcctaccacctttgtggccgaccccaagcaccccagagatatgaggcaccctttgctccacccacagcagggccccgtcagactctgccagcgcgtcctgcccgcttccctcggtgacctgctcagacaatggagagggatgggccaggttcttgctctcagtctcacctggagctactgggagggtaaagccatttgaagaataaagtcatccagagcctcag

SEQ ID NO: 276148 - DNA, 1065 bp, Homo sapiens
tttttttaacacttggaagctcctcaggagcagaaacaacgtgtggttacctttttgtattcctgatggtgctcagcatagaatgcatcacatgacatgtgtcaatatttatttgatgaatgatctgacatgacatggaataatccaggaatgccaaggcatggattcaccacttctgaaaaaacctgggaaactgctacaaaaggggttgttctgatgatccactggcaaagaggaggcacaaaaacagccaggctccagaattcactgaggtgaaatgagttaatgaaaatcaaaacagaggagcagcaagaccagtggaaataactccaatatccaaggagtgaccaactggcacagatcatcccccgctctactctccctccaaaagccagaccactgggaagtgtccacggcggtcagatgccatcaggagctgaaatgaaatggactatgcggtgtatgtcttcctttgtgtggggagaagggacttgtccataatgcgagtctgctggcccaggtcatgaatgacaggcacagctcccagccccaaatcatcacaagggtccatgacctattttcaacatttcaacaagcccaatccagcctgggcagcatggtgaaaccccgtctctacaaaaaatacaaaaattagctaggcatggtgatgcacgcctgtagccccagctactcaggaggctgagtggaagcaatttatagggtgcaagcggcagcactgtaagaaagtttgtgaggaaggagagttttgtaaccggagtcaaatccagaggggcttcctggcagagaaacaaaccacaggtcaggccaatgatggtcccagctctagcggggccctgccctgggcaatgcacattttagtaagaggtaagccaaggcctctgggcccccaacccttcactagtgctagtgtgctgaacccctggctcaggaagaagggaggtgctacaggggcaggccttggcatggaaggaattgggagctgctcggtataatgcaaacctttaactgctcttttgcctcttccattttactgttcctagagtc

SEQ ID NO: 276149 - DNA, 589 bp, Homo sapiens
aaagcaaaagcacttttaaaatgagttaagtggaagacgaacagacaaatgaggtaacttctataaagatggaggttgcttctggctcatcagccatcgttgatggtaaccagtcctacaattctcattaggcagttctgttaccccactatttccttggggtctgttgtgctaaggacaggattggttgggtaaaggggtgtggcacaaataaccctcaggaatacaggccacagagctaatgaagggccccaaggaaagaaagacctgcccatcagcgatgaattctctcccccagtgccacagacctgagggcacgtgacccaggaatgtgcatccaaagataatactaccttcagagaactctacttataggctgtggtttttcaagaaaaaggaaaagattcataattcattgagctctttccttgtgagaagaaaggccactcttttgtgtgctgaagttggacaacagttcccaaggaagctgaattctagctgaatattgttattgggttttgcactatgccctttatgttgtcattaatcaataaatacgtgtggaacaaatgattaactagaaaaaaaa

SEQ ID NO: 276150 - DNA, 573 bp, Homo sapiens
aaagcaaaagcacttttaaaatgagttaagtggaagacgaacagacaaatgaggtaacttctataaagatggaggttgcttctggctcatcagccatcgttgatgtgccacagacctgagggcacgtgacccaggaatgtgcatccaaagataatactaccttcagagaactctacttatagtggtgaaattgaatcactgaagcagctgaggcagagagcttttccttcaggattcacggcctatttctcagttctgggaagacaactctaacaactcaacagagtgaagagagataaagatgttgggaatgactgatttcaaacaatcaaaactgctttggggatgaggatgaagttgggacattactgccttgtataccacatactataatatttattatgtctattgtttattgtgtgtgtccttctttagaattttaactccccaagggcaaagatccctgactgttttgcttatcaatgtatccaaaaggcctaaaacagagccttgtaccctatacacactctgcaaatatttgctgaattgaataaaaggctgccgatctaaaaa

SEQ ID NO: 276151 - DNA, 396 bp, Homo sapiens
aaagcaaaagcacttttaaaatgagttaagtggaagacgaacagacaaatgaggtaacttctataaagatggaggttgcttctggctcatcagccatcgttgatgtgccacagacctgagggcacgtgacccaggaatgtgcatccaaagataatactaccttcagagaactctacttataggctgtggtttttcaagaaaaaggaaaagattcataattcattgagctctttccttgtgagaagaaaggccactcttttgtgtgctgaagttggacaacagttcccaaggaagctgaattctagctgaatattgttattgggttttgcactatgccctttatgttgtcattaatcaataaatacgtgtggaacaaatgattaactagaaaaaaaa

SEQ ID NO: 276152 - DNA, 1032 bp, Homo sapiens
  misc_feature (688)..(688): n is a, c, g, or t
  misc_feature (777)..(777): n is a, c, g, or t
  misc_feature (885)..(885): n is a, c, g, or t
  misc_feature (934)..(934): n is a, c, g, or t
  misc_feature (948)..(949): n is a, c, g, or t
  misc_feature (960)..(960): n is a, c, g, or t
  misc_feature (972)..(972): n is a, c, g, or t
  misc_feature (976)..(976): n is a, c, g, or t
  misc_feature (1005)..(1005): n is a, c, g, or t
  misc_feature (1015)..(1015): n is a, c, g, or t
  misc_feature (1018)..(1018): n is a, c, g, or t
  misc_feature (1021)..(1022): n is a, c, g, or t
aagttgaggaggagtgtgagtggggctactgtggtgggatctccagggcagccccatccagcattttcattcagggtcccggagcgggtgtgggcagtggtttcgtggtctgctgccagccagggcaggggagcccttatgaagctcctgaggtggaaccaggcatctgagcccaggcttgttgcttcttagagttgaccaggacagcgctttgcacaacgatctccagatcctcaaagagaaagaaggagccgacttcattctacttaacttttcctttaaagataactttccctttgacccaccatttgtcagggttgtgtctccagtcctctctggagggtatgttctgggcggaggggccatctgcatggaacttctcaccaaacagggctggagcagtgcctactccatagagtcagtgatcatgcagatcagtgccacactggtgaaggggaaagcacgagtgcagtttggagccaacaaatctcaatacagtctgacaagagcacagcagtcctacaagtccttggtgcagatccacgaaaaaaacggctggtacacaccccccaaagaagacggtcaacttgtctggagtatactccagacaagttgaccgcccagaatatgaggctgacttgggcacactaggggaataccccaaaggcctgaaggaggtgccactggnctgccagcacttcaggaaggcacagggccccacacccccgagatccaagctgcactggctggcagggggcagggcggggggtggcgagnacacagtcccgtgtgtcccagcaccggtgccaccctccttagccccgggcaggcagtacgtacatgcggaccccgcctctcaaagcacgtttatggaaatgaacaggntggggtggcccgcgctcgccggtcacatgttggctcgttcccgctgcanccgcgagttgtagnngcgagacacgntgttccaggcgnccangtagcggtccatgcacatggcgatgcacntcgctcgagntgnccnnggagccccct

SEQ ID NO: 276153 - DNA, 530 bp, Homo sapiens
aagttgaggaggagtgtgagtggggctactgtggtgggatctccagggcagccccatccagcattttcattcagggtcccggagcgggtgtgggcagtggtttcgtggtctgctgccagccagggcaggggagcccttatgaagctcctgaggtggaaccaggcatctgagcccaggcttgttgcttcttagagttgaccaggacagcgctttgcacaacgatctccagatcctcaaagagaaagaaggagccgacttcattctacttaacttttcctttaaagtaagacttttcttttccagtctctccctctggcctaggctgcccagtctgcctgacagtcctgtggaggatgctggcctccctcccctgattgtcgtctctctctctctcaggataactttccctttgacccaccatttgtcagggttgtgtctccagtcctctctggagggtatgttctgggcggaggggccatctgcatggaacttctcaccaaacaggtgagcctgtctctccccttggccag

SEQ ID NO: 276154 - DNA, 191 bp, Homo sapiens
tgacagcctgcagaaggtgaggggcagtaaggccacagctagccatggcctgatctggtggcttcctctccccagtctcaatacagtctgacaagagcacagcagtcctacaagtccttggtgcagatccacgaaaaaaacggtgaggctggagccaggactcaggagattcggacacttgccacacccag

SEQ ID NO: 276155 - DNA, 3086 bp, Homo sapiens
agcgtcctgcgcgggtagcccctgggagcacgcggcaccgagtcacgtgagaggggagcgcaggcgaaggggcgtcgcgcgcaagcacgcacgacatacgcaaactcgcactgaggcgcccacagagcgcctgcctggacgagctgagctgcgagttcctgctggctggggccggaggggccggggcgggggccgcgcccggaccgcatctccccccacgggggtcggtgcctggggatcctgtccgcatccactgcaacatcacggagtcataccctgctgtgccccccatctggtcggtggagtctgatgaccctaacttggctgctgtcttggagaggctggtggacataaagaaagggaatactctgctattgcagcatctgaagaggatcatctccgacctgtgtaaactctataacctccctcagcatccagatgtggagatgctggatcaacccttgccagcagagcagtgcacacaggaagacgtgtcttcagaagatgaagatgaggagatgcctgaggacacagaagacttagatcactatgaaatgaaagaggaagagccagctgagggcaagaaatctgaagatgatggcattggaaaagaaaacttggccatcctagagaaaattaaaaagaaccagaggcaagattacttaaatggtgcagtgtctggctcggtgcaggccactgaccggctgatgaaggagctcagggatatataccgatcacagagtttcaaaggcggaaactatgcagtcgaactcgtgaatgacagtctgtatgattggaatgtcaaactcctcaaagttgaccaggacagcgctttgcacaacgatctccagatcctcaaagagaaagaaggagccgacttcattctacttaacttttcctttaaagataactttccctttgacccaccatttgtcagggttgtgtctccagtcctctctggagggtatgttctgggcggaggggccatctgcatggaacttctcaccaaacagggctggagcagtgcctactccatagagtcagtgatcatgcagatcagtgccacactggtgaaggggaaagcacgagtgcagtttggagccaacaaatctcaatacagtctgacaagagcacagcagtcctacaagtccttggtgcagatccacgaaaaaaacggctggtacacacccccaaaagaagacggctaaccctggagtatcacccttcctccctccccaggcaccactggaccaattacctttgaatgctgtatttggatctcacgctgcctctgtggttccctccctcatttttcctggacgtgatagctctgcctattgcaggacaatgatggctattctaaacgctaaggaaaaaaaacaaacacagaactgtttcaagtactcaagactgacttacagaccaaccaaccaccttgctggaacccttgctagcaggcattcttataaaagaaactttcgagcctccttatattgctggaaactcagctgtgctccagactagagcctccttacctatgctatggatttttaatttattttctcttatttcatgtacactgctttttttggttacagtgtatgatggatgtgtatgaaaaaaatgtatctttgggaaaacaattacagtttgttaatttgaagatgctggtcttgactcatctttatttttattcgcacatcccaccccatcccctgaactacttgggaggtggggaggggtacgagtccactgttgctttggtagagatgagaggccgcattttgctgctaaagcaagagaaacttggagctgaagcacacacctggtctgcccctagatttctcctcaaggcctctggagcaaccagcacttgcccccttggaatgcagagcctggcctgccaaactacaatgtggtaggctgaaacgatggtgttaattcttaggactacttttctagtcacagatgttttcaaatttctaagaaaaagaaaatgaggctcaagaggctgcttcgtagaattccttttgaatgaattgagtggggatggggacacagtctccaagtgtgtatgtggtcttttctgatctcagctgtgtggctgcaactcttcgctgttcattggttcctctcctggaaagtggcttctaaccagcactggatggtgatcattggtaagctttgctcacctccctctctcttgcttcatttggctttatcaaaaagaacagacctagctctgaatttgtttggcttgggaaattatggattctttcaagccactcccacaaggtgggtcctactagaaagggttagcattttaaggggggttgttctatacacctgtgtccttaccccaggctcaggaactgccagggagggaagatgaggtggggagtctgtactgagatggaactgtcagtgctgtgttgtatgtacttgctgttgtaaaagtttgggcatgactttgcatctagcgggtgctgcctgcatctctttgtctgtaagcttgctctgggactcagcctcttaggacctacgatgccagcagctctcattaacagtgaaatgacagaggccaaagatggccaagtgaagacccaagtctcagaaaacccagacttgggacaactgcctgggaactaggatgctagagcagttctgtaatgctttgagacacagcaattttcacattggccattctttcccctcccctaccccttttcttttgagggacttttaatgtttgctgctttaggtggatggagagtccaccagtcccactcaatgctgctctaactctacccacacccacctaattaggggtgctaataaaacatgctgaggttgagataaagacgggacataaggggaaaattcattccatagagctgaaatctggttttcaaggcctctgtggctttcttctgaacttaccaccagccctggctggaatgtagattgtgtttttagtaatgtgtactgtgagctgtcttctgtataatgtattttgtaatgtatttttctcatctaccaaaggatgaaacaaataaaattatttaaataaatagacacaataaaat

SEQ ID NO: 276156 - DNA, 2943 bp, Homo sapiens
  misc_feature (154)..(154): n is a, c, g, or t
ggggggggcctgtcccggaggtggcggcggcgccatcttggcgaaggggggatcaggaagtgcggaccgcggcggcggcggcggcggcggcggcggcggaccggagcgcaggccggaggtcccggcccgccggccccggagcggagggacgcgnaggatgcagcagccgcagccgcaggggcagcagcagccggggccggggcagcagctggggggccagggggcggcgccgggggccgggggcggcccaggggggggcccggggccggggccctgcctgaggcgagagctgaagctgctcgagtccatcttccaccgcggccacgagcgcttccgcattgccagcgcctgcctggacgagctgagctgcgagttcctgctggctggggccggaggggccggggcgggggccgcgcccggaccgcatctccccccacgggggtcggtgcctggggatcctgtccgcatccactgcaacatcacggagtcataccctgctgtgccccccatctggtcggtggagtctgatgaccctaacttggctgctgtcttggagaggctggtggacataaagaaagggaatactctgctattgcagcatctgaagaggatcatctccgacctgtgtaaactctataacctccctcagcatccagatgtggagatgctggatcaacccttgccagcagagcagtgcacacaggaagacgtgtcttcagaagatgaagatgaggagatgcctgaggacacagaagacttagatcactatgaaatgaaagaggaagagccagctgagggcaagaaatctgaagatgatggcattggaaaagaaaacttggccatcctagagaaaattaaaaagaaccagaggcaagattacttaaatggtgcagtgtctggctcggtgcaggccactgaccggctgatgaaggagctcagggatatataccgatcacagagtttcaaaggcggaaactatgcagtcgaactcgtgaatgacagtctgtatgattggaatgtcaaactcctcaaagttgaccaggacagcgctttgcacaacgatctccagatcctcaaagagaaagaaggagccgacttcattctacttaacttttcctttaaagataactttccctttgacccaccatttgtcagggttgtgtctccagtcctctctggagggtatgttctgggcggaggggccatctgcatggaacttctcaccaaacagggctggagcagtgcctactccatagagtcagtgatcatgcagatcagtgccacactggtgaaggggaaagcacgagtgcagtttggagccaacaaatctcaatacagtctgacaagagcacagcagtcctacaagtccttggtgcagatccacgaaaaaaacggctggtacacacccccaaaagaagacggctaaccctggagtatcacccttcctccctccccaggcaccactggaccaattacctttgaatgctgtatttggatctcacgctgcctctgtggttccctccctcatttttcctggacgtgatagctctgcctattgcaggacaatgatggctattctaaacgctaaggaaaaaaaacaaacacagaactgtttcaagtactcaagactgacttacagaccaaccaaccaccttgctggaacccttgctagcaggcattcttataaaagaaactttcgagcctccttatattgctggaaactcagctgtgctccagactagagcctccttacctatgctatggatttttaatttattttctcttatttcatgtacactgctttttttggttacagtgtatgatggatgtgtatgaaaaaaatgtatctttgggaaaacaattacagtttgttaatttgaagatgctggtcttgactcatctttatttttattcgcacatcccaccccatcccctgaactacttgggaggtggggaggggtacgagtccactgttgctttggtagagatgagaggccgcattttgctgctaaagcaagagaaacttggagctgaagcacacacctggtctgcccctagatttctcctcaaggcctctggagcaaccagcacttgcccccttggaatgcagagcctggcctgccaaactacaatgtggtaggctgaaacgatggtgttaattcttaggactacttttctagtcacagatgttttcaaatttctaagaaaaagaaaatgaggctcaagaggctgcttcgtagaattccttttgaatgaattgagtggggatggggacacagtctccaagtgtgtatgtggtcttttctgatctcagctgtgtggctgcaactcttcgctgttcattggttcctctcctggaaagtggcttctaaccagcactggatggtgatcattggtaagctttgctcacctccctctctcttgcttcatttggctttatcaaaaagaacagacctagctctgaatttgtttggcttgggaaattatggattctttcaagccactcccacaaggtgggtcctactagaaagggttagcattttaaggggggttgttctatacacctgtgtccttaccccaggctcaggaactgccagggagggaagatgaggtggggagtctgtactgagatggaactgtcagtgctgtgttgtatgtacttgctgttgtaaaagtttgggcatgactttgcatctagcgggtgctgcctgcatctctttgtctgtaagcttgctctgggactcagcctcttaggacctacgatgccagcagctctcattaacagtgaaatgacagaggccaaagatggccaagtgaagacccaagtctcagaaaacccagacttgggacaactgcctgggaactaggatgctagagcagttctgtaatgctttgagacacagcaattttcacattggcccttatcgagggtaccggctcgat

SEQ ID NO: 276157 - DNA, 3575 bp, Homo sapiens
  misc_feature (154)..(154): n is a, c, g, or t
ggggggggcctgtcccggaggtggcggcggcgccatcttggcgaaggggggatcaggaagtgcggaccgcggcggcggcggcggcggcggcggcggcggaccggagcgcaggccggaggtcccggcccgccggccccggagcggagggacgcgnaggatgcagcagccgcagccgcaggggcagcagcagccggggccggggcagcagctggggggccagggggcggcgccgggggccgggggcggcccaggggggggcccggggccggggccctgcctgaggcgagagctgaagctgctcgagtccatcttccaccgcggccacgagcgcttccgcattgccagcgcctgcctggacgagctgagctgcgagttcctgctggctggggccggaggggccggggcgggggccgcgcccggaccgcatctccccccacgggggtcggtgcctggggatcctgtccgcatccactgcaacatcacggagtcataccctgctgtgccccccatctggtcggtggagtctgatgaccctaacttggctgctgtcttggagaggctggtggacataaagaaagggaatactctgctattgcagcatctgaagaggatcatctccgacctgtgtaaactctataacctccctcagcatccagatgtggagatgctggatcaacccttgccagcagagcagtgcacacaggaagacgtgtcttcagaagatgaagatgaggagatgcctgaggacacagaagacttagatcactatgaaatgaaagaggaagagccagctgagggcaagaaatctgaagatgatggcattggaaaagaaaacttggccatcctagagaaaattaaaaagaaccagaggcaagattacttaaatggtgcagtgtctggctcggtgcaggccactgaccggctgatgaaggagctcagggatatataccgatcacagagtttcaaaggcggtgagtttgccccagagaggggcctgcacaagagtcacccataaagaagggtatggtggcaaggggcccaagaggttctggggtccaggagtgcttatgaacttttcaggccaagaatggagctcctcaagccagtggcttggttgcatgtccatctgtggtgaacctagagctgttgatctttttctctcagtctgggaaaggggtctgcattagagaccactcaccacctggaccattctactaacacctgttttttccctccttccaggaaactatgcagtcgaactcgtgaatgacagtctgtatgattggaatgtcaaactcctcaaagttgaccaggacagcgctttgcacaacgatctccagatcctcaaagagaaagaaggagccgacttcattctacttaacttttcctttaaagataactttccctttgacccaccatttgtcagggttgtgtctccagtcctctctggagggtatgttctgggcggaggggccatctgcatggaacttctcaccaaacagggctggagcagtgcctactccatagagtcagtgatcatgcagatcagtgccacactggtgaaggggaaagcacgagtgcagtttggagccaacaaatctcaatacagtctgacaagagcacagcagtcctacaagtccttggtgcagatccacgaaaaaaacggctggtacacacccccaaaagaagacggctaaccctggagtatcacccttcctccctccccaggcaccactggaccaattacctttgaatgctgtatttggatctcacgctgcctctgtggttccctccctcatttttcctggacgtgatagctctgcctattgcaggacaatgatggctattctaaacgctaaggaaaaaaaacaaacacagaactgtttcaagtactcaagactgacttacagaccaaccaaccaccttgctggaacccttgctagcaggcattcttataaaagaaactttcgagcctccttatattgctggaaactcagctgtgctccagactagagcctccttacctatgctatggatttttaatttattttctcttatttcatgtacactgctttttttggttacagtgtatgatggatgtgtatgaaaaaaatgtatctttgggaaaacaattacagtttgttaatttgaagatgctggtcttgactcatctttatttttattcgcacatcccaccccatcccctgaactacttgggaggtggggaggggtacgagtccactgttgctttggtagagatgagaggccgcattttgctgctaaagcaagagaaacttggagctgaagcacacacctggtctgcccctagatttctcctcaaggcctctggagcaaccagcacttgcccccttggaatgcagagcctggcctgccaaactacaatgtggtaggctgaaacgatggtgttaattcttaggactacttttctagtcacagatgttttcaaatttctaagaaaaagaaaatgaggctcaagaggctgcttcgtagaattccttttgaatgaattgagtggggatggggacacagtctccaagtgtgtatgtggtcttttctgatctcagctgtgtggctgcaactcttcgctgttcattggttcctctcctggaaagtggcttctaaccagcactggatggtgatcattggtaagctttgctcacctccctctctcttgcttcatttggctttatcaaaaagaacagacctagctctgaatttgtttggcttgggaaattatggattctttcaagccactcccacaaggtgggtcctactagaaagggttagcattttaaggggggttgttctatacacctgtgtccttaccccaggctcaggaactgccagggagggaagatgaggtggggagtctgtactgagatggaactgtcagtgctgtgttgtatgtacttgctgttgtaaaagtttgggcatgactttgcatctagcgggtgctgcctgcatctctttgtctgtaagcttgctctgggactcagcctcttaggacctacgatgccagcagctctcattaacagtgaaatgacagaggccaaagatggccaagtgaagacccaagtctcagaaaacccagacttgggacaactgcctgggaactaggatgctagagcagttctgtaatgctttgagacacagcaattttcacattggccattctttcccctcccctaccccttttcttttgagggacttttaatgtttgctgctttaggtggatggagagtccaccagtcccactcaatgctgctctaactctacccacacccacctaattaggggtgctaataaaacatgctgaggttgagataaagacgggacataaggggaaaattcattccatagagctgaaatctggttttcaaggcctctgtggctttcttctgaacttaccaccagccctggctggaatgtagattgtgtttttagtaatgtgtactgtgagctgtcttctgtataatgtattttgtaatgtatttttctcatctaccaaaggatgaaacaaataaaattatttaaataaatagacacaataaaat

SEQ ID NO: 276158 - DNA, 3105 bp, Homo sapiens
  misc_feature (154)..(154): n is a, c, g, or t
ggggggggcctgtcccggaggtggcggcggcgccatcttggcgaaggggggatcaggaagtgcggaccgcggcggcggcggcggcggcggcggcggcggaccggagcgcaggccggaggtcccggcccgccggccccggagcggagggacgcgnaggatgcagcagccgcagccgcaggggcagcagcagccggggccggggcagcagctggggggccagggggcggcgccgggggccgggggcggcccaggggggggcccggggccggggccctgcctgaggcgagagctgaagctgctcgagtccatcttccaccgcggccacgagcgcttccgcattgccagcgcctgcctggacgagctgagctgcgagttcctgctggctggggccggaggggccggggcgggggccgcgcccggaccgcatctccccccacgggggtcggtgcctggggatcctgtccgcatccactgcaacatcacggagtcataccctgctgtgccccccatctggtcggtggagtctgatgaccctaacttggctgctgtcttggagaggctggtggacataaagaaagggaatactctgctattgcagcatctgaagaggatcatctccgacctgtgtaaactctataacctccctcagcatccagatgtggagatgctggatcaacccttgccagcagagcagtgcacacaggaagacgtgtcttcagaagatgaagatgaggagatgcctgaggacacagaagacttagatcactatgaaatgaaagaggaagagccagctgagggcaagaaatctgaagatgatggcattggaaaagaaaacttggccatcctagagaaaattaaaaagaaccagaggcaagattacttaaatggtgcagtgtctggctcggtgcaggccactgaccggctgatgaaggagctcagggatatataccgatcacagagtttcaaaggcggaaactatgcagtcgaactcgtgaatgacagtctgtatgattggaatgtcaaactcctcaaggctggagcagtgcctactccatagagtcagtgatcatgcagatcagtgccacactggtgaaggggaaagcacgagtgcagtttggagccaacaaatctcaatacagtctgacaagagcacagcagtcctacaagtccttggtgcagatccacgaaaaaaacggctggtacacacccccaaaagaagacggctaaccctggagtatcacccttcctccctccccaggcaccactggaccaattacctttgaatgctgtatttggatctcacgctgcctctgtggttccctccctcatttttcctggacgtgatagctctgcctattgcaggacaatgatggctattctaaacgctaaggaaaaaaaacaaacacagaactgtttcaagtactcaagactgacttacagaccaaccaaccaccttgctggaacccttgctagcaggcattcttataaaagaaactttcgagcctccttatattgctggaaactcagctgtgctccagactagagcctccttacctatgctatggatttttaatttattttctcttatttcatgtacactgctttttttggttacagtgtatgatggatgtgtatgaaaaaaatgtatctttgggaaaacaattacagtttgttaatttgaagatgctggtcttgactcatctttatttttattcgcacatcccaccccatcccctgaactacttgggaggtggggaggggtacgagtccactgttgctttggtagagatgagaggccgcattttgctgctaaagcaagagaaacttggagctgaagcacacacctggtctgcccctagatttctcctcaaggcctctggagcaaccagcacttgcccccttggaatgcagagcctggcctgccaaactacaatgtggtaggctgaaacgatggtgttaattcttaggactacttttctagtcacagatgttttcaaatttctaagaaaaagaaaatgaggctcaagaggctgcttcgtagaattccttttgaatgaattgagtggggatggggacacagtctccaagtgtgtatgtggtcttttctgatctcagctgtgtggctgcaactcttcgctgttcattggttcctctcctggaaagtggcttctaaccagcactggatggtgatcattggtaagctttgctcacctccctctctcttgcttcatttggctttatcaaaaagaacagacctagctctgaatttgtttggcttgggaaattatggattctttcaagccactcccacaaggtgggtcctactagaaagggttagcattttaaggggggttgttctatacacctgtgtccttaccccaggctcaggaactgccagggagggaagatgaggtggggagtctgtactgagatggaactgtcagtgctgtgttgtatgtacttgctgttgtaaaagtttgggcatgactttgcatctagcgggtgctgcctgcatctctttgtctgtaagcttgctctgggactcagcctcttaggacctacgatgccagcagctctcattaacagtgaaatgacagaggccaaagatggccaagtgaagacccaagtctcagaaaacccagacttgggacaactgcctgggaactaggatgctagagcagttctgtaatgctttgagacacagcaattttcacattggccattctttcccctcccctaccccttttcttttgagggacttttaatgtttgctgctttaggtggatggagagtccaccagtcccactcaatgctgctctaactctacccacacccacctaattaggggtgctaataaaacatgctgaggttgagataaagacgggacataaggggaaaattcattccatagagctgaaatctggttttcaaggcctctgtggctttcttctgaacttaccaccagccctggctggaatgtagattgtgtttttagtaatgtgtactgtgagctgtcttctgtataatgtattttgtaatgtatttttctcatctaccaaaggatgaaacaaataaaattatttaaataaatagacacaataaaat

SEQ ID NO: 276159 - DNA, 2018 bp, Homo sapiens
  misc_feature (20)..(20): n is a, c, g, or t
tcgagctcggtaccgcacgngttcggagttggagcaacaaatctcaatacagtctgacaagagcacagcagtcctacaagtccttggtgcagatccacgaaaaaaacggctggtacacacccccaaaagaagacggctaaccctggagtatcacccttcctccctccccaggcaccactggaccaattacctttgaatgctgtatttggatctcacgctgcctctgtggttccctccctcatttttcctggacgtgatagctctgcctattgcaggacaatgatggctattctaaacgctaaggaaaaaaaacaaacacagaactgtttcaagtactcaagactgacttacagaccaaccaaccaccttgctggaacccttgctagcaggcattcttataaaagaaactttcgagcctccttatattgctggaaactcagctgtgctccagactagagcctccttacctatgctatggatttttaatttattttctcttatttcatgtacactgctttttttggttacagtgtatgatggatgtgtatgaaaaaaatgtatctttgggaaaacaattacagtttgttaatttgaagatgctggtcttgactcatctttatttttattcgcacatcccaccccatcccctgaactacttgggaggtggggaggggtacgagtccactgttgctttggtagagatgagaggccgcattttgctgctaaagcaagagaaacttggagctgaagcacacacctggtctgcccctagatttctcctcaaggcctctggagcaaccagcacttgcccccttggaatgcagagcctggcctgccaaactacaatgtggtaggctgaaacgatggtgttaattcttaggactacttttctagtcacagatgttttcaaatttctaagaaaaagaaaatgaggctcaagaggctgcttcgtagaattccttttgaatgaattgagtggggatggggacacagtctccaagtgtgtatgtggtcttttctgatctcagctgtgtggctgcaactcttcgctgttcattggttcctctcctggaaagtggcttctaaccagcactggatggtgatcattggtaagctttgctcacctccctctctcttgcttcatttggctttatcaaaaagaacagacctagctctgaatttgtttggcttgggaaattatggattctttcaagccactcccacaaggtgggtcctactagaaagggttagcattttaaggggggttgttctatacacctgtgtccttaccccaggctcaggaactgccagggagggaagatgaggtggggagtctgtactgagatggaactgtcagtgctgtgttgtatgtacttgctgttgtaaaagtttgggcatgactttgcatctagcgggtgctgcctgcatctctttgtctgtaagcttgctctgggactcagcctcttaggacctacgatgccagcagctctcattaacagtgaaatgacagaggccaaagatggccaagtgaagacccaagtctcagaaaacccagacttgggacaactgcctgggaactaggatgctagagcagttctgtaatgctttgagacacagcaattttcacattggccattctttcccctcccctaccccttttcttttgagggacttttaatgtttgctgctttaggtggatggagagtccaccagtcccactcaatgctgctctaactctacccacacccacctaattaggggtgctaataaaacatgctgaggttgagataaagacgggacataaggggaaaattcattccatagagctgaaatctggttttcaaggcctctgtggctttcttctgaacttaccaccagccctggctggaatgtagattgtgtttttagtaatgtgtactgtgagctgtcttctgtataatgtattttgtaatgtatttttctcatctaccaaaggatgaaacaaataaaattatttaaataaatagacacaataaaat

SEQ ID NO: 276160 - DNA, 2213 bp, Homo sapiens
cacaacctcttccagaaacacaccaaaatgatcgtatcaccgataaacttggtgctacccccttcttgaccaccttttgaaaaagctcatctaactctcccatcatctcaggttgggcacatcattcccccttctcatctccaggtatgcaggctctcagcttcccatacacctctccccacacagcatagccctccccaatatcctcttatctctgccactggagacgtcttcagggattggggcaggacagggagggtgggcctgaaccttcacctcactgaccattccatttctttgcaggctggtacacacccccaaaagaagacggctaaccctggagtatcacccttcctccctccccaggcaccactggaccaattacctttgaatgctgtatttggatctcacgctgcctctgtggttccctccctcatttttcctggacgtgatagctctgcctattgcaggacaatgatggctattctaaacgctaaggaaaaaaaacaaacacagaactgtttcaagtactcaagactgacttacagaccaaccaaccaccttgctggaacccttgctagcaggcattcttataaaagaaactttcgagcctccttatattgctggaaactcagctgtgctccagactagagcctccttacctatgctatggatttttaatttattttctcttatttcatgtacactgctttttttggttacagtgtatgatggatgtgtatgaaaaaaatgtatctttgggaaaacaattacagtttgttaatttgaagatgctggtcttgactcatctttatttttattcgcacatcccaccccatcccctgaactacttgggaggtggggaggggtacgagtccactgttgctttggtagagatgagaggccgcattttgctgctaaagcaagagaaacttggagctgaagcacacacctggtctgcccctagatttctcctcaaggcctctggagcaaccagcacttgcccccttggaatgcagagcctggcctgccaaactacaatgtggtaggctgaaacgatggtgttaattcttaggactacttttctagtcacagatgttttcaaatttctaagaaaaagaaaatgaggctcaagaggctgcttcgtagaattccttttgaatgaattgagtggggatggggacacagtctccaagtgtgtatgtggtcttttctgatctcagctgtgtggctgcaactcttcgctgttcattggttcctctcctggaaagtggcttctaaccagcactggatggtgatcattggtaagctttgctcacctccctctctcttgcttcatttggctttatcaaaaagaacagacctagctctgaatttgtttggcttgggaaattatggattctttcaagccactcccacaaggtgggtcctactagaaagggttagcattttaaggggggttgttctatacacctgtgtccttaccccaggctcaggaactgccagggagggaagatgaggtggggagtctgtactgagatggaactgtcagtgctgtgttgtatgtacttgctgttgtaaaagtttgggcatgactttgcatctagcgggtgctgcctgcatctctttgtctgtaagcttgctctgggactcagcctcttaggacctacgatgccagcagctctcattaacagtgaaatgacagaggccaaagatggccaagtgaagacccaagtctcagaaaacccagacttgggacaactgcctgggaactaggatgctagagcagttctgtaatgctttgagacacagcaattttcacattggccattctttcccctcccctaccccttttcttttgagggacttttaatgtttgctgctttaggtggatggagagtccaccagtcccactcaatgctgctctaactctacccacacccacctaattaggggtgctaataaaacatgctgaggttgagataaagacgggacataaggggaaaattcattccatagagctgaaatctggttttcaaggcctctgtggctttcttctgaacttaccaccagccctggctggaatgtagattgtgtttttagtaatgtgtactgtgagctgtcttctgtataatgtattttgtaatgtatttttctcatctaccaaaggatgaaacaaataaaattatttaaataaatagacacaataaaat

SEQ ID NO: 276161 - DNA, 1878 bp, Homo sapiens
  misc_feature (154)..(154): n is a, c, g, or t
ggggggggcctgtcccggaggtggcggcggcgccatcttggcgaaggggggatcaggaagtgcggaccgcggcggcggcggcggcggcggcggcggcggaccggagcgcaggccggaggtcccggcccgccggccccggagcggagggacgcgnaggatgcagcagccgcagccgcaggggcagcagcagccggggccggggcagcagctggggggccagggggcggcgccgggggccgggggcggcccaggggggggcccggggccggggccctgcctgaggcgagagctgaagctgctcgagtccatcttccaccgcggccacgagcgcttccgcattgccagcgcctgcctggacgagctgagctgcgagttcctgctggctggggccggaggggccggggcgggggccgcgcccggaccgcatctccccccacgggggtcggtgcctggggatcctgtccgcatccactgcaacatcacggagtcataccctgctgtgccccccatctggtcggtggagtctgatgaccctaacttggctgctgtcttggagaggctggtggacataaagaaagggaatactctgctattgcagcatctgaagaggatcatctccgacctgtgtaaactctataacctccctcagcatccagatgtggagatgctggatcaacccttgccagcagagcagtgcacacaggaagacgtgtcttcagaagatgaagatgaggagatgcctgaggacacagaagacttagatcactatgaaatgaaagaggaagagccagctgagggcaagaaatctgaagatgatggcattggaaaagaaaacttggccatcctagagaaaattaaaaagaaccagaggcaagattacttaaatggtgcagtgtctggctcggtgcaggccactgaccggctgatgaaggagctcagggatatataccgatcacagagtttcaaaggcggaaactatgcagtcgaactcgtgaatgacagtctgtatgattggaatgtcaaactcctcaaagttgaccaggacagcgctttgcacaacgatctccagatcctcaaagagaaagaaggagccgacttcattctacttaacttttcctttaaagataactttccctttgacccaccatttgtcagggttgtgtctccagtcctctctggagggtatgttctgggcggaggggccatctgcatggaacttctcaccaaacagggctggagcagtgcctactccatagagtcagtgatcatgcagatcagtgccacactggtgaaggggaaagcacgagtgcagtttggagccaacaaatctcaatacagtctgacaagagcacagcagtcctacaagtccttggtgcagatccacgaaaaaaacggctggtacacacccccaaaagaagacggctaaccctggagtatcacccttcctccctccccaggcaccactggaccaattacctttgaatgctgtatttggatctcacgctgcctctgtggttccctccctcatttttcctggacgtgatagctctgcctattgcaggacaatgatggctattctaaacgctaaggaaaaaaaacaaacacagaactgtttcaagtactcaagactgacttacagaccaaccaaccaccttgctggaacccttgctagcaggcattcttataaaagaaactttcgagcctccttatattgctggaaactcagctgtgctccagactagagcctccttacctatgctatggatttttaatttattttctcttatttcatgtacactgctttttttggttacagtgcacccgcactgtgcagggcaaaatgggtccttggttatactatgtcagtttgttgttttt

SEQ ID NO: 276162 - DNA, 1661 bp, Homo sapiens
  misc_feature (154)..(154): n is a, c, g, or t
ggggggggcctgtcccggaggtggcggcggcgccatcttggcgaaggggggatcaggaagtgcggaccgcggcggcggcggcggcggcggcggcggcggaccggagcgcaggccggaggtcccggcccgccggccccggagcggagggacgcgnaggatgcagcagccgcagccgcaggggcagcagcagccggggccggggcagcagctggggggccagggggcggcgccgggggccgggggcggcccaggggggggcccggggccggggccctgcctgaggcgagagctgaagctgctcgagtccatcttccaccgcggccacgagcgcttccgcattgccagcgcctgcctggacgagctgagctgcgagttcctgctggctggggccggaggggccggggcgggggccgcgcccggaccgcatctccccccacgggggtcggtgcctggggatcctgtccgcatccactgcaacatcacggagtcataccctgctgtgccccccatctggtcggtggagtctgatgaccctaacttggctgctgtcttggagaggctggtggacataaagaaagggaatactctgctattgcagcatctgaagaggatcatctccgacctgtgtaaactctataacctccctcagcatccagatgtggagatgctggatcaacccttgccagcagagcagtgcacacaggaagacgtgtcttcagaagatgaagatgaggagatgcctgaggacacagaagacttagatcactatgaaatgaaagaggaagagccagctgagggcaagaaatctgaagatgatggcattggaaaagaaaacttggccatcctagagaaaattaaaaagaaccagaggcaagattacttaaatggtgcagtgtctggctcggtgcaggccactgaccggctgatgaaggagctcagggatatataccgatcacagagtttcaaaggcggaaactatgcagtcgaactcgtgaatgacagtctgtatgattggaatgtcaaactcctcaaagttgaccaggacagcgctttgcacaacgatctccagatcctcaaagagaaagaaggagccgacttcattctacttaacttttcctttaaagataactttccctttgacccaccatttgtcagggttgtgtctccagtcctctctggagggtatgttctgggcggaggggccatctgcatggaacttctcaccaaacagggctggagcagtgcctactccatagagtcagtgatcatgcagatcagtgccacactggtgaaggggaaagcacgagtgcagtttggagccaacaaatctcaatacagtctgacaagagcacagcagtcctacaagtccttggtgcagatccacgaaaaaaacggctggtacacacccccaaaagaagacggctaaccctggagtatcacccttcctccctccccaggcaccactggaccaattacctttgaatgctgtatttggatctcacgctgcctctgtggttccctccctcatttttcctggacgtgatagctctgcctattgcaggacaatgatggctattctaaacgctaaggaaaaaaaacaaacacagaactgtttcaagtactcaagactgatctataggagtggtggggtacgaatgaat

SEQ ID NO: 276163 - DNA, 1876 bp, Homo sapiens
  misc_feature (154)..(154): n is a, c, g, or t
  misc_feature (1839)..(1839): n is a, c, g, or t
  misc_feature (1851)..(1851): n is a, c, g, or t
ggggggggcctgtcccggaggtggcggcggcgccatcttggcgaaggggggatcaggaagtgcggaccgcggcggcggcggcggcggcggcggcggcggaccggagcgcaggccggaggtcccggcccgccggccccggagcggagggacgcgnaggatgcagcagccgcagccgcaggggcagcagcagccggggccggggcagcagctggggggccagggggcggcgccgggggccgggggcggcccaggggggggcccggggccggggccctgcctgaggcgagagctgaagctgctcgagtccatcttccaccgcggccacgagcgcttccgcattgccagcgcctgcctggacgagctgagctgcgagttcctgctggctggggccggaggggccggggcgggggccgcgcccggaccgcatctccccccacgggggtcggtgcctggggatcctgtccgcatccactgcaacatcacggagtcataccctgctgtgccccccatctggtcggtggagtctgatgaccctaacttggctgctgtcttggagaggctggtggacataaagaaagggaatactctgctattgcagcatctgaagaggatcatctccgacctgtgtaaactctataacctccctcagcatccagatgtggagatgctggatcaacccttgccagcagagcagtgcacacaggaagacgtgtcttcagaagatgaagatgaggagatgcctgaggacacagaagacttagatcactatgaaatgaaagaggaagagccagctgagggcaagaaatctgaagatgatggcattggaaaagaaaacttggccatcctagagaaaattaaaaagaaccagaggcaagattacttaaatggtgcagtgtctggctcggtgcaggccactgaccggctgatgaaggagctcagggatatataccgatcacagagtttcaaaggcggaaactatgcagtcgaactcgtgaatgacagtctgtatgattggaatgtcaaactcctcaaagttgaccaggacagcgctttgcacaacgatctccagatcctcaaagagaaagaaggagccgacttcattctacttaacttttcctttaaagataactttccctttgacccaccatttgtcagggttgtgtctccagtcctctctggagggtatgttctgggcggaggggccatctgcatggaacttctcaccaaacagggctggagcagtgcctactccatagagtcagtgatcatgcagatcagtgccacactggtgaaggggaaagcacgagtgcagtttggagccaacaaatctcaatacagtctgacaagagcacagcagtcctacaagtccttggtgcagatccacgaaaaaaacggctggtacacacccccaaaagaagacggctaaccctggagtatcacccttcctccctccccaggcaccactggaccaattacctttgaatgctgtatttggatctcacgctgcctctgtggttccctccctcatttttcctgttcggtttatactccggagtataaaccgaacaggtgatggcaagatcctgtacagccagtgtggggatgtgatgagggccctgggccagaaccctaccaacgccgaggtgctcaaggtcctggggaaccccaagagtgatgagatgaatgtgaaggtgctggactttgagcactttctgcccatgctgcagacagtggccaagaacaaggaccagggcacctatgaggattatgtcgaaggacttcgggtgtttggcaaggaaggaaatggcaccgtcatgggtgctgaatccggcatgttcntgtcacactggntgagaagatgacagaggccagagat

SEQ ID NO: 276164 - DNA, 1872 bp, Homo sapiens
  misc_feature (154)..(154): n is a, c, g, or t
  misc_feature (1528)..(1528): n is a, c, g, or t
  misc_feature (1617)..(1617): n is a, c, g, or t
  misc_feature (1725)..(1725): n is a, c, g, or t
  misc_feature (1774)..(1774): n is a, c, g, or t
  misc_feature (1788)..(1789): n is a, c, g, or t
  misc_feature (1800)..(1800): n is a, c, g, or t
  misc_feature (1812)..(1812): n is a, c, g, or t
  misc_feature (1816)..(1816): n is a, c, g, or t
  misc_feature (1845)..(1845): n is a, c, g, or t
  misc_feature (1855)..(1855): n is a, c, g, or t
  misc_feature (1858)..(1858): n is a, c, g, or t
  misc_feature (1861)..(1862): n is a, c, g, or t
ggggggggcctgtcccggaggtggcggcggcgccatcttggcgaaggggggatcaggaagtgcggaccgcggcggcggcggcggcggcggcggcggcggaccggagcgcaggccggaggtcccggcccgccggccccggagcggagggacgcgnaggatgcagcagccgcagccgcaggggcagcagcagccggggccggggcagcagctggggggccagggggcggcgccgggggccgggggcggcccaggggggggcccggggccggggccctgcctgaggcgagagctgaagctgctcgagtccatcttccaccgcggccacgagcgcttccgcattgccagcgcctgcctggacgagctgagctgcgagttcctgctggctggggccggaggggccggggcgggggccgcgcccggaccgcatctccccccacgggggtcggtgcctggggatcctgtccgcatccactgcaacatcacggagtcataccctgctgtgccccccatctggtcggtggagtctgatgaccctaacttggctgctgtcttggagaggctggtggacataaagaaagggaatactctgctattgcagcatctgaagaggatcatctccgacctgtgtaaactctataacctccctcagcatccagatgtggagatgctggatcaacccttgccagcagagcagtgcacacaggaagacgtgtcttcagaagatgaagatgaggagatgcctgaggacacagaagacttagatcactatgaaatgaaagaggaagagccagctgagggcaagaaatctgaagatgatggcattggaaaagaaaacttggccatcctagagaaaattaaaaagaaccagaggcaagattacttaaatggtgcagtgtctggctcggtgcaggccactgaccggctgatgaaggagctcagggatatataccgatcacagagtttcaaaggcggaaactatgcagtcgaactcgtgaatgacagtctgtatgattggaatgtcaaactcctcaaagttgaccaggacagcgctttgcacaacgatctccagatcctcaaagagaaagaaggagccgacttcattctacttaacttttcctttaaagataactttccctttgacccaccatttgtcagggttgtgtctccagtcctctctggagggtatgttctgggcggaggggccatctgcatggaacttctcaccaaacagggctggagcagtgcctactccatagagtcagtgatcatgcagatcagtgccacactggtgaaggggaaagcacgagtgcagtttggagccaacaaatctcaatacagtctgacaagagcacagcagtcctacaagtccttggtgcagatccacgaaaaaaacggctggtacacaccccccaaagaagacggtcaacttgtctggagtatactccagacaagttgaccgcccagaatatgaggctgacttgggcacactaggggaataccccaaaggcctgaaggaggtgccactggnctgccagcacttcaggaaggcacagggccccacacccccgagatccaagctgcactggctggcagggggcagggcggggggtggcgagnacacagtcccgtgtgtcccagcaccggtgccaccctccttagccccgggcaggcagtacgtacatgcggaccccgcctctcaaagcacgtttatggaaatgaacaggntggggtggcccgcgctcgccggtcacatgttggctcgttcccgctgcanccgcgagttgtagnngcgagacacgntgttccaggcgnccangtagcggtccatgcacatggcgatgcacntcgctcgagntgnccnnggagccccct

SEQ ID NO: 276165 - DNA, 561 bp, Homo sapiens
  misc_feature (12)..(12): n is a, c, g, or t
tagaggatcccnctcctcagcagacgcagctctcattaacagtgaaatgacagaggccaaagatggccaagtgaagacccaagtctcagaaaacccagacttgggacaactgcctgggaactaggatgctagagcagttctgtaatgctttgagacacagcaattttcacattggccattctttcccctcccctaccccttttcttttgagggacttttaatgtttgctgctttaggtggatggagagtccaccagtcccactcaatgctgctctaactctacccacacccacctaattaggggtgctaataaaacatgctgaggttgagataaagacgggacataaggggaaaattcattccatagagctgaaatctggttttcaaggcctctgtggctttcttctgaacttaccaccagccctggctggaatgtagattgtgtttttagtaatgtgtactgtgagctgtcttctgtataatgtattttgtaatgtatttttctcatctaccaaaggatgaaacaaataaaattatttaaataaatagacacaataaaat

SEQ ID NO: 276166 - DNA, 1276 bp, Homo sapiens
  misc_feature (154)..(154): n is a, c, g, or t
ggggggggcctgtcccggaggtggcggcggcgccatcttggcgaaggggggatcaggaagtgcggaccgcggcggcggcggcggcggcggcggcggcggaccggagcgcaggccggaggtcccggcccgccggccccggagcggagggacgcgnaggatgcagcagccgcagccgcaggggcagcagcagccggggccggggcagcagctggggggccagggggcggcgccgggggccgggggcggcccaggggggggcccggggccggggccctgcctgaggcgagagctgaagctgctcgagtccatcttccaccgcggccacgagcgcttccgcattgccagcgcctgcctggacgagctgagctgcgagttcctgctggctggggccggaggggccggggcgggggccgcgcccggaccgcatctccccccacgggggtcggtgcctggggatcctgtccgcatccactgcaacatcacggagtcataccctgctgtgccccccatctggtcggtggagtctgatgaccctaacttggctgctgtcttggagaggctggtggacataaagaaagggaatactctgctattgcagcatctgaagaggatcatctccgacctgtgtaaactctataacctccctcagcatccagatgtggagatgctggatcaacccttgccagcagagcagtgcacacaggaagacgtgtcttcagaagatgaagatgaggagatgcctgaggacacagaagacttagatcactatgaaatgaaagaggaagagccagctgagggcaagaaatctgaagatgatggcattggaaaagaaaacttggccatcctagagaaaattaaaaagaaccagaggcaagattacttaaatggtgcagtgtctggctcggtgcaggccactgaccggctgatgaaggagctcagggatatataccgatcacagagtttcaaaggcggaaactatgcagtcgaactcgtgaatgacagtctgtatgattggaatgtcaaactcctcaaagttgaccaggacagcgctttgcacaacgatctccagatcctcaaagagaaagaaggagccgacttcattctacttaacttttcctttaaaccgcttaagagagaatatatatactcaactgagtactgtctttcaaagcagtccctgtcagtttgtccattgattccatagcagctctcactgcccaccctgcttgagaagcctcttggagttgcctagagagtctatagcactcatctgaag

SEQ ID NO: 276167 - DNA, 3304 bp, Homo sapiens
  misc_feature (154)..(154): n is a, c, g, or t
ggggggggcctgtcccggaggtggcggcggcgccatcttggcgaaggggggatcaggaagtgcggaccgcggcggcggcggcggcggcggcggcggcggaccggagcgcaggccggaggtcccggcccgccggccccggagcggagggacgcgnaggatgcagcagccgcagccgcaggggcagcagcagccggggccggggcagcagctggggggccagggggcggcgccgggggccgggggcggcccaggggggggcccggggccggggccctgcctgaggcgagagctgaagctgctcgagtccatcttccaccgcggccacgagcgcttccgcattgccagcgcctgcctggacgagctgagctgcgagttcctgctggctggggccggaggggccggggcgggggccgcgcccggaccgcatctccccccacgggggtcggtgcctggggatcctgtccgcatccactgcaacatcacggagtcataccctgctgtgccccccatctggtcggtggagtctgatgaccctaacttggctgctgtcttggagaggctggtggacataaagaaagggaatactctgctattgcagcatctgaagaggatcatctccgacctgtgtaaactctataacctccctcagcatccagatgtggagatgctggatcaacccttgccagcagagcagtgcacacaggaagacgtgtcttcagaagatgaagatgaggagatgcctgaggacacagaagacttagatcactatgaaatgaaagaggaagagccagctgagggcaagaaatctgaagatgatggcattggaaaagaaaacttggccatcctagagaaaattaaaaagaaccagaggcaagattacttaaatggtgcagtgtctggctcggtgcaggccactgaccggctgatgaaggagctcagggatatataccgatcacagagtttcaaaggcggaaactatgcagtcgaactcgtgaatgacagtctgtatgattggaatgtcaaactcctcaaagttgaccaggacagcgctttgcacaacgatctccagatcctcaaagagaaagaaggagccgacttcattctacttaacttttcctttaaagataactttccctttgacccaccatttgtcagggttgtgtctccagtcctctctggagggtatgttctgggcggaggggccatctgcatggaacttctcaccaaacagggctggagcagtgcctactccatagagtcagtgatcatgcagatcagtgccacactggtgaaggggaaagcacgagtgcagtttggagccaacaaatctcaatacagtctgacaagagcacagcagtcctacaagtccttggtgcagatccacgaaaaaaacggctggtacacacccccaaaagaagacggctaaccctggagtatcacccttcctccctccccaggcaccactggaccaattacctttgaatgctgtatttggatctcacgctgcctctgtggttccctccctcatttttcctggacgtgatagctctgcctattgcaggacaatgatggctattctaaacgctaaggaaaaaaaacaaacacagaactgtttcaagtactcaagactgacttacagaccaaccaaccaccttgctggaacccttgctagcaggcattcttataaaagaaactttcgagcctccttatattgctggaaactcagctgtgctccagactagagcctccttacctatgctatggatttttaatttattttctcttatttcatgtacactgctttttttggttacagtgtatgatggatgtgtatgaaaaaaatgtatctttgggaaaacaattacagtttgttaatttgaagatgctggtcttgactcatctttatttttattcgcacatcccaccccatcccctgaactacttgggaggtggggaggggtacgagtccactgttgctttggtagagatgagaggccgcattttgctgctaaagcaagagaaacttggagctgaagcacacacctggtctgcccctagatttctcctcaaggcctctggagcaaccagcacttgcccccttggaatgcagagcctggcctgccaaactacaatgtggtaggctgaaacgatggtgttaattcttaggactacttttctagtcacagatgttttcaaatttctaagaaaaagaaaatgaggctcaagaggctgcttcgtagaattccttttgaatgaattgagtggggatggggacacagtctccaagtgtgtatgtggtcttttctgatctcagctgtgtggctgcaactcttcgctgttcattggttcctctcctggaaagtggcttctaaccagcactggatggtgatcattggtaagctttgctcacctccctctctcttgcttcatttggctttatcaaaaagaacagacctagctctgaatttgtttggcttgggaaattatggattctttcaagccactcccacaaggtgggtcctactagaaagggttagcattttaaggggggttgttctatacacctgtgtccttaccccaggctcaggaactgccagggagggaagatgaggtggggagtctgtactgagatggaactgtcagtgctgtgttgtatgtacttgctgttgtaaaagtttgggcatgactttgcatctagcgggtgctgcctgcatctctttgtctgtaagcttgctctgggactcagcctcttaggacctacgatgccagcagctctcattaacagtgaaatgacagaggccaaagatggccaagtgaagacccaagtctcagaaaacccagacttgggacaactgcctgggaactaggatgctagagcagttctgtaatgctttgagacacagcaattttcacattggccattctttcccctcccctaccccttttcttttgagggacttttaatgtttgctgctttaggtggatggagagtccaccagtcccactcaatgctgctctaactctacccacacccacctaattaggggtgctaataaaacatgctgaggttgagataaagacgggacataaggggaaaattcattccatagagctgaaatctggttttcaaggcctctgtggctttcttctgaacttaccaccagccctggctggaatgtagattgtgtttttagtaatgtgtactgtgagctgtcttctgtataatgtattttgtaatgtatttttctcatctaccaaaggatgaaacaaataaaattatttaaataaatagacacaataaaat

SEQ ID NO: 276168 - DNA, 2873 bp, Homo sapiens
atgctgttctagaggatcccaacttcgacggacgcattcactgcaacatcacggagtcataccctgctgtgccccccatctggtcggtggagtctgatgaccctaacttggctgctgtcttggagaggctggtggacataaagaaagggaatactctgctattgcagcatctgaagaggatcatctccgacctgtgtaaactctataacctccctcagcatccagatgtggagatgctggatcaacccttgccagcagagcagtgcacacaggaagacgtgtcttcagaagatgaagatgaggagatgcctgaggacacagaagacttagatcactatgaaatgaaagaggaagagccagctgagggcaagaaatctgaagatgatggcattggaaaagaaaacttggccatcctagagaaaattaaaaagaaccagaggcaagattacttaaatggtgcagtgtctggctcggtgcaggccactgaccggctgatgaaggagctcagggatatataccgatcacagagtttcaaaggcggaaactatgcagtcgaactcgtgaatgacagtctgtatgattggaatgtcaaactcctcaaagttgaccaggacagcgctttgcacaacgatctccagatcctcaaagagaaagaaggagccgacttcattctacttaacttttcctttaaagataactttccctttgacccaccatttgtcagggttgtgtctccagtcctctctggagggtatgttctgggcggaggggccatctgcatggaacttctcaccaaacagggctggagcagtgcctactccatagagtcagtgatcatgcagatcagtgccacactggtgaaggggaaagcacgagtgcagtttggagccaacaaatctcaatacagtctgacaagagcacagcagtcctacaagtccttggtgcagatccacgaaaaaaacggctggtacacacccccaaaagaagacggctaaccctggagtatcacccttcctccctccccaggcaccactggaccaattacctttgaatgctgtatttggatctcacgctgcctctgtggttccctccctcatttttcctggacgtgatagctctgcctattgcaggacaatgatggctattctaaacgctaaggaaaaaaaacaaacacagaactgtttcaagtactcaagactgacttacagaccaaccaaccaccttgctggaacccttgctagcaggcattcttataaaagaaactttcgagcctccttatattgctggaaactcagctgtgctccagactagagcctccttacctatgctatggatttttaatttattttctcttatttcatgtacactgctttttttggttacagtgtatgatggatgtgtatgaaaaaaatgtatctttgggaaaacaattacagtttgttaatttgaagatgctggtcttgactcatctttatttttattcgcacatcccaccccatcccctgaactacttgggaggtggggaggggtacgagtccactgttgctttggtagagatgagaggccgcattttgctgctaaagcaagagaaacttggagctgaagcacacacctggtctgcccctagatttctcctcaaggcctctggagcaaccagcacttgcccccttggaatgcagagcctggcctgccaaactacaatgtggtaggctgaaacgatggtgttaattcttaggactacttttctagtcacagatgttttcaaatttctaagaaaaagaaaatgaggctcaagaggctgcttcgtagaattccttttgaatgaattgagtggggatggggacacagtctccaagtgtgtatgtggtcttttctgatctcagctgtgtggctgcaactcttcgctgttcattggttcctctcctggaaagtggcttctaaccagcactggatggtgatcattggtaagctttgctcacctccctctctcttgcttcatttggctttatcaaaaagaacagacctagctctgaatttgtttggcttgggaaattatggattctttcaagccactcccacaaggtgggtcctactagaaagggttagcattttaaggggggttgttctatacacctgtgtccttaccccaggctcaggaactgccagggagggaagatgaggtggggagtctgtactgagatggaactgtcagtgctgtgttgtatgtacttgctgttgtaaaagtttgggcatgactttgcatctagcgggtgctgcctgcatctctttgtctgtaagcttgctctgggactcagcctcttaggacctacgatgccagcagctctcattaacagtgaaatgacagaggccaaagatggccaagtgaagacccaagtctcagaaaacccagacttgggacaactgcctgggaactaggatgctagagcagttctgtaatgctttgagacacagcaattttcacattggccattctttcccctcccctaccccttttcttttgagggacttttaatgtttgctgctttaggtggatggagagtccaccagtcccactcaatgctgctctaactctacccacacccacctaattaggggtgctaataaaacatgctgaggttgagataaagacgggacataaggggaaaattcattccatagagctgaaatctggttttcaaggcctctgtggctttcttctgaacttaccaccagccctggctggaatgtagattgtgtttttagtaatgtgtactgtgagctgtcttctgtataatgtattttgtaatgtatttttctcatctaccaaaggatgaaacaaataaaattatttaaataaatagacacaataaaat

SEQ ID NO: 276169 - DNA, 2583 bp, Homo sapiens
ctgatccgcttaaggatgcctgaggacacagaagacttagatcactatgaaatgaaagaggaagagccagctgagggcaagaaatctgaagatgatggcattggaaaagaaaacttggccatcctagagaaaattaaaaagaaccagaggcaagattacttaaatggtgcagtgtctggctcggtgcaggccactgaccggctgatgaaggagctcagggatatataccgatcacagagtttcaaaggcggaaactatgcagtcgaactcgtgaatgacagtctgtatgattggaatgtcaaactcctcaaagttgaccaggacagcgctttgcacaacgatctccagatcctcaaagagaaagaaggagccgacttcattctacttaacttttcctttaaagataactttccctttgacccaccatttgtcagggttgtgtctccagtcctctctggagggtatgttctgggcggaggggccatctgcatggaacttctcaccaaacagggctggagcagtgcctactccatagagtcagtgatcatgcagatcagtgccacactggtgaaggggaaagcacgagtgcagtttggagccaacaaatctcaatacagtctgacaagagcacagcagtcctacaagtccttggtgcagatccacgaaaaaaacggctggtacacacccccaaaagaagacggctaaccctggagtatcacccttcctccctccccaggcaccactggaccaattacctttgaatgctgtatttggatctcacgctgcctctgtggttccctccctcatttttcctggacgtgatagctctgcctattgcaggacaatgatggctattctaaacgctaaggaaaaaaaacaaacacagaactgtttcaagtactcaagactgacttacagaccaaccaaccaccttgctggaacccttgctagcaggcattcttataaaagaaactttcgagcctccttatattgctggaaactcagctgtgctccagactagagcctccttacctatgctatggatttttaatttattttctcttatttcatgtacactgctttttttggttacagtgtatgatggatgtgtatgaaaaaaatgtatctttgggaaaacaattacagtttgttaatttgaagatgctggtcttgactcatctttatttttattcgcacatcccaccccatcccctgaactacttgggaggtggggaggggtacgagtccactgttgctttggtagagatgagaggccgcattttgctgctaaagcaagagaaacttggagctgaagcacacacctggtctgcccctagatttctcctcaaggcctctggagcaaccagcacttgcccccttggaatgcagagcctggcctgccaaactacaatgtggtaggctgaaacgatggtgttaattcttaggactacttttctagtcacagatgttttcaaatttctaagaaaaagaaaatgaggctcaagaggctgcttcgtagaattccttttgaatgaattgagtggggatggggacacagtctccaagtgtgtatgtggtcttttctgatctcagctgtgtggctgcaactcttcgctgttcattggttcctctcctggaaagtggcttctaaccagcactggatggtgatcattggtaagctttgctcacctccctctctcttgcttcatttggctttatcaaaaagaacagacctagctctgaatttgtttggcttgggaaattatggattctttcaagccactcccacaaggtgggtcctactagaaagggttagcattttaaggggggttgttctatacacctgtgtccttaccccaggctcaggaactgccagggagggaagatgaggtggggagtctgtactgagatggaactgtcagtgctgtgttgtatgtacttgctgttgtaaaagtttgggcatgactttgcatctagcgggtgctgcctgcatctctttgtctgtaagcttgctctgggactcagcctcttaggacctacgatgccagcagctctcattaacagtgaaatgacagaggccaaagatggccaagtgaagacccaagtctcagaaaacccagacttgggacaactgcctgggaactaggatgctagagcagttctgtaatgctttgagacacagcaattttcacattggccattctttcccctcccctaccccttttcttttgagggacttttaatgtttgctgctttaggtggatggagagtccaccagtcccactcaatgctgctctaactctacccacacccacctaattaggggtgctaataaaacatgctgaggttgagataaagacgggacataaggggaaaattcattccatagagctgaaatctggttttcaaggcctctgtggctttcttctgaacttaccaccagccctggctggaatgtagattgtgtttttagtaatgtgtactgtgagctgtcttctgtataatgtattttgtaatgtatttttctcatctaccaaaggatgaaacaaataaaattatttaaataaatagacacaataaaat

SEQ ID NO: 276170 - DNA, 2160 bp, Homo sapiens
attttgtcaggcacagctgactaacctttctcatgcaggtatgttctgggcggaggggccatctgcatggaacttctcaccaaacagggctggagcagtgcctactccatagagtcagtgatcatgcagatcagtgccacactggtgaaggggaaagcacgagtgcagtttggagccaacaaatctcaatacagtctgacaagagcacagcagtcctacaagtccttggtgcagatccacgaaaaaaacggctggtacacacccccaaaagaagacggctaaccctggagtatcacccttcctccctccccaggcaccactggaccaattacctttgaatgctgtatttggatctcacgctgcctctgtggttccctccctcatttttcctggacgtgatagctctgcctattgcaggacaatgatggctattctaaacgctaaggaaaaaaaacaaacacagaactgtttcaagtactcaagactgacttacagaccaaccaaccaccttgctggaacccttgctagcaggcattcttataaaagaaactttcgagcctccttatattgctggaaactcagctgtgctccagactagagcctccttacctatgctatggatttttaatttattttctcttatttcatgtacactgctttttttggttacagtgtatgatggatgtgtatgaaaaaaatgtatctttgggaaaacaattacagtttgttaatttgaagatgctggtcttgactcatctttatttttattcgcacatcccaccccatcccctgaactacttgggaggtggggaggggtacgagtccactgttgctttggtagagatgagaggccgcattttgctgctaaagcaagagaaacttggagctgaagcacacacctggtctgcccctagatttctcctcaaggcctctggagcaaccagcacttgcccccttggaatgcagagcctggcctgccaaactacaatgtggtaggctgaaacgatggtgttaattcttaggactacttttctagtcacagatgttttcaaatttctaagaaaaagaaaatgaggctcaagaggctgcttcgtagaattccttttgaatgaattgagtggggatggggacacagtctccaagtgtgtatgtggtcttttctgatctcagctgtgtggctgcaactcttcgctgttcattggttcctctcctggaaagtggcttctaaccagcactggatggtgatcattggtaagctttgctcacctccctctctcttgcttcatttggctttatcaaaaagaacagacctagctctgaatttgtttggcttgggaaattatggattctttcaagccactcccacaaggtgggtcctactagaaagggttagcattttaaggggggttgttctatacacctgtgtccttaccccaggctcaggaactgccagggagggaagatgaggtggggagtctgtactgagatggaactgtcagtgctgtgttgtatgtacttgctgttgtaaaagtttgggcatgactttgcatctagcgggtgctgcctgcatctctttgtctgtaagcttgctctgggactcagcctcttaggacctacgatgccagcagctctcattaacagtgaaatgacagaggccaaagatggccaagtgaagacccaagtctcagaaaacccagacttgggacaactgcctgggaactaggatgctagagcagttctgtaatgctttgagacacagcaattttcacattggccattctttcccctcccctaccccttttcttttgagggacttttaatgtttgctgctttaggtggatggagagtccaccagtcccactcaatgctgctctaactctacccacacccacctaattaggggtgctaataaaacatgctgaggttgagataaagacgggacataaggggaaaattcattccatagagctgaaatctggttttcaaggcctctgtggctttcttctgaacttaccaccagccctggctggaatgtagattgtgtttttagtaatgtgtactgtgagctgtcttctgtataatgtattttgtaatgtatttttctcatctaccaaaggatgaaacaaataaaattatttaaataaatagacacaataaaat

SEQ ID NO: 276171 - DNA, 2655 bp, Homo sapiens
  misc_feature (474)..(474): n is a, c, g, or t
gggtagcgcttcctgtggcgctgttcttctgagggggccccccgtgttgtctgaggagtcggtgcgaggacctgtgagtcttgcttgcgcacaccctggggccccggttcctgcacgggggactgtgtgactacacccctggggagggggaagcaggtgtggctcacgaccagtgtttgtggtgccgctatgtgggccttagtgttggcgagccgcaggggggttggacccgtgcgcactcgccaatagttcagggaatgggttggatcgccggatgagagtaaagatgagtccagaccagcatcgtccaaggaacaaaccgtaattgtgttcccgaagagacattggtgtcaaacacatccgtcatacactgtaacccaataaagcagtgtacatgaaataagagaaaataaattaaaaatccatagcatagctaaggaggctctagtctggagcacagctgagtttccagcnatataaggaggctcgaaagtttcttttataagaatgcctgctagcaagggttccagcaaggtggccttagcgtttagaatagccatcattgtcctgcaataggcagagctatcacgtccaggaaaaatgagggagggaaccacagaggcagcgtgagatccaaatacagcattcaaaggtaattggtccagtggagccaacaaatctcaatacagtctgacaagagcacagcagtcctacaagtccttggtgcagatccacgaaaaaaacggctggtacacacccccaaaagaagacggctaaccctggagtatcacccttcctccctccccaggcaccactggaccaattacctttgaatgctgtatttggatctcacgctgcctctgtggttccctccctcatttttcctggacgtgatagctctgcctattgcaggacaatgatggctattctaaacgctaaggaaaaaaaacaaacacagaactgtttcaagtactcaagactgacttacagaccaaccaaccaccttgctggaacccttgctagcaggcattcttataaaagaaactttcgagcctccttatattgctggaaactcagctgtgctccagactagagcctccttacctatgctatggatttttaatttattttctcttatttcatgtacactgctttttttggttacagtgtatgatggatgtgtatgaaaaaaatgtatctttgggaaaacaattacagtttgttaatttgaagatgctggtcttgactcatctttatttttattcgcacatcccaccccatcccctgaactacttgggaggtggggaggggtacgagtccactgttgctttggtagagatgagaggccgcattttgctgctaaagcaagagaaacttggagctgaagcacacacctggtctgcccctagatttctcctcaaggcctctggagcaaccagcacttgcccccttggaatgcagagcctggcctgccaaactacaatgtggtaggctgaaacgatggtgttaattcttaggactacttttctagtcacagatgttttcaaatttctaagaaaaagaaaatgaggctcaagaggctgcttcgtagaattccttttgaatgaattgagtggggatggggacacagtctccaagtgtgtatgtggtcttttctgatctcagctgtgtggctgcaactcttcgctgttcattggttcctctcctggaaagtggcttctaaccagcactggatggtgatcattggtaagctttgctcacctccctctctcttgcttcatttggctttatcaaaaagaacagacctagctctgaatttgtttggcttgggaaattatggattctttcaagccactcccacaaggtgggtcctactagaaagggttagcattttaaggggggttgttctatacacctgtgtccttaccccaggctcaggaactgccagggagggaagatgaggtggggagtctgtactgagatggaactgtcagtgctgtgttgtatgtacttgctgttgtaaaagtttgggcatgactttgcatctagcgggtgctgcctgcatctctttgtctgtaagcttgctctgggactcagcctcttaggacctacgatgccagcagctctcattaacagtgaaatgacagaggccaaagatggccaagtgaagacccaagtctcagaaaacccagacttgggacaactgcctgggaactaggatgctagagcagttctgtaatgctttgagacacagcaattttcacattggccattctttcccctcccctaccccttttcttttgagggacttttaatgtttgctgctttaggtggatggagagtccaccagtcccactcaatgctgctctaactctacccacacccacctaattaggggtgctaataaaacatgctgaggttgagataaagacgggacataaggggaaaattcattccatagagctgaaatctggttttcaaggcctctgtggctttcttctgaacttaccaccagccctggctggaatgtagattgtgtttttagtaatgtgtactgtgagctgtcttctgtataatgtattttgtaatgtatttttctcatctaccaaaggatgaaacaaataaaattatttaaataaatagacacaataaaat

SEQ ID NO: 276172 - DNA, 2047 bp, Homo sapiens
  misc_feature (154)..(154): n is a, c, g, or t
ggggggggcctgtcccggaggtggcggcggcgccatcttggcgaaggggggatcaggaagtgcggaccgcggcggcggcggcggcggcggcggcggcggaccggagcgcaggccggaggtcccggcccgccggccccggagcggagggacgcgnaggatgcagcagccgcagccgcaggggcagcagcagccggggccggggcagcagctggggggccagggggcggcgccgggggccgggggcggcccaggggggggcccggggccggggccctgcctgaggcgagagctgaagctgctcgagtccatcttccaccgcggccacgagcgcttccgcattgccagcgcctgcctggacgagctgagctgcgagttcctgctggctggggccggaggggccggggcgggggccgcgcccggaccgcatctccccccacgggggtcggtgcctggggatcctgtccgcatccactgcaacatcacggagtcataccctgctgtgccccccatctggtcggtggagtctgatgaccctaacttggctgctgtcttggagaggctggtggacataaagaaagggaatactctgctattgcagcatctgaagaggatcatctccgacctgtgtaaactctataacctccctcagcatccagatgtggagatgctggatcaacccttgccagcagagcagtgcacacaggaagacgtgtcttcagaagatgaagatgaggagatgcctgaggacacagaagacttagatcactatgaaatgaaagaggaagagccagctgagggcaagaaatctgaagatgatggcattggaaaagaaaacttggccatcctagagaaaattaaaaagaaccagaggcaagattacttaaatggtgcagtgtctggctcggtgcaggccactgaccggctgatgaaggagctcagggatatataccgatcacagagtttcaaaggcggaaactatgcagtcgaactcgtgaatgacagtctgtatgattggaatgtcaaactcctcaaagttgaccaggacagcgctttgcacaacgatctccagatcctcaaagagaaagaaggagccgacttcattctacttaacttttcctttaaagataactttccctttgacccaccatttgtcagggttgtgtctccagtcctctctggagggtatgttctgggcggaggggccatctgcatggaacttctcaccaaacagggctggagcagtgcctactccatagagtcagtgatcatgcagatcagtgccacactggtgaaggggaaagcacgagtgcagtttggagccaacaaatctcaatacagtctgacaagagcacagcagtcctacaagtccttggtgcagatccacgaaaaaaacggctggtacacacccccaaaagaagacggctaaccctggagtatcacccttcctccctccccaggcaccactggaccaattacctttgaatgctgtatttggatctcacgctgcctctgtggttccctccctcatttttcctggacgtgatagctctgcctattgcaggacaatgatggctattctaaacgctaaggaaaaaaaacaaacacagaactgtttcaagtactcaagactgacttacagaccaaccaaccaccttgctggaacccttgctagcaggcattcttataaaagaaactttcgagcctccttatattgtgctttaggtggatggagagtccaccagtcccactcaatgctgctctaactctacccacacccacctaattaggggtgctaataaaacatgctgaggttgagataaagacgggacataaggggaaaattcattccatagagctgaaatctggttttcaaggcctctgtggctttcttctgaacttaccaccagccctggctggaatgtagattgtgtttttagtaatgtgtactgtgagctgtcttctgtataatgtattttgtaatgtatttttctcatctaccaaaggatgaaacaaataaaattatttaaataaatagacacaataaaat

SEQ ID NO: 276173 - DNA, 1501 bp, Homo sapiens
  misc_feature (154)..(154): n is a, c, g, or t
ggggggggcctgtcccggaggtggcggcggcgccatcttggcgaaggggggatcaggaagtgcggaccgcggcggcggcggcggcggcggcggcggcggaccggagcgcaggccggaggtcccggcccgccggccccggagcggagggacgcgnaggatgcagcagccgcagccgcaggggcagcagcagccggggccggggcagcagctggggggccagggggcggcgccgggggccgggggcggcccaggggggggcccggggccggggccctgcctgaggcgagagctgaagctgctcgagtccatcttccaccgcggccacgagcgcttccgcattgccagcgcctgcctggacgagctgagctgcgagttcctgctggctggggccggaggggccggggcgggggccgcgcccggaccgcatctccccccacgggggtcggtgcctggggatcctgtccgcatccactgcaacatcacggagtcataccctgctgtgccccccatctggtcggtggagtctgatgaccctaacttggctgctgtcttggagaggctggtggacataaagaaagggaatactctgctattgcagcatctgaagaggatcatctccgacctgtgtaaactctataacctccctcagcatccagatgtggagatgctggatcaacccttgccagcagagcagtgcacacaggaagacgtgtcttcagaagatgaagatgaggagatgcctgaggacacagaagacttagatcactatgaaatgaaagaggaagagccagctgagggcaagaaatctgaagatgatggcattggaaaagaaaacttggccatcctagagaaaattaaaaagaaccagaggcaagattacttaaatggtgcagtgtctggctcggtgcaggccactgaccggctgatgaaggagctcagggatatataccgatcacagagtttcaaaggcggaaactatgcagtcgaactcgtgaatgacagtctgtatgattggaatgtcaaactcctcaaagttgaccaggacagcgctttgcacaacgatctccagatcctcaaagagaaagaaggagccgacttcattctacttaacttttcctttaaagataactttccctttgacccaccatttgtcagggttgtgtctccagtcctctctggagggtatgttctgggcggaggggccatctgcatggaacttctcaccaaacagggctggagcagtgcctactccatagagtcagtgatcatgcagatcagtgccacactggtgaaggggaaagcacgagtgcagtttggagccaacaaagtaaggatcctggtcctggggctggtggggctgggtggagccaagtacacttggggccactagcaggccaaggctgccttctttagaggaatgagcataaggcccccgggctggtggcattggatgagagggcctagggtgcccacaatggaacaactgtgccttggcccctag

SEQ ID NO: 276174 - DNA, 938 bp, Homo sapiens
aaactgtctatgggactattgggttggtttcaattaggaggattaaatgagatcataaagataaagtgtctatataggcaatatagggtccaataaatgttgggtattattattctgccattagctgaataattttgggaaacttaatttctctaaatttttattttctcctgtggagaaaaaagaattttaatgatatacatcttacacagtcctgtgagtcttcatgacagcatgtgtaaagcaccttctgtatgccagacacagagaaaacacatacaggttcccagaactctacagggtctgttctgttgagccgtgttgcctctctgatgaatgtttcaaaataaccatagacagaatatacacgatatatatgttgtgatcaaagaccgaatgagaatttttatgggagagtcataaatgtcttaaagacaactactaaatgcttttcttaagtcaatattttgaaggccaaaaaaaaatctactgaataaatataagaaataagaaggcttctgaaatcacaccacattttttaaacattcagtgactagtaccagaacctgatggataacttaggacgtttctgtcactaacagccagagaagatcgtcgggtggtcagagctggtcctggggtgcaggatgggcatatagcaggtctcagcctttgatgttccgcctgggtctgtccaggaaactagcaggaaaaactctaatcttggtagtattttagttcctgtgagccaccaacatacaatatttgtaatcagcatttcctacacagtctgatttcctctttgtccccatggtcttctcatttctatggctattaggaatctttccagacaggaaactgctattttcattaagatgctatcagagcacagattcaaaggaatgctacttaaggggagttttattccaaaataatga

SEQ ID NO: 276175 - DNA, 438 bp, Homo sapiens
gtccctgccagttctaatattctttaatacttctactgttgatctcagcacctatcatttaagtgcttcctggtatatagtctgtgtgtaactggagatacatggaggaagaacacatttggaagtagacacagtgagataggctgtgtgttccaggaagtggaacagattctcagtgttgtaggaattcagaggggagggagacctatgagtgctggagatggcacttgagctgaatcttagagaatgtgtgagcgaggccgggacactggttctcagctccagctggatgttagtattacctggggagtttttaaaaacatactgtggctgggccctgtggaccccatgccaggccaggtaaatcagaatcttggaggcaccacccttctcccctctctttcactcccttttcttctcccccatgggcatattttt

SEQ ID NO: 276176 - DNA, 401 bp, Homo sapiens
  misc_feature (44)..(44): n is a, c, g, or t
  misc_feature (52)..(52): n is a, c, g, or t
  misc_feature (59)..(60): n is a, c, g, or t
ttgtaacagacatccacatgattgttttcagaaatctagttttngagcctcnttcttcnnacagtaccatcattgctcagaatgtcttgggggcctcttgaatctgtactcaggtactgaagagcatctctggtggccaatcatcttttggagcttgtatttgtctttgggtgggagaaatgattaacatgtttttttagagacaagatgggattacaggtgagtgccaacttgcccggcctcctttcattctttaggcatgtttccttcagttctttgaatatacagttggttctcgctatttgcagatactgtatttgtgcattagcctacttgctaaaattatttgtaaaaccagctgactctgactgagcttttatgaaaaaatttcacctccaaag

SEQ ID NO: 276177 - DNA, 442 bp, Homo sapiens
  misc_feature (85)..(85): n is a, c, g, or t
  misc_feature (93)..(93): n is a, c, g, or t
  misc_feature (100)..(101): n is a, c, g, or t
gggacctttcttccccttgctggactcttctatcaaatctttcaggtactggatctccttggccaggaatccgccctctcttttngagcctcnttcttcnnacagtaccatcattgctcagaatgtcttgggggcctcttgaatctgtactcaggtactgaagagcatctctggtggccaatcatcttttggagcttgtatttgtctttgggtgggagaaatgattaacatgtttttttagagacaagatgggattacaggtgagtgccaacttgcccggcctcctttcattctttaggcatgtttccttcagttctttgaatatacagttggttctcgctatttgcagatactgtatttgtgcattagcctacttgctaaaattatttgtaaaaccagctgactctgactgagcttttatgaaaaaatttcacctccaaag

SEQ ID NO: 276178 - DNA, 291 bp, Homo sapiens
cacgccctgctaatttttgtattttgtagagatagggtttcgccacgttgtccaagctggtttcaaactgctgagctcaagtgagcctcccaaagtgctgggattacaggtgagtgccaacttgcccggcctcctttcattctttaggcatgtttccttcagttctttgaatatacagttggttctcgctatttgcagatactgtatttgtgcattagcctacttgctaaaattatttgtaaaaccagctgactctgactgagcttttatgaaaaaatttcacctccaaag

SEQ ID NO: 276179 - DNA, 552 bp, Homo sapiens
tagtaaatagtttgagagtaaagtaacaatatagatcccaaaattattagggtgttttgaaggtagaaccctgcatatatagctaacatttttcatttcttattctattctaattcattgatcgtgactcaaaaaatacagattcaaaactgtttactagtcagatatgtatgttcacaacagtctgacaaaaataaaattagtgttcgatatttagctgatatttaggatttgaaatatgcagttatcttctgtgaatacaaaattggcacttgctgcttgggtatgtggccttaattcggcagtgccagcacccacaaagctattgactgttgggatctttgtccgtaattagcattagctgccaccagtaagttacagcattttgataatggcttagtgactgaagagttagacatcttataggcataattatcttaaacagagattcaaacattttaaacatgcttttctaccccctaaaaaggcacatgacttatttaatacaaaattatttttaattgaagtcacaatgaaattttgtgaagcaaa

SEQ ID NO: 276180 - DNA, 777 bp, Homo sapiens
cttgtacttttcaattcctgtctgtccagcctgactggctactgccaagtctggtcactgaaagttttttatttgcagttgtgtaacattcagtcctttatcaatatatccttcatttcaaggaagctattatctgctaggcatcattaaaatatctgtatctcggtggggcattgtggctcacgcctgtaatcccagcactctgggaggccaaggcgggcggatcacgaggtcaggagattgaggccatcctggctaacacggtgaaatcccgtcactactaaaaatacaaaaaatttagctagatgtggtggcgggcacctgtagtcccagctactcaggaagctgaggcaggagaatggagtgaacccaggaggcagagcttgcagtgagctgagatcgcaccactgcactccagcctgggcaacagagcgagactccaaaaaaaaaaatctgtatctcttgcttaataacatatgtagcaagaactatatccttattacttagaagaagaaacaaaggttccaaaaagaataaataattaagttcacacagctagtaaatatatcagagctgtcttcatcacttagcggaatccacaatgattatttgtttctgtgacacctactatgaaattagatttaagaaacctttatgagcagaaaggctcctaaccctcacacctgtgtgatactctgctaattctgattatttttaatgtcctgctcccagtttgttttgagttgtgagctatgtgcagaaactcagtatggtcag

SEQ ID NO: 276181 - DNA, 1567 bp, Homo sapiens
ccagccgctgctttaagaggctgctccgcggtagcgagcggggccggagccgcagcccgaacgagcggaccgagccgaccgggcaggtgcacggctgcggggacggcagcggcatgaccggccaccacggctggggctacggccaggacgacggcccctcgcattggcacaagctgtatcccattgcccagggagatcgccaatcacccatcaatatcatctccagccaggctgtgtactctcccagcctgcaaccactggagctttcctatgaggcctgcatgtccctcagcatcaccaacaatggccactctgtccaggtagacttcaatgacagcgatgaccgaaccgtggtgactgggggccccctggaagggccctaccgcctcaagcagtttcacttccactggggcaagaagcacgatgtgggttctgagcacacggtggacggcaagtccttccccagcgagctgcatctggttcactggaatgccaagaagtacagcacttttggggaggcggcctcagcacctgatggcctggctgtggttggtgtttttttggagacaggagacgagcaccccagcatgaatcgtctgacagatgcgctctacatggtccggttcaagggcaccaaagcccagttcagctgcttcaaccccaagtgcctcctgcctgccagccggcactactggacctacccgggctctctgacgactcccccactcagtgagagtgtcacctggattgtgctccgggagcccatctgcatctctgaaaggcagatggggaagttccggagcctgctttttacctcggaggacgatgagaggatccacatggtgaacaacttccggccaccacagccactgaagggccgcgtggtaaaggcctccttccgggcctgagctgcccatctgcctagccggccactagggcaccatcttctcaagggcttccatgtcagcagacaccaaaccatctgaggcttcctccctggggggtgctggggaccctccttcagccagtttgctccttggtcaccctggaggcttctggatgggacccttgagtctggggcacccttcagctgccctggggacaggaaggacaggagctaagcagggtccaagcctggggctgcctctgctctccaagacccaaagaccctgggaacctcctctggtcttccccactggcagtggcagcagccccaccccgagcgcacactgtgatggaggagactgagctccctggggcgggcagctgacactaccagagagactcaagcaataattagaggtgggcagagctgccctctcggcattacctcttctgcaggctctgccatgcacgcacctcactgccaggccattaaaatcagcacccagcatgctggaggtgacgtggccttctccctccagccacctgctgccacgggcaggccctggctatagcttatacagtatctccccttgtccccacccagtcaccaaagccacctacatgacagtccatccctgttgaattaataaattaatgtatccatgcaacaaataccaattga

SEQ ID NO: 276182 - DNA, 1599 bp, Homo sapiens
agcggaggtgagcggggacctcgggggagcggggctccgcgtggcaagggcgcagtgtcccccggagagaatttccccgcagaagtggccgagctgccttctcggccggtacgtgagggaagggggcacttgggggcgcaagcatgtgtctgggtgtctacaccgagcagggtgtttgcgcacgtccgggtgtgagtcgtgggagcccgtggcccacaccagcctcctgggctgacgcggaagagagctccttcatcctgcctcagtttccttaggactcagagaaagggagaagaggcagaaggcccctcgcattggcacaagctgtatcccattgcccagggagatcgccaatcacccatcaatatcatctccagccaggctgtgtactctcccagcctgcaaccactggagctttcctatgaggcctgcatgtccctcagcatcaccaacaatggccactctgtccaggtagacttcaatgacagcgatgaccgaaccgctgcatctggttcactggaatgccaagaagtacagcacttttggggaggcggcctcagcacctgatggcctggctgtggttggtgtttttttggagacaggagacgagcaccccagcatgaatcgtctgacagatgcgctctacatggtccggttcaagggcaccaaagcccagttcagctgcttcaaccccaagtgcctcctgcctgccagccggcactactggacctacccgggctctctgacgactcccccactcagtgagagtgtcacctggattgtgctccgggagcccatctgcatctctgaaaggcagatggggaagttccggagcctgctttttacctcggaggacgatgagaggatccacatggtgaacaacttccggccaccacagccactgaagggccgcgtggtaaaggcctccttccgggcctgagctgcccatctgcctagccggccactagggcaccatcttctcaagggcttccatgtcagcagacaccaaaccatctgaggcttcctccctggggggtgctggggaccctccttcagccagtttgctccttggtcaccctggaggcttctggatgggacccttgagtctggggcacccttcagctgccctggggacaggaaggacaggagctaagcagggtccaagcctggggctgcctctgctctccaagacccaaagaccctgggaacctcctctggtcttccccactggcagtggcagcagccccaccccgagcgcacactgtgatggaggagactgagctccctggggcgggcagctgacactaccagagagactcaagcaataattagaggtgggcagagctgccctctcggcattacctcttctgcaggctctgccatgcacgcacctcactgccaggccattaaaatcagcacccagcatgctggaggtgacgtggccttctccctccagccacctgctgccacgggcaggccctggctatagcttatacagtatctccccttgtccccacccagtcaccaaagccacctacatgacagtccatccctgttgaattaataaattaatgtatccatgcaacaaataccaattga

SEQ ID NO: 276183 - DNA, 1718 bp, Homo sapiens
agcggaggtgagcggggacctcgggggagcggggctccgcgtggcaagggcgcagtgtcccccggagagaatttccccgcagaagtggccgagctgccttctcggccggtacgtgagggaagggggcacttgggggcgcaagcatgtgtctgggtgtctacaccgagcagggtgtttgcgcacgtccgggtgtgagtcgtgggagcccgtggcccacaccagcctcctgggctgacgcggaagagagctccttcatcctgcctcagtttccttaggactcagagaaagggagaagaggcagaaggcccctcgcattggcacaagctgtatcccattgcccagggagatcgccaatcacccatcaatatcatctccagccaggctgtgtactctcccagcctgcaaccactggagctttcctatgaggcctgcatgtccctcagcatcaccaacaatggccactctgtccaggtagacttcaatgacagcgatgaccgaaccgtggtgactgggggccccctggaagggccctaccgcctcaagcagtttcacttccactggggcaagaagcacgatgtgggttctgagcacacggtggacggcaagtccttccccagcgagctgcatctggttcactggaatgccaagaagtacagcacttttggggaggcggcctcagcacctgatggcctggctgtggttggtgtttttttggagacaggagacgagcaccccagcatgaatcgtctgacagatgcgctctacatggtccggttcaagggcaccaaagcccagttcagctgcttcaaccccaagtgcctcctgcctgccagccggcactactggacctacccgggctctctgacgactcccccactcagtgagagtgtcacctggattgtgctccgggagcccatctgcatctctgaaaggcagatggggaagttccggagcctgctttttacctcggaggacgatgagaggatccacatggtgaacaacttccggccaccacagccactgaagggccgcgtggtaaaggcctccttccgggcctgagctgcccatctgcctagccggccactagggcaccatcttctcaagggcttccatgtcagcagacaccaaaccatctgaggcttcctccctggggggtgctggggaccctccttcagccagtttgctccttggtcaccctggaggcttctggatgggacccttgagtctggggcacccttcagctgccctggggacaggaaggacaggagctaagcagggtccaagcctggggctgcctctgctctccaagacccaaagaccctgggaacctcctctggtcttccccactggcagtggcagcagccccaccccgagcgcacactgtgatggaggagactgagctccctggggcgggcagctgacactaccagagagactcaagcaataattagaggtgggcagagctgccctctcggcattacctcttctgcaggctctgccatgcacgcacctcactgccaggccattaaaatcagcacccagcatgctggaggtgacgtggccttctccctccagccacctgctgccacgggcaggccctggctatagcttatacagtatctccccttgtccccacccagtcaccaaagccacctacatgacagtccatccctgttgaattaataaattaatgtatccatgcaacaaataccaattga

SEQ ID NO: 276184 - DNA, 792 bp, Homo sapiens
  misc_feature (3)..(3): n is a, c, g, or t
cgntagtattggtctttccgtatggtagctggctctttccctaagcagcctgaggtgatctgtgaaaatggttcgctattcacttgacccggagaaccccacgaaatcatgcaaatcaagaggttccaatcttcgtgttcactttaagaacactcgtgaaactgctcaggccatcaagggtatgcatatacgaaaagccacgaagtatctgaaagatgtcactttacagaaacagtgtgtaccattccgacgttacaatggtggagttggcaggtgtgcgcaggccaagcaatggggctggacacaaggtcggtggcccaaaaagagtgctgaatttttgctgcacatgcttaaaaacgcagagagtaatgctgaacttaagggtttagatgtagattctctggtcattgagcatatccaagtgaacaaagcacctaagatgcgccgccggacctacagagctcatggtcggattaacccatacatgagctctccctgccacattgagatgatccttacggaaaaggaacagattgttcctaaaccagaagaggaggttgcccattgcgatactacatcgcaatggggtggagaggattccttcacttgtcccattaaccctcttctagtctagatgagatgaaatctattaatgtgtgtgtagaagaaaacgtatgttcttctactcagcattgccctcttccacctcctcacttcaccctccgagtagcttgtttaatcaagaactgtaatgaatgtctcttgtcctcaattatgcccatgcgatatacg

SEQ ID NO: 276185 - DNA, 216 bp, Homo sapiens
  misc_feature (3)..(3): n is a, c, g, or t
cgntagtattggtctttccgtatggtagctggctctttccctaagcagcctgaggtgatctgtgaaaatggttcgctattcacttgacccggagaaccccacgaaatcatgcaaatcaagaggttccaatcttcgtgttcactttaagaacactcgtgaaactgctcaggccatcaagggtatgcatatacgaaacctctgacctaccccggccta

SEQ ID NO: 276186 - DNA, 688 bp, Homo sapiens
  misc_feature (3)..(3): n is a, c, g, or t
cgntagtattggtctttccgtatggtagctggctctttccctaagcagcctgaggtgatctgtgaaaatggttcgctattcacttgacccggagaaccccacgaaatcatgcaaatcaagaggttccaatcttcgtgttcactttaagaacactcgtgaaactgctcaggccatcaagggtatgcatatacgaaaagccacgaagtatctgaaagatgtcactttacagaaacagtgtgtaccattccgacgttacaatggtggagttggcaggtgtgcgcaggccaagcaatggggctggacacaaggtcggtggcccaaaaagagtgctgaatttttgctgcacatgcttaaaaacgcagagagtaatgctgaacttaagggtttagatgtagattctctggtcattgagcatatccaagtgaacaaagcacctaagatgcgccgccggacctacagagctcatggtcggattaacccatacatgagctctccctgccacattgagatgatccttacggaaaaggaacagattgttcctaaaccagaagaggaggttgcccagaagaaaaagatatcccagaagaaacttgaagaaacaaaaacttattggcacgggagtaaattcagcattaaaataaatgtaattaacaaggaaaaaaaaaagtaaatccatagaaaatagagg

SEQ ID NO: 276187 - DNA, 740 bp, Homo sapiens
tccacgttttgcacacacagcgaacgtacaccaccaaacgtagacagttcagtagctaagaaatcaagaggttccaatcttcgtgttcactttaagaacactcgtgaaactgctcaggccatcaagggtatgcatatacgaaaagccacgaagtatctgaaagatgtcactttacagaaacagtgtgtaccattccgacgttacaatggtggagttggcaggtgtgcgcaggccaagcaatggggctggacacaaggtcggtggcccaaaaagagtgctgaatttttgctgcacatgcttaaaaacgcagagagtaatgctgaacttaagggtttagatgtagattctctggtcattgagcatatccaagtgaacaaagcacctaagatgcgccgccggacctacagagctcatggtcggattaacccatacatgagctctccctgccacattgagatgatccttacggaaaaggaacagattgttcctaaaccagaagaggaggttgcccattgcgatactacatcgcaatggggtggagaggattccttcacttgtcccattaaccctcttctagtctagatgagatgaaatctattaatgtgtgtgtagaagaaaacgtatgttcttctactcagcattgccctcttccacctcctcacttcaccctccgagtagcttgtttaatcaagaactgtaatgaatgtctcttgtcctcaattatgcccatgcgatatacg

SEQ ID NO: 276188 - DNA, 995 bp, Homo sapiens
  misc_feature (39)..(39): n is a, c, g, or t
  misc_feature (52)..(52): n is a, c, g, or t
  misc_feature (59)..(59): n is a, c, g, or t
  misc_feature (75)..(75): n is a, c, g, or t
  misc_feature (83)..(83): n is a, c, g, or t
gccaggaggggccgctaggggcgagagttgagtttaggnccgccttgcgagntactacnaattttctggtgtaanaacatttnttggctttcatcttaaaaaatcagcagaagaaaaaagaaaaaaaaatagggcaaatgaaaaaggaagacaatgtccagatcaaagagttaaatatggacacaagaaatgcaagcagctgtaaagtgaaagatcaagaaccactctgagggctcagaagtagaaactagtgaactccaaaagcaaccctcaaagaaaaacaaaaaagcaagaaagattttaagtatccaacttacctgagtcaaaaaagggaagaagaaaagaagtagctctgaagatgtagaatgcctcgctcccagagcaaaagtaaagaaaatcactcagaaagacaacattaaaaaaagaagcctcagaagtttccaaagaaaacacagctatccctctcacacttaccagttcttgtggaacaaaaggatgctggtgatatccaatgagcggctgccttcgccctcacagggactccttccgactctcgattacgagagacattccttcggcgtacgaggtttttctgagagccctcctctaccccccctcttgccccaccctcttgttccttttcgaatcacgtggccgcccatttcgcatatacctgaccctggcacgcgcgtcccttttttccggcccagtgttctcctccctcctcttctgcgtgtttccgtgccccgcggatgctcccccccccctcctgtgtcccaggcctcgagtcggaggtggtcccgggtgcctgtgctccgctggttgcgggagagtggcgttcgttctgcttttttcccgttcttgagctacatctgtctgtttgagtccgcccctgcacgcccggtttcgttaccctcccttcttgggcctctccttctcttttacttttctcttgccactcccgtgttgtctaattcgctatttcgcacacaccg

SEQ ID NO: 276189 - DNA, 1162 bp, Homo sapiens
tcaggcatcaatgaaagtgtgcctttagcatcctctgaaacaaagggtaaatcagctgcaattaattattgtcatcagtgccagattcgaatttggaactctctctcagaggatttcagccaagaaaaactaagaaactatttctcccattgcccctacccctagacaagacttagcatagacaaaaaaacttccaaatctgaccaaaaacgaagatcatccaagtcttctggtgtaagaaacaattttatggctttcatcttaaaaaatcaagcagaagaaaaaagaaaaaaaaatagggcaaatgaaaaaggaagacaatgtccagatcaaagagttaaatatggacacaagaaatgcaagcagctgtaaagtgaaagatcaagaaccactctgagggctcagaagtagaaactagtgaactccaaaagcaaccctcaaagaaaaacaaaaaagcaagaaagattttaagtatccaacttacctgagtcaaaaaagggaagaagaaaagaagtagctctgaagatgtagaatgcctcgctcccagagcaaaagtaaagaaaatcactcagaaagacaacattaaaaaaagaagcctcagaagtttccaaagaaaacacagctatccctctcacacttaccagttcttgtggaacaaaaggatgctggtgatatccaatgagcggctgccttcgccctcacagggactccttccgactctcgattacgagagacattccttcggcgtacgaggtttttctgagagccctcctctaccccccctcttgccccaccctcttgttccttttcgaatcacgtggccgcccatttcgcatatacctgaccctggcacgcgcgtcccttttttccggcccagtgttctcctccctcctcttctgcgtgtttccgtgccccgcggatgctcccccccccctcctgtgtcccaggcctcgagtcggaggtggtcccgggtgcctgtgctccgctggttgcgggagagtggcgttcgttctgcttttttcccgttcttgagctacatctgtctgtttgagtccgcccctgcacgcccggtttcgttaccctcccttcttgggcctctccttctcttttacttttctcttgccactcccgtgttgtctaattcgctatttcgcacacaccg

SEQ ID NO: 276190 - DNA, 361 bp, Homo sapiens
atctgtgtaaactccctcactacccaagcaaaatgcctctgcccacactccaacatctataatgctttcaacttagagcatgattactgataaaatgccccatgattggaaagagtgtgggagtgaagatgatttcagggcaaatttgagcagagaaacttttcttttgggccataacagtcacagagatctaattgccttcccaccttaatgttttaaaaagagcaaaataaacctcagagagcaaatgataaagatcaaagtaggggtcaatgaaatagataacagaaatacatagagaaaatgactgatttgagaagattacaaaatattgatatatctctagtcgcgctaattagga

SEQ ID NO: 276191 - DNA, 485 bp, Homo sapiens
gtatctcttccaggttttggtatcaggatgatgcaggccttatagaatgagttagggaggagtccctcctttttaattttttggaatagtttctgtagaaatggcaccaactcatcatcgtccctgtggtagaattcagctgtgaatgtcttgtcctgggcttttttggttggtaggctactccttactgcctcaatttcagaactcattattggtctattgagggattcaatttcttcctggttcagtcttaagagggtgtatatatccaggaaggtttttattttcattcctctcaaagtattttctaatttctcttgtgacttcttctttggctcactggttttaaagaacgtgttgtttcatttccacatatttgttaattttccagttttcttcctatcaatttctagtttcattccattgtggtcaaaaatacagttattatttcaaccttttaaaatatattgagacttgttttatgg

SEQ ID NO: 276192 - DNA, 280 bp, Homo sapiens
aaaaatggcaacagtggacttacttgatacagggttgccacaaacctccaatctgtaaaaaatgcaacaaagaaccatgataaaatgagatatacctgtacacacatatgattatatgcatattattttacaatagaagaccttatacattattataggctaaagatgaatgaaaggatactcagacaaggaaagcttatagatacaaaactgagaaaggctaattgatagagatcttgaaaagaggagggattgagagagagatggaacacgtttctga

SEQ ID NO: 276193 - DNA, 417 bp, Homo sapiens
caagaaggcaaagtgtcagcttgtttgacctcggatgggaatgtgtgctctggacaactcacgttttttgctcctctgctaatgttcatgaacatgaaagcaccgtgaatacagattttgaggttacattttagtgagtaggcaaatttgcgtatatggagtccataaataaagaggatcaactctatttgcttttttaaaactgacaatatattaaggtaattaaaataaattcatacatagccattgtacaggcagaatataatacataagagtttaaaaatgtaatgttggatttgatcaaaggaagggggaaattatgggttggaaagaacaggaaggcttcatttttgcatctttgttgaaaactaggtttgaaaagaggtggggattctggaagcacatagagtcactgag

SEQ ID NO: 276194 - DNA, 313 bp, Homo sapiens
tttacctctagcattcctcatagtccttgctgacgagggcagctgtgatatagaaaaataacatccctttatggctatctttgccaaaatagcttctcactctgcaggcccagtctgatccaaacctcagaatctcctggactaacaacaactcaggccattgtgatttagaagtatctcagcactagagaagacaccaggatggccaggagacaatggcagcattagaaggccctagttgaacagaatatataatttcatttaacagctgctgaagctcattacgctggcatgaatgattctttacaaccac

SEQ ID NO: 276195 - DNA, 282 bp, Homo sapiens
tgtgagaactgtccaagggtgtggctggagcaggaataataaaaaccaggtgccactccaaccgctttgcataaatctagacatgtaatcctcacaacaaccccttgaggtagatacaattatgtccccctttttccagctggggcaactgaagcacaggtaatcttcctgacgttgtccagctagcagtgaaggagcagggatgaagcaaacccaggttccagggtccacattcctcctcaagcacttgcccacactgcctgtcaaaaaggaagggagaga

SEQ ID NO: 276196 - DNA, 335 bp, Homo sapiens
aaatacaaaaatcagccgggcatggtggcgcacacctgtaatcccagctactctggtggctgaggcatgaaaattgcttgaaccagggaggcggagattacagtgagctgagatcctgctactgcactccagcctgggtgatagagtgagagactgtctcaaaaccaaaccaaaacaaaacattgtatataaataaatgttatagcttgttatatggcttttaaaatgtaaatatgtatcaggtagtttgtagctataacaagaagtgatatctctaaaatatgcactgttaatttgtagtagaatccattaaatgtctaaatttctttttattt

SEQ ID NO: 276197 - DNA, 435 bp, Homo sapiens
aaacttggtgccaaatgaaatcattcaaattatagtcactcagttgtcattccaaatggtgtattttaaatttcgttgttgcttcatattttatatgtccccatatacaaattctattgctaagaagtggagctgacatttcatgttttttgtcacttacagagaaaactagctatttctgatctcttccactcaaataggcttagtttaagagaagaaacagaaccaacagccttactgtataatgatcctaagttattcatttagtgagtaattttttttattcagcaaactaagagttgggtttcagcaatgatatggataaaaaataatgttttatcacttcatacaaataataccataactgaacatgtattaataatatctagtaatgtatccagtaaaatattatcttagattgataacatcttaatc

SEQ ID NO: 276198 - DNA, 419 bp, Homo sapiens
actgatggcttacatcctgtctctgagtaaagaatcttatcgtgaggcactcaaattctattgcgagttcctcaaactatgtatttattaattgtcaggttactgattaatactgacattgaaagggacattgttttctttctaaatcataaagctctgctgatttgtttttactgattgtcttgtgcataaaacattttagcctgtacgctgtcatccataggcaatgattgtaacctctgtattgtaccctccaatggaaaaggataactccgatatgaggagtcccccttccttctcctaaacagtcttataaaagcattccaacttgtaacagatgttggaacatgcccaactttgttggtgtatcttactggataaattctcacatttggcttccaataaacttttatcaattt

SEQ ID NO: 276199 - DNA, 811 bp, Homo sapiens
tcccaggagtcagttacaacatgttcactagactgactatccccattgcccaagttgacacaagaggaaaccagcttccatcttacctcatctgaataaatctgccacaagcccatggaaaccccaattaacattgacagttaattgtgtacataaattacatttattacatttaattgtgtatatataggggatgttataggtttggaataagtggcccaacatttccaattatactgactttcactgggcttttttttaggctgttgcactttttctccacatgcttgcaatacaatactctcaaaataaaacgcagacaggtacctagtctccattttacctttagtactaatcctgtgtattagtctgttctcatgctgctaataaagacataacccaaactgggtaatttataaaagaaagaggtttcattgactcatagttcagcatggctagggaggcctcacaatcatggcagaaggtgagtgaggagcaaagtcatgtcttacgtggtggcacccaagagagcttgtgcaggggaactcccatttataaaaccatcagatctcgtgagacttattcactatcacactattgtgttgatattgtgttcacacaccaataatgatggtttatcactcactccatttccaaacccaccttcccacccacctctcaccaaacacacaaagacacactctttccctccactgattccaccagtatagccatatttctctttctggttaaatttatactaaatgtttacatttatataacttaataaatattatttttttccaaaaaa

SEQ ID NO: 276200 - DNA, 454 bp, Homo sapiens
  misc_feature (449)..(449): n is a, c, g, or t
tgaggacaaagtgagatctcatcactctacagagggagagttaagccccataataagccccgaatcctagcatttgctaaagtggaaatagtgtgggcaggtaggggaatagtcagttacgtattcgtctggcgctcggtaaatctgcacttcacacaggtcaggtgaatatggtccacgtttcatctgtcgctctctgcttgggaacaaaataaaaagcttcttgcatgacttagctttcagcttaatcctttccttttggcagagtaaatcttcctttcaccatactaaattaaattttggtattttcatacagtggaatattatatagctattaagtgatgtctttgggcaaattacttaacgtctctggcctttgacatctccttccataaaaggagaaactccagcctgggtgacagagcgagactccctctcaaaaaaaattntaact

SEQ ID NO: 276201 - DNA, 494 bp, Homo sapiens
tctcgcctgctctgcggcctccattcatgctgcacacagactggttctcctcctctaactactggccaaaaagggaagggagtacaagcatcaaagacaaatggttagtttaggaatcaaatgctaagactgaaatccaagtgagatatgaatctattctccaaagatgaacaaaggagtgtttataagatgggggaaaatccattcatttgatctagtgcctatattccaggtactagatgggctggatgctggggacggagatatgcaaggcaaagtcctgctctcaaataattcagaataatggaatagagaacactcaaggaaacagagattgcaaggaggttccctcgctataattataggttaaatttataacctatagaaaagattctttgggacttaggctcttcagcagattcttttctggtgattgctattatctcacccaacaggattaacaacctagacttaggccgggtatggtggctcat

SEQ ID NO: 276202 - DNA, 489 bp, Homo sapiens
ccctctcttctggaagcccctctgcagcactcctcttgggagtagaaaaggaagtggtcaagggaatggggtttcgccgtgttgtccaggctggtctcaaactcctgggctcaagcaatctgcccacctcagcctcccaaagtgctgagatgacaggcatgagccactgtccctggcccagacctacatttgggagctgatccgtcttgctctcagttagggcccagcccttctgtggggaccaggaaaatctttgctcacctggagaagctgctggttcagcccaactttatctaacgccaaagcctcatttaaggcactgagcttgacagctgcagcccgaagatcagctacttctgtcttcagggtgttttcagaactcgacagctctgcaattgactgctctgcctaaaaaacaaaaaggattaaagagtttcatatttccaattttcctggaacagtaaacagttcacattcccaacactgctg

SEQ ID NO: 276203 - DNA, 411 bp, Homo sapiens
tctcgcctgctctgcggcctccattcatgctgcacacagactggttctcctcctctaactactggccaaaaagggaagggagtacaagcatcaaagacaaatgacctacatttgggagctgatccgtcttgctctcagttagggcccagcccttctgtggggaccaggaaaatctttgctcacctggagaagctgctggttcagcccaactttatctaacgccaaagcctcatttaaggcactgagcttgacagctgcagcccgaagatcagctacttctgtcttcagggtgttttcagaactcgacagctctgcaattgactgctctgcctaaaaaacaaaaaggattaaagagtttcatatttccaattttcctggaacagtaaacagttcacattcccaacactgctg

SEQ ID NO: 276204 - DNA, 804 bp, Homo sapiens
gagtaaactcactagtagttcttcctatgaatatttctgtcctgggatccagagcaagattcttgccaaagtaaaaatcttatattattttcttaaaatacatagccttggttcaaatgtcatggcaattttttcaacttaacaaaactaatatttgccaggaaaactcatttaaaattcatccaaatattgtgaaaaaagtcgccattcgattgcaaactatttagacttttttttaaaaaacagaatacagagaatttgtaaaaatatttactgagaaaacacacaaaaaagactgacctactcgaaatgctagtggttttcctttatttgattgttcttgttctctgtggtaaagtaatactttctgaagaagcacctgggctaactcctttttcctgctgtgagttgattctacaagagttatggcctctgctaaacaggccctttgcccttggattaaaccagtataaagtttatccacaaatctttgctctttatcagaaagtccttctgtgtggtcctttaaggttgtttgtacacataattttctctttaagccatctgacagcagcatccactttgtacaatggagtccaagagaattaaacggctgagcacatgggattcctgatccgagatgagtacttgagtgaaagatgaagtggtaacatcggaaaggtgctcttaaaaggccttttaggaaatgctggtgaggatgtggtagcagcatgggcatattcgttttatttgtaactggagaaaacactggatgcgttttggctcaatgtgattgtgacctcc

SEQ ID NO: 276205 - DNA, 1264 bp, Homo sapiens
tcctcgatagtcgacaacgaaatgagaggaatgttaggtgggttcggcattacataaatcactcactctgtggacaagagccacgacaggcagcctctgctacatcttccttacggcctggcaaaagcaatctccctaaatgccctcggttggcttccgttccatttcccacagcagctattatgaacattcactgtcccataatctccccgcttgatgaggactacagcacctacttcacagaggaaataaaggcaagaacttcctaggcttctccctctcccgtactccacaggtgctaatgcagccaggaaacacaacaggagcaaagaggggcctggccttatgcatggaagctgaaggactgaaatttgcatttgatcatcttcaacttctggcacctgttgtcgcagttttctgagtgcccactgagctatccacaagctggcctcctctgaggagtacaacactcccaaactacttctctcagcttccacctaactctgcagaactcccttcctttagcgagaccaaacttagctagcagttagaggtcacccaactgtgccaattcctactaaattgtaacagaaagcccccagacctctgcaattgaaaaagaatcagccatacttaccaccactagtacaagaagaagggtccacagctagcacagataatttgtgccctctctcagtaagcatttttccaaaatattctataaatgttgattttccagcaccagggggcccagacaatcctactcgaaatgctagtggttttcctttatttgattgttcttgttctctgtggtaaagtaatactttctgaagaagcacctgggctaactcctttttcctgctgtgagttgattctacaagagttatggcctctgctaaacaggccctttgcccttggattaaaccagtataaagtttatccacaaatctttgctctttatcagaaagtccttctgtgtggtcctttaaggttgtttgtacacataattttctctttaagccatctgacagcagcatccactttgtacaatggagtccaagagaattaaacggctgagcacatgggattcctgatccgagatgagtacttgagtgaaagatgaagtggtaacatcggaaaggtgctcttaaaaggccttttaggaaatgctggtgaggatgtggtagcagcatgggcatattcgttttatttgtaactggagaaaacactggatgcgttttggctcaatgtgattgtgacctcc

SEQ ID NO: 276206 - DNA, 1223 bp, Homo sapiens
tcctcgatagtcgacaacgaaatgagaggaatgttaggtgggttcggcattacataaatcactcactctgtggacaagagccacgacaggcagcctctgctacatcttccttacggcctggcaaaagcaatctccctaaatgccctcggttggcttccgttccatttcccacagcagctattatgaacattcactgtcccataatctccccgcttgatgaggactacagcacctacttcacagaggaaataaaggtgctaatgcagccaggaaacacaacaggagcaaagaggggcctggccttatgcatggaagctgaaggactgaaatttgcatttgatcatcttcaacttctggcacctgttgtcgcagttttctgagtgcccactgagctatccacaagctggcctcctctgaggagtacaacactcccaaactacttctctcagcttccacctaactctgcagaactcccttcctttagcgagaccaaacttagctagcagttagaggtcacccaactgtgccaattcctactaaattgtaacagaaagcccccagacctctgcaattgaaaaagaatcagccatacttaccaccactagtacaagaagaagggtccacagctagcacagataatttgtgccctctctcagtaagcatttttccaaaatattctataaatgttgattttccagcaccagggggcccagacaatcctactcgaaatgctagtggttttcctttatttgattgttcttgttctctgtggtaaagtaatactttctgaagaagcacctgggctaactcctttttcctgctgtgagttgattctacaagagttatggcctctgctaaacaggccctttgcccttggattaaaccagtataaagtttatccacaaatctttgctctttatcagaaagtccttctgtgtggtcctttaaggttgtttgtacacataattttctctttaagccatctgacagcagcatccactttgtacaatggagtccaagagaattaaacggctgagcacatgggattcctgatccgagatgagtacttgagtgaaagatgaagtggtaacatcggaaaggtgctcttaaaaggccttttaggaaatgctggtgaggatgtggtagcagcatgggcatattcgttttatttgtaactggagaaaacactggatgcgttttggctcaatgtgattgtgacctcc

SEQ ID NO: 276207 - DNA, 934 bp, Homo sapiens
tcctcgatagtcgacaacgaaatgagaggaatgttaggtgggttcggcattacataaatcactcactctgtggacaagagccacgacaggcagcctctgctacatcttccttacggcctggcaaaagcaatctccctaaatgccctcggttggcttccgttccatttcccacagcagctattatgaacattcactgtcccataatctccccgcttgatgaggactacagcacctacttcacagaggaaataaaggtgctaatgcagccaggaaacacaacaggagcaaagaggggcctggccttatgcatggaagctgaaggactgaaatttgcatttgatcatcttcaacttctggcacctgttgtcgcagttttctgagtgcccactgagctatccacaagctggcctcctctgaggagtacaacactcccaaactacttctctcagcttccacctaactctgcagaactcccttcctttagcgagaccaaacttagctagcagttagaggtcacccaactgtgccaattcctactaaattgtaacagaaagcccccagacctctgcaattgaaaaagaatcagccatacttaccaccactagtacaagaagaagggtccacagctagcacagataatttgtgccctctctcagtaagcatttttccaaaatattctataaatgttgattttccagcaccagggggcccagacaatcctacggtggaaagagatcttctaattcaatgaaacaaatgaaatcagaactacgatcagttttactgagtaaaatattagactaccttctatttcccctaagtgtattaaaaccaccaattaatatatttcaacatgtcctaaaaggggaatagaaagtggttctctaaaaaaaaaaacacggcctccttggcctagggggggaccctcgggacc

SEQ ID NO: 276208 - DNA, 410 bp, Homo sapiens
gagggtagaacactgaccgaatcccagactcactacctcaggggctgagatgggtccaaaggggcccttaacctctcacttgatcacctgactcttaccgctgtcattgatctgacatgttctcctgggcgctgtcccagctctgtcccagcttctcagcactgtgtcctggtcagccctgagggctcatttcctttatccatactgaggaccaagacctgtctttcctgtagggcagtgagggccacgggctagtgcctgagccgatgagtgcactgctggtactgtgctgagccctggacaagggtgtaggttgctctaaaaaacaacttcccaatattctacaaaataacgttcaaactgaacagagcttgactgaagattcttcttacttcatttgttttcatgct

SEQ ID NO: 276209 - DNA, 891 bp, Homo sapiens
ggtcgactaccaggctgcgttaggagctaccgtcttcagctttttctcgctgctgagagctgtttgttactcagtaaaactcttctccaccgtgctcacccttcagttgaccgtgcaacttcattcttcctggacataaacccgggacccacagaacagcgggtgcaaaaagggctgtaacgctttcctggccggatcgccaagctgcaggggtttagatagctcatggttctgctggttaggaagttcaagcgcaaggccctgacttctggtaagtgctttcatgctgcatcaacacgactaagaaggtcaaagaagaagtggacatctttcaactgatgaactgtacagagagaggagcacttttggaataatcctcacagcctaaaggccaatgatgacacagatggtgatgtttttaaggaggtgatgatagaagatatttgatcccttggtttggagtctaccaactgagataaaggagaagagctgagaagccttgtaacattagtattctttgtctctttgtggatgacctttcacatttaatatcgaacatcagaaactgaattcacgaaagcaagggagagtcacaccttcctttcataaatctcttgtcagtgcacctttgagccacctaggagcccaatcagactcccttaaaatagtcttgggtccagttccgcgcacatcggagccgcaacacgcggatccccgaattggtcctaaagtccttaaatagttgcacacccagagacttcgtcgaacctctcgggactcgcccggcaggttaccattctcacagtgttccacaaacgcctggcgaacactctcgtcgcaaccacactctattcgtgaacaccaccacagcaaagaacgggttctccttgc

SEQ ID NO: 276210 - DNA, 288 bp, Homo sapiens
  misc_feature (209)..(209): n is a, c, g, or t
  misc_feature (227)..(227): n is a, c, g, or t
ggagtttgaaagaataaagagatggagggaacgcatcataacctggtatgacctggatcaacataaacaaaggggtttagatagctcatggttctgctggttaggaagttcaagcgcaaggccctgacttctggtaagtgctttcatgctgcatcaacacgactaagaaggtcaaagaagaagtggacatacttcctttggcctggagnaaacttaggagcctgccntttcagtgtcatctcaggagcatccttgaaagaatcagggaagaaagtgcagaaatcagag

SEQ ID NO: 276211 - DNA, 240 bp, Homo sapiens
ctctgtctctattaaaaataacaataataataatgaaatacttaaaacccaagaaaaaaatcttgaaagcagaataaaaaagatttatcatatatgaaggaatgccaataatattaacagctaacttctaattagaatcgatagaggacaggaggcatgaggatgtcatattcaaagtgttgaaaatggctactcaggaggctgagttgggaagatcacttgagcccagaatgtcttaga

SEQ ID NO: 276212 - DNA, 428 bp, Homo sapiens
cagtcacactgatgaggcaaaaacaattctctctggtaaaactggtttaaacgtggcaataaatcaatctaaaagcaacttaaagattctttcatttctttttctgacagattcacctattgacattatgaaatttctgtgtaacaagtaactatttggtgtgttctatcaggtcaagcttactcacatcttaaatggtttcaacatccaaattcctaagcaaggcttcaaatgaagaaagaaaatatcaacatatgctagatcgttcaaagtgaccttgttttaattaaccatttgaaattttttttactatacatcacaagtacaactccttcctccccaaattccaccactggtcatttaacaaacccattttatatggcaaacatgaatcttctacatggtacaccctttcccaaaaaactgtc

SEQ ID NO: 276213 - DNA, 388 bp, Homo sapiens
atggccacaggtggtcatctagcttccttcaaattcacttatctcatggatgtgattagtgggggcctaacattttgtttattttttaaagtagaattaggccgggcacggtgactcatgcctgtaatcccagcactttgggaggccaaggcaggaggatcacctgaggccaggagtttgagagcagcctggccaagatgatgaaaccccgtctctactaaaaaaaaaacacaaaaaattagccgggtgtggtggtaggtgcccataatcccagctactcaggaggctgaggtggaagaattacttgaacccaggagctggaggttgctgtgagctgagattgccccactgcactccagcctgagcaacagagcgaggctcccatctc

SEQ ID NO: 276214 - DNA, 197 bp, Homo sapiens
tgtggatggaacagagttagggaagcaaagaagtggcagctagatgaatcagaaggggaagaggcagatagtgtgcagggccatgtagagccaatgcaagaacttttactctgagatgagaaaccagtggacgggttttgtttctttttgagacagagtctcgctctgtcgcctaggctggagtgcagtagcacgat

SEQ ID NO: 276215 - DNA, 413 bp, Homo sapiens
ttcaaggaaaaacgtattagtttgttatgttaaattaagccacccacacacccacactagaaactgttttgtgttggaaacaaaataaatgacttcatttccaagcccttcctatacttcatcaccaaaccttaaataatagcaaaggaataagcatgggaaatgagaaaaataaagtactagcagcagtagtaatagaattataataacagtagtagtaataaatattcaaggagttttgtccaccttcggagctcaggctgtgaaccacagtggtttacttattgaaaatcatcacgaggccgggcgcggtggctcatgcctgtaatcccagcactttaggaggccaaggcgggcggatcatgaggtcaggagatcgagaccatcctggctagcatggtgaaaccccatct

SEQ ID NO: 276216 - DNA, 489 bp, Homo sapiens
ccagaccagtccctttcaccagtattacttttatgagcaattaaaatatagaactaataataatatcatttatgaagtaatataacattataaatatatactatgtattatacatttaaactataataataataaaactggtcattagagtactttttgcctagaaatttcctccgtgtacttttttaattgtggtgagattcagctgtactctaaaacatgtaattatccactgtgagaaataaaagatagttaagtggttcccaagaacatattagacactttgagctaacatgagaatgatttcatgtcaaatgagatgaactctatggcttcacaaatccacttgtctttggcacagggaaaatgaatctttttaatatctgagagttaggttatagagattcatccattataaatttaaacttattatattacacaggttaagaatattttttccatcaagggccactgaaccagagggttaaa

SEQ ID NO: 276217 - DNA, 983 bp, Homo sapiens
cacctgtttattgaatatttacctcccatgaagtctttcagcctattggtggtattttactgttcagatatatgttagaatttcactgatacttactgggcgcggtggctcacacctcctaattatgttttattccacctgcccctatgtataagcgttaccaccctaattatgctttttgtttttcggtttttttgagacagagtctcactctgtcacccaggctgtaagtgcaactccaactcaaaaaaaaaaaaaaaaagtatatatttgttgatttgcacatcacctaagaaaaccataagctaagaaggtttggactcaggcgtctggaaagttggtcaccacctctaccccacctcatatctgaatgtcaagagacacgtagaggcagagaagttaaagcaactttctagagacagaaatgaccactgatcaagccacaatgcactctggtttaaatgacatttaggtcatgactgtccttaatctaaaacaaacctagattagtatttcttttcattagtaaatagctaaattctgatggtaaattatgctgaccaaaaacagttcctcacttcccaagttagacatagcaattagaaaaataatctaagcaagctccatttgtatttcttttttcacctgtttattgaatatttacctcccatgaagtctttcagcctattggtggtattttactgttcagatatatgttagaatttcactgatacttactgggcgcggtggctcacacctgtaatcccagcagactgcaatttctgtgaacaagatacaacttattcttcatagcaactctgacaaagttgcaaaaggtatatatatgttggccaggtaaggtggttcacgcctgtagtcccagctacttgggaggctgaggcaggagaatcgcttgaacccaggaggcagaggttgcagtgagccaagattgcgccactgcactctagcctgggcaacagagc

SEQ ID NO: 276218 - DNA, 427 bp, Homo sapiens
agcaatcaggcaagagaagaaattccaaccaagaatttcatatccagccaaactaagcttcataaacgcagaagaaaaagatctctttcagagaagcaattggtaaggaaatgtgttaccacaaaattaaaaaaaaatcctatccaaataagaagagagaaagtcaaattatttctttgcagatgatatgatactatacctagaaaaccccataatctttgctcaaaggctcttagatcttatgaacaagttcagcaaggtttcaggatacaaaatcgatgtacaaaaatgagtagcatttctatacactaacaatgtccaagctgagagctaaatcaagaatgaaattccattctcaatagccaccaaaggaataaaatacctaggaatacagttaaccaggaaggtgaaagatatctgcaatgag

SEQ ID NO: 276219 - DNA, 840 bp, Homo sapiens
gagacacagaaagatatttgctatactagaagtttacagagtttctcatatcctcctcaactttcttgttttcagtactcttttcaattaggaatgataggaaactgtatttcttttccttgatggagtaacaaagggtgataggaatactccttatttaataatgatgtatgttatacatccatggtcttcttggtcgttcattcctgagctagtttctaaattagaacttgattcatctaaaaatggggtggattcttaaactagggacttacaggaaaaggcaaccttttagttttctgcatattgtattcaactctggaatcttgtgtccagttctgggcatgttcatagatttaattcatgtcaacaaatatttactcagtgccactttatacataaaacactaccctaggactttggttgtccaatcaagatcctatcacattctatattatgcaaataactagactttttacaaactgaatggctttccctggcctcagtgtatttacaaactagtagaagagacaaatacagaaacacataattaaaatacagaaaaataaatacaaaattagtatatggatagcatatgaaaggtaaaggaggtcccaatcccgccctctagtcatggaaaccacgagttcgttattaatacaaagtcaatggagggtaattgagtgacaggaagagagacaggtgctgggcagaaaccacatcagtgcacttgtgacattttatttaatggtaaattctatcatattcatggtaattgcctgtgactgcaaaatgaggaaaggttacatgtatttgtcttctcatcattatcaccactgt

SEQ ID NO: 276220 - DNA, 249 bp, Homo sapiens
gtttccactgtcttgctattataaataaggctgttatgaatatccttattacaagccttttgtggacatacattttctcatttctctcaggtaaatccctacatatagaattgctggtcataggttagatgtgagtttaacattagagaaaacaccaaacagttctccaaaatggttgtaccattttgcaccctccccagcaatcttcgagggccccagtccctctacattcttgccaacatttgtcag

SEQ ID NO: 276221 - DNA, 381 bp, Homo sapiens
gaaaaagaaagaaaagaaaggaaaacaggaggcacatcaactcccattttcagcaattgaggattattaacactctacttgaaaatcacacatcagctgtgcacagggtggctcatacctgtaatcccagcactttgggaggccgagaagataggatcacttgaggccaagagtttgagaacagcctgggaaacataggaagatcacatctctacaaaaaaataaaaaaatgaactgggcatgatggaacatgcctgtagtcccagccactcaggaggctgaggtggaaggatcccttgagcccaagaggtggaggctgcagtgagctatgattgtgccactgcaatccagcctgggcaaccttgaacaagatcctgtctc

SEQ ID NO: 276222 - DNA, 418 bp, Homo sapiens
  misc_feature (32)..(32): n is a, c, g, or t
ccgtatggctgtacctaaatggctgtacctanaatggctgtacctaaactggctgtacctaaatggctgtagagcatagacttcatggctgacttgcagaaaactcgaaagcagaaagatggaacagacacctcacagagtggggaggacggaggctgctggcagagagagagagaggactctggagatgccgaagcacacgccttcaagagtcccagcaaagaaaataaaaagaaagacaaagatatgcttgaagataagtttaaaagcaataatttagagagagagcaggagcagcttgaccgcatcgtgaaggaatctggaggaaagctgaccaggcggcttgtgaacagtcagtgcgaatttgaaagaagaacccagacggaacaacaatgttgggacttctccatcctgtgga

SEQ ID NO: 276223 - DNA, 965 bp, Homo sapiens
ctttttcgtcttccaggtctactgttgcctctgttgtgctagggttatttcctccaggaatgtcatctgtttgatcagacactacttcatcagtcttggctgaaggatcaccactacctttctgaagaatctctgtggcttcatactcaagtacctcggatggagtcagaggttccaaatgaatactgccttgctcgctaacatcagaactaacagattcaggttcatgtctttttctcaaaaactgatcaatgcttacattatctgatgctaatcgcaaatccttaatattctttgaagaaaatctggcttcactggagttgtgatctttaatctgatcagataagattatgttttctgaactttggcacatcttcaactccatttcctgacaaacgtgttgtatttgttttttcttttccactttatctgcaccaatatttgaatcacaactgacgatgttttttgagccagtttcctggtctgcaagacaggtttcattttccttatctgaaactgttatgctttcttcactttttgttgttgatgagccttcaaatgaatttgcattacatccatttttttcttttgaagaagcagctttatcttgtttactgaaaaataaagtcatttattatgtatttcttcataaagcaatgtttttgaacactgtcaaaataaagacgtgttctaaaaaataaaaagtcaaggtacatttgcccaccaaaaaggaaaacagtccaagttcccaatcctcgctatggcagtaaaatttaggaggaggccattttcttaggcaagattctgagaaactctggaatcacatactaaaagatatctatcaactagttttagtcctggctgtcattattttcatctgttcatatctcttgcctgtttctagtttaaatttaagtatttttattaacttgtaaaagtacctaaaataaaaaaatatatttgga

SEQ ID NO: 276224 - DNA, 792 bp, Homo sapiens
ctttttcgtcttccaggtctactgttgcctctgttgtgctagggttatttcctccaggaatgtcatctgtttgatcagacactacttcatcagtcttggctgaaggatcaccactacctttctgaagaatctctgtggcttcatactcaagtacctcggatggagtcagaggttccaaatgaatactgccttgctcgctaacatcagaactaacagattcagacacaaaacccaaggatatgaaggattgactgtactcctacattactatattaacaatgtggtttatcctgcttttgacctatgaccaagatcagcttggtggaacaaagacactgacatttcaaggagcaatggcaacataaaataaacaaagaaagttcaagaaatcagaagaatatgaaacaatagcgctcagtggattctaagtgtgtggtataaccaaagataactatcaatgcctttagaaaattttatcaacagttctttcagtatagtaaaattgtataattctctttattttcaaaagaaaatattagaattataaaaatcatatactgatttcaagaattccagtggttaaaggaaatttacttcaaaactaaaaaagtgttcattcctttaagagatagcttagctatctttttaatattcaaatattgttggcgagccttatttttgttctcattttacaatgcaaacgcatcaaggtttcctctggacaccacctttccactgaaataaattcagcaagagaacaatggctaatcatacttctggtctaagaataca

SEQ ID NO: 276225 - DNA, 420 bp, Homo sapiens
actcctcttcttggagaacacagaggctcccgcctcgccccagggcagcagctcagcctcactggttgagacagaggacccttcacttgaagacacaagcgtgccttctgtccctcttggctcccgacagtgcttcctgtaccctgggcctggtggcagctatggcttccgactcagttgtgtggccagtgggcctcgtctcttcatctcccaggtgactgatgccccatggatcttgaatcccttcgatcctttgctgcctgatcggtcttcctctgcttccctcccagagcctaaagccagcaaactttcccccggtgtcccctgttctgcatgcccccacaacaccaggtgactccaggaggctcagctgcccgggctgggctgcaagtgggagacgtgattctggaagtgaacggg

SEQ ID NO: 276226 - DNA, 2806 bp, Homo sapiens
actgggttgctgatccagctatggagaaagccgcagatctgcaggacacagcctcgttaactctgaagtttaagtttaacccaaagctgggcattgataatcctgtcctctccctggccgaagaccacgacccctatgatccctggagcctggagccgcctcgcttctgtttactgagcaaagaggagggcaagagttttggcttccacctgcagcaggagctgggcagggctgggcatgtggtgtgcagggtggacccaggcacctctgcccagcgccagggtcttcaggaaggagacaggatcctggcggtgaacaatgatgttgtggaacacgaagactatgcggtggtggtacgccgcatccgggccagcagccctcgggtgttgctgacagtattggcacggcatgcacatgacgtggcccgagctcagctgggagaagatgcccacctctgtcccaccctaggcccaggggtccggccccggctgtgccacatagtgaaagatgagggtggttttggcttcagtgtcacccatggcaatcagggtcctttctggttggtgctaagtactggaggagcagctgagcgggcaggggtgccccccggggcccggctgctggaagtgaatggggtcagtgtggagaagttcactcacaaccaactcaccaggaaggtgtgactgcctgtctcccactctcctcccccaatccgggcctgggccccacctcgggaagacgcctccttccccatgcgcctaacctccttatctggtctcctacctttatcaccatcctccccctctacagtttgtgccaggctccacttagtgcctgggaggaggggctgtggggggagcatacctcttctctccctgcccaggtgttatactgatgccctgctgggtccccacagctttggcagagtggacagcaggtgaccttgctggtggcagggccagaggtggaagaacagtgtcgccagctgggattgcccctggctgcacccctggcagagggctgggcactgcccaccaagccccgctgcctgcacctggagaaagggccccagggttttgggttcctgctccgggaggaaaagggccttgacggtcgccctggtgagtgggagccctgggggcggtgggggaaggtgggccttggggtgggcacacaagcgtatatacacctttcagtgcaccgaagaggtgtccctgtctgagctctggccctgggccgcctcttcccgttcactctggggtcagtcccctggtgtgtacacagtggcctaggatagctggagaggagcagtgaggatgtctatgccccaggacagttcctgtgggaggtggacccgggactgccagccaagaaggctgggatgcaggctggggaccggctggtggctgtggctggggagagcgtggaggggctgggccatgaggagacagtgtccaggatccaggggcagggctcctgtgtctccctcactgtcgtcgaccctgaggcggaccgcttcttcagcatggtgcgtgctgaggggcaggggctagggttggggcaggagtggggcagggctgaggtccgaaagatttgctctccctgccaccttccaggttcgcctgtccccactcctcttcttggagaacacagaggctcccgcctcgccccagggcagcagctcagcctcactggttgagacagaggacccttcacttgaagacacaagcgtgccttctgtccctcttggctcccgacagtgcttcctgtaccctgggcctggtggcagctatggcttccgactcagttgtgtggccagtgggcctcgtctcttcatctcccaggtgactccaggaggctcagctgcccgggctgggctgcaagtgggagacgtgattctggaagtgaacgggtatcctgttgggggacagaatgacctggagaggcttcagcagctgcctgaggctgagccacccctctgcctgaagctggcagccaggtctctgcggggcttggaagcctggattccccctggggctgcagaggactgggctctggcctcggatctactgtagagcacccctgcttggtacagacatactcaggggctaccgtgtcttcactctccagcctgaggtggtgaaggcaggatgctctctctaagccagaccagagggactcagacaccaccgatcacaggctggcccaggtgctccctcccttcctgcaggcccacctgccagcagagggtgtggttggaggcctcagacaggtccctgaaggagtctgaggctccagaggatgtcatatgggagttttagagagctgtgtcccaaggatgaaggtgtggctgtgggtctggctaggattgaagccatctggaccttttctagatatgactccaggacccttgagtgtaatgcaaaaatttggagaccagctatgcctgccctctgtgggtgccttagcattgcgggagggtggtgcttggtcaccgttgcatttgttatagaaatggccattcgccataaatctgactgcctgtgtttgtgttggtgggggtaaggggcagtggtgtgaagggaccaaaagggcctcaggctcaaggggtgggatgcggctcctgcaggagagaggttgagacctggtcaaatttatttcctatcaatcactgaatctcagggataatgggtcaacccagaactgagatgtctgtatgacagccactcctaaaaataaacaacaacaaaaacaaaaaaagaagaaaactaaataaaaataaaaataaaaataagatccacttctc

SEQ ID NO: 276227 - DNA, 249 bp, Homo sapiens
aattttaagaggtggagaaaggcgtatcagattctccaacgaaaaagaaactttataggttgaaaacttttaaatgcttccaatgaagatctgatcagcatgtttccctacattccttctatgtcgtgttggcatcactggaaagagcctcgcctaatgtggtggcttacggaccagcatcaccaacgtcacttgggaacttgttagaaatgcagaatctcaggcctccaccccagacctactgaatca

SEQ ID NO: 276228 - DNA, 479 bp, Homo sapiens
cattgaaaggatttatattaaataagacataaatccacaaggacaaagatggcaggagaaagacagtagcaaccaacttcttgaagttgcagaacaggtggcctgtggtaaattaattggcagacctgagaatattaaatcctgtgtcagtaataggggaagccaagaaacaacctgacttaaattaatgcgggttctctaaaagggttagaaaatttcccataccaggtagctacaaaagtaggaggtgatgatggggctaaaaacaggaagactgtaagtctgtttaagaactagttagagctctgttgccactggccactgctttttcaccctagaaaatggtgaaagtaaattaggcgggttctggcttggagtcaccaacacgtctgagtgcagagatgctgtcttgaaaacagagggattaaaggagagttttcatactctttgagcaggaagagagtcttttgaattccagg

SEQ ID NO: 276229 - DNA, 182 bp, Homo sapiens
ggcagttgtgtagcagctaatggagatgactggggttgggtaagattgggaaagcaccaataaagagtagaagaaagctagcagcccacatacttgctgtcatgtcagttgtaataacattgtaaatgtagattttgtatttcattgtaagaaattattaaagtgatataaagaaaataatg

SEQ ID NO: 276230 - DNA, 3018 bp, Homo sapiens
gcccgaatggttgcgtgtttccgtgtgtgggtccgggggaggcccacgaacgccagcgaaaccgctgacaccaccgcccaactatgaactcatcaggcgcctgaagaccgacacgccgaacatgcgccgcgcgcactcgcgcacgagtgagatcatcgcgccccggtcgtgagtgcgctcacacgcagcctgagactcgacgggagggggtcacgtggaagtatctgagagaggcgtacttggccactaggaaagcacctccccctttccaaaaatgctccggaagtgccttcgccctccgtaaagatggccggggcagtcggcacgagggaggcggggatgcgcctgcgcaacaagttcggcggggaagatggcggatgacaaggattctctgcctaagcttaaggacctggcatttctcaagaaccagctggaaagcctgcagcggcgtgtagaagacgaagtcaacagtggagtgggccaggatggctcgctgttgtcctccccgttcctcaagggattcctggctggctatgtggtggccaaactgagggcatcagcagtattgggctttgctgtgggcacctgcactggcatctatgcggctcaggcatatgctgtgcccaacgtggagaagacattaagggactatttgcagttgctacgcaaggggcccgactagctctaggtgccatggaagaggcaggatgagcagctcagccttcaggtggagacactttatctggattccccagctgtcatccatttgctatctccaactttcctgccaccttcatccttgcctcccttcctgcagattgtggacagtagttcctcagcctgcaccctggattccttcttccccttcctagctccatgggactcgccccaagactgtggcttcaaggaccaccagccccttactcttcaagccctgactgtggagttggtagatgcctctgatcctcagtattctctctggcaatgttccacggcttctccttcctgggagctggctccataacttgattttccccaaacgtgttgcaatccctgctgccccttagccacccagggtcttgtgtgggtatgagtgtagaggatgggggtatgccaggcctgggccgtcccaggcaggcccgctggaccctgatgctactcctatccactgccatgtacggtgcccatgccccattgctggcactgtgccatgtggacggccgagtgcccttccggccctcctcagccgtgctgctgactgagctgaccaagctactgttatgcgccttctcccttctggtaggctggcaagcatggccccaggggcccccaccctggcgccaggctgctcccttcgcactatcagccctgctctatggcgctaacaacaacctggtgatctatcttcagcgttacatggaccccagcacctaccaggtgctgagtaatctcaagattggaagcacagctgtgctctactgcctctgcctccggcaccgcctctctgtgcgtcaggggttagcgctgctgctgctgatggctgcgggagcctgctatgcagcagggggccttcaagttcccgggaacacccttcccagtccccctccagcagctgctgccagccccatgcccctgcatatcactccgctaggcctgctgctcctcattctgtactgcctcatctcaggcttgtcgtcagtgtacacagagctgctcatgaagcgacagcggctgcccctggcacttcagaacctcttcctctacacttttggtgtgcttctgaatctaggtctgcatgctggcggcggctctggcccaggcctcctggaaggtttctcaggatgggcagcactcgtggtgctgagccaggcactaaatggactgctcatgtctgctgtcatgaagcatggcagcagcatcacacgcctctttgtggtgtcctgctcgctggtggtcaacgccgtgctctcagcagtcctgctacggctgcagctcacagccgccttcttcctggccacattgctcattggcctggccatgcgcctgtactatggcagccgctagtccctgacaacttccaccctgattccggaccctgtagattgggcgccaccaccagatccccctcccaggccttcctccctctcccatcagcagccctgtaacaagtgccttgtgagaaaagctggagaagtgagggcagccaggttattctctggaggttggtggatgaaggggtacccctaggagatgtgaagtgtgggtttggttaaggaaatgcttaccatcccccacccccaaccaagttcttccagactaaagaattaaggtaacatcaatacctaggcctgagaaataaccccatccttgttgggcagctccctgctttgtcctgcatgaacagagttgatgaaagtggggtgtgggcaacaagtggctttccttgcctactttagtcacccagcagagccactggagctggctagtccagcccagccatggtgcatgactcttccataagggatcctcacccttccactttcatgcaagaaggcccagttgccacagattatacaaccattacccaaaccactctgacagtctcctccagttccagcaatgcctagagacatgctccctgccctctccacagtgctgctccccacacctagcctttgttctggaaaccccagagagggctgggcttgactcatctcagggaatgtagcccctgggccctggcttaagccgacactcctgacctctctgttcaccctgagggctgtcttgaagcccgctacccactctgaggctcctaggaggtaccatgcttcccactctggggcctgcccctgcctagcagtctcccagctcccaacagcctggggaagctctgcacagagtgacctgagaccaggtacaggaaacctgtagctcaatcagtgtctctttaactgcataagcaataagatcttaataaagtcttctaggctgtagggtggttcctacaaccacagc

SEQ ID NO: 276231 - DNA, 436 bp, Homo sapiens
ggtggaaactaattctaagccagactgctggagatcaccctgttctagtgtgtggaggcttccaccagaaggaaactgcaccacacctagcctttgttctggaaaccccagagagggctgggcttgactcatctcagggaatgtagcccctgggccctggcttaagccgacactcctgacctctctgttcaccctgagggctgtcttgaagcccgctacccactctgaggctcctaggaggtaccatgcttcccactctggggcctgcccctgcctagcagtctcccagctcccaacagcctggggaagctctgcacagagtgacctgagaccaggtacaggaaacctgtagctcaatcagtgtctctttaactgcataagcaataagatcttaataaagtcttctaggctgtagggtggttcctacaaccacagc

SEQ ID NO: 276232 - DNA, 3089 bp, Homo sapiens
gcccgaatggttgcgtgtttccgtgtgtgggtccgggggaggcccacgaacgccagcgaaaccgctgacaccaccgcccaactatgaactcatcaggcgcctgaagaccgacacgccgaacatgcgccgcgcgcactcgcgcacgagtgagatcatcgcgccccggtcgtgagtgcgctcacacgcagcctgagactcgacgggagggggtcacgtggaagtatctgagagaggcgtacttggccactaggaaagcacctccccctttccaaaaatgctccggaagtgccttcgccctccgtaaagatggccggggcagtcggcacgagggaggcggggatgcgcctgcgcaacaagttcggcggggaagatggcggatgacaaggattctctgcctaagcttaaggacctggcatttctcaagaaccagctggaaagcctgcagcggcgtgtagaagacgaagtcaacagtggagtgggccaggatggctcgctgttgtcctccccgttcctcaagggattcctggctggctatgtggtggccaaactgagggcatcagcagtattgggctttgctgtgggcacctgcactggcatctatgcggctcaggcatatgctgtgcccaacgtggagaagacattaagggactatttgcagttgctacgcaaggggcccgactagctctaggtgccatggaagaggcaggatgagcagctcagccttcaggtggagacactttatctggattccccagctgtcatccatttgctatctccaactttcctgccaccttcatccttgcctcccttcctgcagattgtggacagtagttcctcagcctgcaccctggattccttcttccccttcctagctccatgggactcgccccaagactgtggcttcaaggaccaccagccccttactcttcaagccctgactgtggagttggtagatgcctctgatcctcagtattctctctggcaatgttccacggcttctccttcctgggagctggctccataacttgattttccccaaacgtgttgcaatccctgctgccccttagccacccagggtcttgtgtgggtatgagtgtagaggatgggggtatgccaggcctgggccgtcccaggcaggcccgctggaccctgatgctactcctatccactgccatgtacggtgcccatgccccattgctggcactgtgccatgtggacggccgagtgcccttccggccctcctcagccgtgctgctgactgagctgaccaagctactgttatgcgccttctcccttctggtaggctggcaagcatggccccaggggcccccaccctggcgccaggctgctcccttcgcactatcagccctgctctatggcgctaacaacaacctggtgatctatcttcagcgttacatggaccccagcacctaccaggtgctgagtaatctcaagattggaagcacagctgtgctctactgcctctgcctccggcaccgcctctctgtgcgtcaggggttagcgctgctgctgctgatggctgcgggagcctgctatgcagcagggggccttcaagttcccgggaacacccttcccagtccccctccagcagctgctgccagccccatgcccctgcatatcactccgctaggcctgctgctcctcattctgtactgcctcatctcaggcttgtcgtcagtgtacacagagctgctcatgaagcgacagcggctgcccctggcacttcagaacctcttcctctacacttttggtgtgcttctgaatctaggtctgcatgctggcggcggctctggcccaggcctcctggaaggtttctcaggatgggcagcactcgtggtgctgagccaggcactaaatggactgctcatgtctgctgtcatgaagcatggcagcagcatcacacgcctctttgtggtgtcctgctcgctggtggtcaacgccgtgctctcagcagtcctgctacggctgcagctcacagccgccttcttcctggccacattgctcattggcctggccatgcgcctgtactatggcagccgctagtccctgacaacttccaccctgattccggaccctgtagattgggcgccaccaccagatccccctcccaggccttcctccctctcccatcagcagccctgtaacaagtgccttgtgagaaaagctggagaagtgagggcagccaggttattctctggaggttggtggatgaaggggtacccctaggagatgtgaagtgtgggtttggttaaggaaatgcttaccatcccccacccccaaccaagttcttccagactaaagaattaaggtaacatcaatacctaggcctgagaaataaccccatccttgttgggcagctccctgctttgtcctgcatgaacagagttgatgaaagtggggtgtgggcaacaagtggctttccttgcctactttagtcacccagcagagccactggagctggctagtccagcccagccatggtgcatgactcttccataagggatcctcacccttccactttcatgcaagaaggcccagttgccacagattatacaaccattacccaaaccactctgacagtctcctccagttccagcaatgcctagagacatgctccctgccctctccacagtgctgctccccacacctagcctttgttctggaaaccccagagagggctgggcttgactcatctcagggaatgtagcccctgggccctggcttaagccgacactcctgacctctctgttcaccctgagggctgtcttgaagcccgctacccactctgaggctcctaggaggtaccatgcttcccactctggggcctgcccctgcctagcagtctcccagctcccaacagcctggggaagctctgcacagagtgacctgagaccaggtacaggaaacctgtagctcaatcagtgtctctttaactgcataagcaataagatcttaataaagtcttctaggctgtagggtggttcctacaaccacagcaaaaaaatataccttcaatatacaatacacacacaccccgggccacttatcgcgggccgacaaaacggttt

SEQ ID NO: 276233 - DNA, 3137 bp, Homo sapiens
gcccgaatggttgcgtgtttccgtgtgtgggtccgggggaggcccacgaacgccagcgaaaccgctgacaccaccgcccaactatgaactcatcaggcgcctgaagaccgacacgccgaacatgcgccgcgcgcactcgcgcacgagtgagatcatcgcgccccggtcgtgagtgcgctcacacgcagcctgagactcgacgggagggggtcacgtggaagtatctgagagaggcgtacttggccactaggaaagcacctccccctttccaaaaatgctccggaagtgccttcgccctccgtaaagatggccggggcagtcggcacgagggaggcggggatgcgcctgcgcaacaagttcggcggggaagatggcggatgacaaggattctctgcctaagcttaaggacctggcatttctcaagaaccagctggaaagcctgcagcggcgtgtagaagacgaagtcaacagtggagtgggccaggatggctcgctgttgtcctccccgttcctcaagggattcctggctggctatgtggtggccaaactgagggcatcagcagtattgggctttgctgtgggcacctgcactggcatctatgcggctcaggcatatgctgtgcccaacgtggagaagacattaagggactatttgcagttgctacgcaaggggcccgactagctctaggtgccatggaagaggcaggatgagcagctcagccttcaggtggagacactttatctggattccccagctgtcatccatttgctatctccaactttcctgccaccttcatccttgcctcccttcctgcagattgtggacagtagttcctcagcctgcaccctggattccttcttccccttcctagctccatgggactcgccccaagactgtggcttcaaggaccaccagccccttactcttcaagccctgactgtggagttggtagatgcctctgatcctcagtattctctctggcaatgttccacggcttctccttcctgggagctggctccataacttgattttccccaaacgtgttgcaatccctgctgccccttagccacccagggtcttgtgtgggtatgagtgtagaggatgggggtatgccaggcctgggccgtcccaggcaggcccgctggaccctgatgctactcctatccactgccatgtacggtgcccatgccccattgctggcactgtgccatgtggacggccgagtgcccttccggccctcctcagccgtgctgctgactgagctgaccaagctactgttatgcgccttctcccttctggtaggctggcaagcatggccccaggggcccccaccctggcgccaggctgctcccttcgcactatcagccctgctctatggcgctaacaacaacctggtgatctatcttcagcgttacatggaccccagcacctaccaggtgctgagtaatctcaagattggaagcacagctgtgctctactgcctctgcctccggcaccgcctctctgtgcgtcaggggttagcgctgctgctgctgatggctgcgggagcctgctatgcagcagggggccttcaagttcccgggaacacccttcccagtccccctccagcagctgctgccagccccatgcccctgcatatcactccgctaggcctgctgctcctcattctgtactgcctcatctcaggcttgtcgtcagtgtacacagagctgctcatgaagcgacagcggctgcccctggcacttcagaacctcttcctctacacttttggtgtgcttctgaatctaggtctgcatgctggcggcggctctggcccaggcctcctggaaggtttctcaggatgggcagcactcgtggtgctgagccaggcactaaatggactgctcatgtctgctgtcatgaagcatggcagcagcatcacacgcctctttgtggtgtcctgctcgctggtggtcaacgccgtgctctcagcagtcctgctacggctgcagctcacagccgccttcttcctggccacattgctcattggcctggccatgcgcctgtactatggcagccgctagtccctgacaacttccaccctgattccggaccctgtagattgggcgccaccaccagatccccctcccaggccttcctccctctcccatcagcagccctgtaacaagtgccttgtgagaaaagctggagaagtgagggcagccaggttattctctggaggttggtggatgaaggggtacccctaggagatgtgaagtgtgggtttggttaaggaaatgcttaccatcccccacccccaaccaagttcttccagactaaagaattaaggtaacatcaatacctaggcctgagaaataaccccatccttgttgggcagctccctgctttgtcctgcatgaacagagttgatgaaagtggggtgtgggcaacaagtggctttccttgcctactttagtcacccagcagagccactggagctggctagtccagcccagccatggtgcatgactcttccataagggatcctcacccttccactttcatgcaagaaggcccagttgccacagattatacaaccattacccaaaccactctgacagtctcctccagttccagcaatgcctagagacatgctccctgccctctccacagtgctgctccccacacctagcctttgttctggaaaccccagagagggctgggcttgactcatctcagggaatgtagcccctgggccctggcttaagccgacactcctgacctctctgttcaccctgagggctgtcttgaagcccgctacccactctgaggctcctaggaggtaccatgcttcccactctggggcctgcccctgcctagcagtctcccagctcccaacagcctggggaagctctgcacagagtgacctgagaccaggtacaggaaacctgtagctcaatcagtgtctctttaactgcataagcaataagatcttaataaagtcttctaggctgtagggtggttcctacaaccacagccatgattgtcttgtgtcttctgtctgcgcaactcccctcaaacaattttgttcctctggggtcctgagtatcttaattctgggataacttttagactaagaaaaaattgttttctccag

SEQ ID NO: 276234 - DNA, 3908 bp, Homo sapiens
gcccgaatggttgcgtgtttccgtgtgtgggtccgggggaggcccacgaacgccagcgaaaccgctgacaccaccgcccaactatgaactcatcaggcgcctgaagaccgacacgccgaacatgcgccgcgcgcactcgcgcacgagtgagatcatcgcgccccggtcgtgagtgcgctcacacgcagcctgagactcgacgggagggggtcacgtggaagtatctgagagaggcgtacttggccactaggaaagcacctccccctttccaaaaatgctccggaagtgccttcgccctccgtaaagatggccggggcagtcggcacgagggaggcggggatgcgcctgcgcaacaagttcggcggggaagatggcggatgacaaggattctctgcctaagcttaaggacctggcatttctcaagaaccagctggaaagcctgcagcggcgtgtagaagacgaagtcaacagtggagtgggccaggatggctcgctgttgtcctccccgttcctcaagggattcctggctggctatgtggtggccaaactgagggcatcagcagtattgggctttgctgtgggcacctgcactggcatctatgcggctcaggcatatgctgtgcccaacgtggagaagacattaagggactatttgcagttgctacgcaaggggcccgactagctctaggtgccatggaagaggcaggatgagcagctcagccttcaggtggagacactttatctggattccccagctgtcatccatttgctatctccaactttcctgccaccttcatccttgcctcccttcctgcagattgtggacagtagttcctcagcctgcaccctggattccttcttccccttcctagctccatgggactcgccccaagactgtggcttcaaggaccaccagccccttactcttcaagccctgactgtggagttggtagatgcctctgatcctcagtattctctctggcaatgttccacggcttctccttcctgggagctggctccataacttgattttccccaaacgtgttgcaatccctgctgccccttagccacccagggtcttgtgtgggtatgagtgtagaggatgggggtatgccaggcctgggccgtcccaggcaggcccgctggaccctgatgctactcctatccactgccatgtacggtgcccatgccccattgctggcactgtgccatgtggacggccgagtgcccttccggccctcctcagccgtgctgctgactgagctgaccaagctactgttatgcgccttctcccttctggtaggctggcaagcatggccccaggggcccccaccctggcgccaggctgctcccttcgcactatcagccctgctctatggcgctaacaacaacctggtgatctatcttcagcgttacatggaccccagcacctaccaggtgctgagtaatctcaagattggaagcacagctgtgctctactgcctctgcctccggcaccgcctctctgtgcgtcaggggttagcgctgctgctgctgatggctgcgggagcctgctatgcagcagggggccttcaagttcccgggaacacccttcccagtccccctccagcagctgctgccagccccatgcccctgcatatcactccgctaggcctgctgctcctcattctgtactgcctcatctcaggcttgtcgtcagtgtacacagagctgctcatgaagcgacagcggctgcccctggcacttcagaacctcttcctctacacttttggtgtgcttctgaatctaggtctgcatgctggcggcggctctggcccaggcctcctggaaggtttctcaggatgggcagcactcgtggtgctgagccaggcactaaatggactgctcatgtctgctgtcatgaagcatggcagcagcatcacacgcctctttgtggtgtcctgctcgctggtggtcaacgccgtgctctcagcagtcctgctacggctgcagctcacagccgccttcttcctggccacattgctcattggcctggccatgcgcctgtactatggcagccgctagtccctgacaacttccaccctgattccggaccctgtagattgggcgccaccaccagatccccctcccaggccttcctccctctcccatcagcagccctgtaacaagtgccttgtgagaaaagctggagaagtgagggcagccaggttattctctggaggttggtggatgaaggggtacccctaggagatgtgaagtgtgggtttggttaaggaaatgcttaccatcccccacccccaaccaagttcttccagactaaagaattaaggtaacatcaatacctaggcctgagaaataaccccatccttgttgggcagctccctgctttgtcctgcatgaacagagttgatgaaagtggggtgtgggcaacaagtggctttccttgcctactttagtcacccagcagagccactggagctggctagtccagcccagccatggtgcatgactcttccataagggatcctcacccttccactttcatgcaagaaggcccagttgccacagattatacaaccattacccaaaccactctgacagtctcctccagttccagcaatgcctagagacatgctccctgccctctccacagtgctgctccccacacctagcctttgttctggaaaccccagagagggctgggcttgactcatctcagggaatgtagcccctgggccctggcttaagccgacactcctgacctctctgttcaccctgagggctgtcttgaagcccgctacccactctgaggctcctaggaggtaccatgcttcccactctggggcctgcccctgcctagcagtctcccagctcccaacagcctggggaagctctgcacagagtgacctgagaccaggtacaggaaacctgtagctcaatcagtgtctctttaactgcataagcaataagatcttaataaagtcttctaggctgtagggtggttcctacaaccacagcaaaaaaaaaaaaaaaaaaaaaaaaaaaaaaaaaaaaaaaaaaaaaaaaaaaaaaaaaaggggggggcccaaaaaattcctcacgcggagagagccccacaaatttattccgcgctcacccccggtttttttgttgtcaaaaaggcgggcccccatatgaggagcgctggtattatataatagcacaagaacgacgccgggcgcgggggttaaaaccaaggtgttggaggggggacaaacggtgacacctgggacatcctcttgtgggaaaagcacccatttttcttggggcgggcacatactatatgtggaacaacatcacccagagaaaaaatttaaaaagccctagaaggaaacaataattaaaactttgtggaggggggtctagcagtggttgtgcaaaaccgacgagtcgtgattgtgtgggcgcgggggcagaggaaaatttgggccacgaaaggcgagtcattgtttgtgctgcagcaaaatatttttttcagcgagacttggtgtaataataccgtggagagaagagagaatagatcagaacgataacagaaaatgaaaaaatgagaaacctaagataagacgaagaaagtactgagaagaataagaagaaataaaagacaaatagaagaaaccaaagcagaaaaggagaaaagaaacaaccaaaaacgagaagaaaacgacatagcagaaggaagaaaggacaaaaggcgaagcaagagaacaaggagaaaggaacacgacaagaatgagccaggacaaaagaaaaaagcagagagcaaagagccgacacgagacaaggaagcgacaaggaaggaagaagcggcaacaagagcgggcagacgaactgtcagacaaagcaacaaacaccagaaaaaaaaagac

SEQ ID NO: 276235 - DNA, 2659 bp, Homo sapiens
gaggataaactgtcagcggattgcacgattctctgcctaagcttaaggacctggcatttctcaagaaccagctggaaagcctgcagcggcgtgtagaagacgaagtcaacagtggagtgggccaggatggctcgctgttgtcctccccgttcctcaagggattcctggctggctatgtggtggccaaactgagggcatcagcagtattgggctttgctgtgggcacctgcactggcatctatgcggctcaggcatatgctgtgcccaacgtggagaagacattaagggactatttgcagttgctacgcaaggggcccgactagctctaggtgccatggaagaggcaggatgagcagctcagccttcaggtggagacactttatctggattccccagctgtcatccatttgctatctccaactttcctgccaccttcatccttgcctcccttcctgcagattgtggacagtagttcctcagcctgcaccctggattccttcttccccttcctagctccatgggactcgccccaagactgtggcttcaaggaccaccagccccttactcttcaagccctgactgtggagttggtagatgcctctgatcctcagtattctctctggcaatgttccacggcttctccttcctgggagctggctccataacttgattttccccaaacgtgttgcaatccctgctgccccttagccacccagggtcttgtgtgggtatgagtgtagaggatgggggtatgccaggcctgggccgtcccaggcaggcccgctggaccctgatgctactcctatccactgccatgtacggtgcccatgccccattgctggcactgtgccatgtggacggccgagtgcccttccggccctcctcagccgtgctgctgactgagctgaccaagctactgttatgcgccttctcccttctggtaggctggcaagcatggccccaggggcccccaccctggcgccaggctgctcccttcgcactatcagccctgctctatggcgctaacaacaacctggtgatctatcttcagcgttacatggaccccagcacctaccaggtgctgagtaatctcaagattggaagcacagctgtgctctactgcctctgcctccggcaccgcctctctgtgcgtcaggggttagcgctgctgctgctgatggctgcgggagcctgctatgcagcagggggccttcaagttcccgggaacacccttcccagtccccctccagcagctgctgccagccccatgcccctgcatatcactccgctaggcctgctgctcctcattctgtactgcctcatctcaggcttgtcgtcagtgtacacagagctgctcatgaagcgacagcggctgcccctggcacttcagaacctcttcctctacacttttggtgtgcttctgaatctaggtctgcatgctggcggcggctctggcccaggcctcctggaaggtttctcaggatgggcagcactcgtggtgctgagccaggcactaaatggactgctcatgtctgctgtcatgaagcatggcagcagcatcacacgcctctttgtggtgtcctgctcgctggtggtcaacgccgtgctctcagcagtcctgctacggctgcagctcacagccgccttcttcctggccacattgctcattggcctggccatgcgcctgtactatggcagccgctagtccctgacaacttccaccctgattccggaccctgtagattgggcgccaccaccagatccccctcccaggccttcctccctctcccatcagcagccctgtaacaagtgccttgtgagaaaagctggagaagtgagggcagccaggttattctctggaggttggtggatgaaggggtacccctaggagatgtgaagtgtgggtttggttaaggaaatgcttaccatcccccacccccaaccaagttcttccagactaaagaattaaggtaacatcaatacctaggcctgagaaataaccccatccttgttgggcagctccctgctttgtcctgcatgaacagagttgatgaaagtggggtgtgggcaacaagtggctttccttgcctactttagtcacccagcagagccactggagctggctagtccagcccagccatggtgcatgactcttccataagggatcctcacccttccactttcatgcaagaaggcccagttgccacagattatacaaccattacccaaaccactctgacagtctcctccagttccagcaatgcctagagacatgctccctgccctctccacagtgctgctccccacacctagcctttgttctggaaaccccagagagggctgggcttgactcatctcagggaatgtagcccctgggccctggcttaagccgacactcctgacctctctgttcaccctgagggctgtcttgaagcccgctacccactctgaggctcctaggaggtaccatgcttcccactctggggcctgcccctgcctagcagtctcccagctcccaacagcctggggaagctctgcacagagtgacctgagaccaggtacaggaaacctgtagctcaatcagtgtctctttaactgcataagcaataagatcttaataaagtcttctaggctgtagggtggttcctacaaccacagc

SEQ ID NO: 276236 - DNA, 2662 bp, Homo sapiens
tgtaaatctcttgacatacaaaggttcttgataggtcaaagcttgtacaggacctggcatttctcaagaaccagctggaaagcctgcagcggcgtgtagaagacgaagtcaacagtggagtgggccaggatggctcgctgttgtcctccccgttcctcaagggattcctggctggctatgtggtggccaaactgagggcatcagcagtattgggctttgctgtgggcacctgcactggcatctatgcggctcaggcatatgctgtgcccaacgtggagaagacattaagggactatttgcagttgctacgcaaggggcccgactagctctaggtgccatggaagaggcaggatgagcagctcagccttcaggtggagacactttatctggattccccagctgtcatccatttgctatctccaactttcctgccaccttcatccttgcctcccttcctgcagattgtggacagtagttcctcagcctgcaccctggattccttcttccccttcctagctccatgggactcgccccaagactgtggcttcaaggaccaccagccccttactcttcaagccctgactgtggagttggtagatgcctctgatcctcagtattctctctggcaatgttccacggcttctccttcctgggagctggctccataacttgattttccccaaacgtgttgcaatccctgctgccccttagccacccagggtcttgtgtgggtatgagtgtagaggatgggggtatgccaggcctgggccgtcccaggcaggcccgctggaccctgatgctactcctatccactgccatgtacggtgcccatgccccattgctggcactgtgccatgtggacggccgagtgcccttccggccctcctcagccgtgctgctgactgagctgaccaagctactgttatgcgccttctcccttctggtaggctggcaagcatggccccaggggcccccaccctggcgccaggctgctcccttcgcactatcagccctgctctatggcgctaacaacaacctggtgatctatcttcagcgttacatggaccccagcacctaccaggtgctgagtaatctcaagattggaagcacagctgtgctctactgcctctgcctccggcaccgcctctctgtgcgtcaggggttagcgctgctgctgctgatggctgcgggagcctgctatgcagcagggggccttcaagttcccgggaacacccttcccagtccccctccagcagctgctgccagccccatgcccctgcatatcactccgctaggcctgctgctcctcattctgtactgcctcatctcaggcttgtcgtcagtgtacacagagctgctcatgaagcgacagcggctgcccctggcacttcagaacctcttcctctacacttttggtgtgcttctgaatctaggtctgcatgctggcggcggctctggcccaggcctcctggaaggtttctcaggatgggcagcactcgtggtgctgagccaggcactaaatggactgctcatgtctgctgtcatgaagcatggcagcagcatcacacgcctctttgtggtgtcctgctcgctggtggtcaacgccgtgctctcagcagtcctgctacggctgcagctcacagccgccttcttcctggccacattgctcattggcctggccatgcgcctgtactatggcagccgctagtccctgacaacttccaccctgattccggaccctgtagattgggcgccaccaccagatccccctcccaggccttcctccctctcccatcagcagccctgtaacaagtgccttgtgagaaaagctggagaagtgagggcagccaggttattctctggaggttggtggatgaaggggtacccctaggagatgtgaagtgtgggtttggttaaggaaatgcttaccatcccccacccccaaccaagttcttccagactaaagaattaaggtaacatcaatacctaggcctgagaaataaccccatccttgttgggcagctccctgctttgtcctgcatgaacagagttgatgaaagtggggtgtgggcaacaagtggctttccttgcctactttagtcacccagcagagccactggagctggctagtccagcccagccatggtgcatgactcttccataagggatcctcacccttccactttcatgcaagaaggcccagttgccacagattatacaaccattacccaaaccactctgacagtctcctccagttccagcaatgcctagagacatgctccctgccctctccacagtgctgctccccacacctagcctttgttctggaaaccccagagagggctgggcttgactcatctcagggaatgtagcccctgggccctggcttaagccgacactcctgacctctctgttcaccctgagggctgtcttgaagcccgctacccactctgaggctcctaggaggtaccatgcttcccactctggggcctgcccctgcctagcagtctcccagctcccaacagcctggggaagctctgcacagagtgacctgagaccaggtacaggaaacctgtagctcaatcagtgtctctttaactgcataagcaataagatcttaataaagtcttctaggctgtagggtggttcctacaaccacagc

SEQ ID NO: 276237 - DNA, 2651 bp, Homo sapiens
cacggttgtccagggtgaggaggagctggtggtggaatgctctaatcccagcttgagtagcccctggacagtcaggaaggagcctagctaagtttccttctgcatttttctctgcaggatggctcgctgttgtcctccccgttcctcaagggattcctggctggctatgtggtggccaaactgagggcatcagcagtattgggctttgctgtgggcacctgcactggcatctatgcggctcaggcatatgctgtgcccaacgtggagaagacattaagggactatttgcagttgctacgcaaggggcccgactagctctaggtgccatggaagaggcaggatgagcagctcagccttcaggtggagacactttatctggattccccagctgtcatccatttgctatctccaactttcctgccaccttcatccttgcctcccttcctgcagattgtggacagtagttcctcagcctgcaccctggattccttcttccccttcctagctccatgggactcgccccaagactgtggcttcaaggaccaccagccccttactcttcaagccctgactgtggagttggtagatgcctctgatcctcagtattctctctggcaatgttccacggcttctccttcctgggagctggctccataacttgattttccccaaacgtgttgcaatccctgctgccccttagccacccagggtcttgtgtgggtatgagtgtagaggatgggggtatgccaggcctgggccgtcccaggcaggcccgctggaccctgatgctactcctatccactgccatgtacggtgcccatgccccattgctggcactgtgccatgtggacggccgagtgcccttccggccctcctcagccgtgctgctgactgagctgaccaagctactgttatgcgccttctcccttctggtaggctggcaagcatggccccaggggcccccaccctggcgccaggctgctcccttcgcactatcagccctgctctatggcgctaacaacaacctggtgatctatcttcagcgttacatggaccccagcacctaccaggtgctgagtaatctcaagattggaagcacagctgtgctctactgcctctgcctccggcaccgcctctctgtgcgtcaggggttagcgctgctgctgctgatggctgcgggagcctgctatgcagcagggggccttcaagttcccgggaacacccttcccagtccccctccagcagctgctgccagccccatgcccctgcatatcactccgctaggcctgctgctcctcattctgtactgcctcatctcaggcttgtcgtcagtgtacacagagctgctcatgaagcgacagcggctgcccctggcacttcagaacctcttcctctacacttttggtgtgcttctgaatctaggtctgcatgctggcggcggctctggcccaggcctcctggaaggtttctcaggatgggcagcactcgtggtgctgagccaggcactaaatggactgctcatgtctgctgtcatgaagcatggcagcagcatcacacgcctctttgtggtgtcctgctcgctggtggtcaacgccgtgctctcagcagtcctgctacggctgcagctcacagccgccttcttcctggccacattgctcattggcctggccatgcgcctgtactatggcagccgctagtccctgacaacttccaccctgattccggaccctgtagattgggcgccaccaccagatccccctcccaggccttcctccctctcccatcagcagccctgtaacaagtgccttgtgagaaaagctggagaagtgagggcagccaggttattctctggaggttggtggatgaaggggtacccctaggagatgtgaagtgtgggtttggttaaggaaatgcttaccatcccccacccccaaccaagttcttccagactaaagaattaaggtaacatcaatacctaggcctgagaaataaccccatccttgttgggcagctccctgctttgtcctgcatgaacagagttgatgaaagtggggtgtgggcaacaagtggctttccttgcctactttagtcacccagcagagccactggagctggctagtccagcccagccatggtgcatgactcttccataagggatcctcacccttccactttcatgcaagaaggcccagttgccacagattatacaaccattacccaaaccactctgacagtctcctccagttccagcaatgcctagagacatgctccctgccctctccacagtgctgctccccacacctagcctttgttctggaaaccccagagagggctgggcttgactcatctcagggaatgtagcccctgggccctggcttaagccgacactcctgacctctctgttcaccctgagggctgtcttgaagcccgctacccactctgaggctcctaggaggtaccatgcttcccactctggggcctgcccctgcctagcagtctcccagctcccaacagcctggggaagctctgcacagagtgacctgagaccaggtacaggaaacctgtagctcaatcagtgtctctttaactgcataagcaataagatcttaataaagtcttctaggctgtagggtggttcctacaaccacagc

SEQ ID NO: 276238 - DNA, 2693 bp, Homo sapiens
  misc_feature (2681)..(2681): n is a, c, g, or t
gcccgaatggttgcgtgtttccgtgtgtgggtccgggggaggcccacgaacgccagcgaaaccgctgacaccaccgcccaactatgaactcatcaggcgcctgaagaccgacacgccgaacatgcgccgcgcgcactcgcgcacgagtgagatcatcgcgccccggtcgtgagtgcgctcacacgcagcctgagactcgacgggagggggtcacgtggaagtatctgagagaggcgtacttggccactaggaaagcacctccccctttccaaaaatgctccggaagtgccttcgccctccgtaaagatggccggggcagtcggcacgagggaggcggggatgcgcctgcgcaacaagttcggcggggaagatggcggatgacaaggattctctgcctaagcttaaggacctggcatttctcaagaaccagctggaaagcctgcagcggcgtgtagaagacgaagtcaacagtggagtgggccaggatggctcgctgttgtcctccccgttcctcaagggattcctggctggctatgtggtggccaaactgagggcatcagcagtattgggctttgctgtgggcacctgcactggcatctatgcggctcaggcatatgctgtgcccaacgtggagaagacattaagggactatttgcagttgctacgcaaggggcccgactagctctaggtgccatggaagaggcaggatgagcagctcagccttcaggtggagacactttatctggattccccagctgtcatccatttgctatctccaactttcctgccaccttcatccttgcctcccttcctgcagattgtggacagtagttcctcagcctgcaccctggattccttcttccccttcctagctccatgggactcgccccaagactgtggcttcaaggaccaccagccccttactcttcaagccctgactgtggagttggtagatgcctctgatcctcagtattctctctggcaatgttccacggcttctccttcctgggagctggctccataacttgattttccccaaacgtgttgcaatccctgctgccccttagccacccagggtcttgtgtgggtatgagtgtagaggatgggggtatgccaggcctgggccgtcccaggcaggcccgctggaccctgatgctactcctatccactgccatgtacggtgcccatgccccattgctggcactgtgccatgtggacggccgagtgcccttccggccctcctcagccgtgctgctgactgagctgaccaagctactgttatgcgccttctcccttctggtaggctggcaagcatggccccaggggcccccaccctggcgccaggctgctcccttcgcactatcagccctgctctatggcgctaacaacaacctggtgatctatcttcagcgttacatggaccccagcacctaccaggtgctgagtaatctcaagattggaagcacagctgtgctctactgcctctgcctccggcaccgcctctctgtgcgtcaggggttagcgctgctgctgctgatggctgcgggagcctgctatgcagcagggggccttcaagttcccgggaacacccttcccagtccccctccagcagctgctgccagccccatgcccctgcatatcactccgctaggcctgctgctcctcattctgtactgcctcatctcaggcttgtcgtcagtgtacacagagctgctcatgaagcgacagcggctgcccctggcacttcagaacctcttcctctacacttttggtgtgcttctgaatctaggtctgcatgctggcggcggctctggcccaggcctcctggaaggtttctcaggatgggcagcactcgtggtgctgagccaggcactaaatggactgctcatgtctgctgtcatgaagcatggcagcagcatcacacgcctctttgtggtgtcctgctcgctggtggtcaacgccgtgctctcagcagtcctgctacggctgcagctcacagccgccttcttcctggccacattgctcattggcctggccatgcgcctgtactatggcagccgctagtccctgacaacttccaccctgattccggaccctgtagattgggcgccaccaccagatccccctcccaggccttcctccctctcccatcagcagccctgtaacaagtgccttgtgagaaaagctggagaagtgagggcagccaggttattctctggaggttggtggatgaaggggtacccctaggagatgtgaagtgtgggtttggttaaggaaatgcttaccatcccccacccccaaccaagttcttccagactaaagaattaaggtaacatcaatacctaggcctgagaaataaccccatccttgttgggcagctccctgctttgtcctgcatgaacagagttgatgaaagtggggtgtgggcaacaagtggctttccttgcctactttagtcacccagcagagccactggagctggctagtccagcccagccatggtgcatgactcttccataagggatcctcacccttccactttcatgcaagaaggcccagttgccacagattatacaaccattacccaaaccactctgacagtctcctccagttccagcaatgcctagagacatgctccctgccctctccacagtgctgctcccctccccgggatacagggngaccgagctcga

SEQ ID NO: 276239 - DNA, 2770 bp, Homo sapiens
gcccgaatggttgcgtgtttccgtgtgtgggtccgggggaggcccacgaacgccagcgaaaccgctgacaccaccgcccaactatgaactcatcaggcgcctgaagaccgacacgccgaacatgcgccgcgcgcactcgcgcacgagtgagatcatcgcgccccggtcgtgagtgcgctcacacgcagcctgagactcgacgggagggggtcacgtggaagtatctgagagaggcgtacttggccactaggaaagcacctccccctttccaaaaatgctccggaagtgccttcgccctccgtaaagatggccggggcagtcggcacgagggaggcggggatgcgcctgcgcaacaagttcggcggggaagatggcggatgacaaggattctctgcctaagcttaaggacctggcatttctcaagaaccagctggaaagcctgcagcggcgtgtagaagacgaagtcaacagtggagtgggccaggatggctcgctgttgtcctccccgttcctcaagggattcctggctggctatgtggtggccaaactgagggcatcagcagtattgggctttgctgtgggcacctgcactggcatctatgcggctcaggcatatgctgtgcccaacgtggagaagacattaagggactatttgcagttgctacgcaaggggcccgactagctctaggtgccatggaagaggcaggatgagcagctcagccttcaggtggagacactttatctggattccccagctgtcatccatttgctatctccaactttcctgccaccttcatccttgcctcccttcctgcagattgtggacagtagttcctcagcctgcaccctggattccttcttccccttcctagctccatgggactcgccccaagactgtggcttcaaggaccaccagccccttactcttcaagccctgactgtggagttggtagatgcctctgatcctcagtattctctctggcaatgttccacggcttctccttcctgggagctggctccataacttgattttccccaaacgtgttgcaatccctgctgccccttagccacccagggtcttgtgtgggtatgagtgtagaggatgggggtatgccaggcctgggccgtcccaggcaggcccgctggaccctgatgctactcctatccactgccatgtacggtgcccatgccccattgctggcactgtgccatgtggacggccgagtgcccttccggccctcctcagccgtgctgctgactgagctgaccaagctactgttatgcgccttctcccttctggtaggctggcaagcatggccccaggggcccccaccctggcgccaggctgctcccttcgcactatcagccctgctctatggcgctaacaacaacctggtgatctatcttcagcgttacatggaccccagcacctaccaggtgctgagtaatctcaagattggaagcacagctgtgctctactgcctctgcctccggcaccgcctctctgtgcgtcaggggttagcgctgctgctgctgatggctgcgggagcctgctatgcagcagggggccttcaagttcccgggaacacccttcccagtccccctccagcagctgctgccagccccatgcccctgcatatcactccgctaggcctgctgctcctcattctgtactgcctcatctcaggcttgtcgtcagtgtacacagagctgctcatgaagcgacagcggctgcccctggcacttcagaacctcttcctctacacttttggtgtgcttctgaatctaggtctgcatgctggcggcggctctggcccaggcctcctggaaggtttctcaggatgggcagcactcgtggtgctgagccaggcactaaatggactgctcatgtctgctgtcatgaagcatggcagcagcatcacacgcctctttgtggtgtcctgctcgctggtggtcaacgccgtgctctcagcagtcctgctacggctgcagctcacagccgccttcttcctggccacattgctcattggcctggccatgcgcctgtactatggcagccgctagtccctgacaacttccaccctgattccggaccctgtagattgggcgccaccaccagatccccctcccaggccttcctccctctcccatcagcagccctgtaacaagtgccttgtgagaaaagctggagaagtgagggcagccaggttattctctggaggttggtggatgaaggggtacccctaggagatgtgaagtgtgggtttggttaaggaaatgcttaccatcccccacccccaaccaagttcttccagactaaagaattaaggtaacatcaatacctaggcctgagaaataaccccatccttgttgggcagctccctgctttgtcctgcatgaacagagttgatgaaagtggggtgtgggcaacaagtggctttccttgcctactttagtcacccagcagagccactggagctggctagtccagcccagccatggtgcatgactcttccataagggatcctcacccttccactttcatgcaagaaggcccagttgccacagattatacaaccattacccaaaccactctgacagtctcctccagttccagcaatgcctagagacatgctccctgccctctccacagtgctgctccccctgagttaactcaggggcgagctgctgattgtgaatctcagagtcttaagagagaagccacatatattcctcttgcatagtattgtggtgtgttgaattcaatacg

SEQ ID NO: 276240 - DNA, 2641 bp, Homo sapiens
gcccgaatggttgcgtgtttccgtgtgtgggtccgggggaggcccacgaacgccagcgaaaccgctgacaccaccgcccaactatgaactcatcaggcgcctgaagaccgacacgccgaacatgcgccgcgcgcactcgcgcacgagtgagatcatcgcgccccggtcgtgagtgcgctcacacgcagcctgagactcgacgggagggggtcacgtggaagtatctgagagaggcgtacttggccactaggaaagcacctccccctttccaaaaatgctccggaagtgccttcgccctccgtaaagatggccggggcagtcggcacgagggaggcggggatgcgcctgcgcaacaagttcggcggggaagatggcggatgacaaggattctctgcctaagcttaaggacctggcatttctcaagaaccagctggaaagcctgcagcggcgtgtagaagacgaagtcaacagtggagtgggccaggatggctcgctgttgtcctccccgttcctcaagggattcctggctggctatgtggtggccaaactgagggcatcagcagtattgggctttgctgtgggcacctgcactggcatctatgcggctcaggcatatgctgtgcccaacgtggagaagacattaagggactatttgcagttgctacgcaaggggcccgactagctctaggtgccatggaagaggcaggatgagcagctcagccttcaggtggagacactttatctggattccccagctgtcatccatttgctatctccaactttcctgccaccttcatccttgcctcccttcctgcagattgtggacagtagttcctcagcctgcaccctggattccttcttccccttcctagctccatgggactcgccccaagactgtggcttcaaggaccaccagccccttactcttcaagccctgactgtggagttggtagatgcctctgatcctcagtattctctctggcaatgttccacggcttctccttcctgggagctggctccataacttgattttccccaaacgtgttgcaatccctgctgccccttagccacccagggtcttgtgtgggtatgagtgtagaggatgggggtatgccaggcctgggccgtcccaggcaggcccgctggaccctgatgctactcctatccactgccatgtacggtgcccatgccccattgctggcactgtgccatgtggacggccgagtgcccttccggccctcctcagccgtgctgctgactgagctgaccaagctactgttatgcgccttctcccttctggtaggctggcaagcatggccccaggggcccccaccctggcgccaggctgctcccttcgcactatcagccctgctctatggcgctaacaacaacctggtgatctatcttcagcgttacatggaccccagcacctaccaggtgctgagtaatctcaagattggaagcacagctgtgctctactgcctctgcctccggcaccgcctctctgtgcgtcaggggttagcgctgctgctgctgatggctgcgggagcctgctatgcagcagggggccttcaagttcccgggaacacccttcccagtccccctccagcagctgctgccagccccatgcccctgcatatcactccgctaggcctgctgctcctcattctgtactgcctcatctcaggcttgtcgtcagtgtacacagagctgctcatgaagcgacagcggctgcccctggcacttcagaacctcttcctctacacttttggtgtgcttctgaatctaggtctgcatgctggcggcggctctggcccaggcctcctggaaggtttctcaggatgggcagcactcgtggtgctgagccaggcactaaatggactgctcatgtctgctgtcatgaagcatggcagcagcatcacacgcctctttgtggtgtcctgctcgctggtggtcaacgccgtgctctcagcagtcctgctacggctgcagctcacagccgccttcttcctggccacattgctcattggcctggccatgcgcctgtactatggcagccgctagtccctgacaacttccaccctgattccggaccctgtagattgggcgccaccaccagatccccctcccaggccttcctccctctcccatcagcagccctgtaacaagtgccttgtgagaaaagctggagaagtgagggcagccaggttattctctggaggttggtggatgaaggggtacccctaggagatgtgaagtgtgggtttggttaaggaaatgcttaccatcccccacccccaaccaagttcttccagactaaagaattaaggtaacatcaatacctaggcctgagaaataaccccatccttgttgggcagctccctgctttgtcctgcatgaacagagttgatgaaagtggggtgtgggcaacaagtggctttccttgcctactttagtcacccagcagagccactggagctggctagtccagcccagccatggtgcatgactcttccataagggatcctcacccttccactttcatgcaagaaggcccagttgccacagattatacaaccattacccaaaccactctgacagtctcctcaccaagacctgggaccagcaggtggccgagctg

SEQ ID NO: 276241 - DNA, 2928 bp, Homo sapiens
gcccgaatggttgcgtgtttccgtgtgtgggtccgggggaggcccacgaacgccagcgaaaccgctgacaccaccgcccaactatgaactcatcaggcgcctgaagaccgacacgccgaacatgcgccgcgcgcactcgcgcacgagtgagatcatcgcgccccggtcgtgagtgcgctcacacgcagcctgagactcgacgggagggggtcacgtggaagtatctgagagaggcgtacttggccactaggaaagcacctccccctttccaaaaatgctccggaagtgccttcgccctccgtaaagatggccggggcagtcggcacgagggaggcggggatgcgcctgcgcaacaagttcggcggggaagatggcggatgacaaggattctctgcctaagcttaaggacctggcatttctcaagaaccagctggaaagcctgcagcggcgtgtagaagacgaagtcaacagtggagtgggccaggatggctcgctgttgtcctccccgttcctcaagggattcctggctggctatgtggtggccaaactgagggcatcagcagtattgggctttgctgtgggcacctgcactggcatctatgcggctcaggcatatgctgtgcccaacgtggagaagacattaagggactatttgcagttgctacgcaaggggcccgactagctctaggtgccatggaagaggcaggatgagcagctcagccttcagattgtggacagtagttcctcagcctgcaccctggattccttcttccccttcctagctccatgggactcgccccaagactgtggcttcaaggaccaccagccccttactcttcaagccctgactgtggagttggtagatgcctctgatcctcagtattctctctggcaatgttccacggcttctccttcctgggagctggctccataacttgattttccccaaacgtgttgcaatccctgctgccccttagccacccagggtcttgtgtgggtatgagtgtagaggatgggggtatgccaggcctgggccgtcccaggcaggcccgctggaccctgatgctactcctatccactgccatgtacggtgcccatgccccattgctggcactgtgccatgtggacggccgagtgcccttccggccctcctcagccgtgctgctgactgagctgaccaagctactgttatgcgccttctcccttctggtaggctggcaagcatggccccaggggcccccaccctggcgccaggctgctcccttcgcactatcagccctgctctatggcgctaacaacaacctggtgatctatcttcagcgttacatggaccccagcacctaccaggtgctgagtaatctcaagattggaagcacagctgtgctctactgcctctgcctccggcaccgcctctctgtgcgtcaggggttagcgctgctgctgctgatggctgcgggagcctgctatgcagcagggggccttcaagttcccgggaacacccttcccagtccccctccagcagctgctgccagccccatgcccctgcatatcactccgctaggcctgctgctcctcattctgtactgcctcatctcaggcttgtcgtcagtgtacacagagctgctcatgaagcgacagcggctgcccctggcacttcagaacctcttcctctacacttttggtgtgcttctgaatctaggtctgcatgctggcggcggctctggcccaggcctcctggaaggtttctcaggatgggcagcactcgtggtgctgagccaggcactaaatggactgctcatgtctgctgtcatgaagcatggcagcagcatcacacgcctctttgtggtgtcctgctcgctggtggtcaacgccgtgctctcagcagtcctgctacggctgcagctcacagccgccttcttcctggccacattgctcattggcctggccatgcgcctgtactatggcagccgctagtccctgacaacttccaccctgattccggaccctgtagattgggcgccaccaccagatccccctcccaggccttcctccctctcccatcagcagccctgtaacaagtgccttgtgagaaaagctggagaagtgagggcagccaggttattctctggaggttggtggatgaaggggtacccctaggagatgtgaagtgtgggtttggttaaggaaatgcttaccatcccccacccccaaccaagttcttccagactaaagaattaaggtaacatcaatacctaggcctgagaaataaccccatccttgttgggcagctccctgctttgtcctgcatgaacagagttgatgaaagtggggtgtgggcaacaagtggctttccttgcctactttagtcacccagcagagccactggagctggctagtccagcccagccatggtgcatgactcttccataagggatcctcacccttccactttcatgcaagaaggcccagttgccacagattatacaaccattacccaaaccactctgacagtctcctccagttccagcaatgcctagagacatgctccctgccctctccacagtgctgctccccacacctagcctttgttctggaaaccccagagagggctgggcttgactcatctcagggaatgtagcccctgggccctggcttaagccgacactcctgacctctctgttcaccctgagggctgtcttgaagcccgctacccactctgaggctcctaggaggtaccatgcttcccactctggggcctgcccctgcctagcagtctcccagctcccaacagcctggggaagctctgcacagagtgacctgagaccaggtacaggaaacctgtagctcaatcagtgtctctttaactgcataagcaataagatcttaataaagtcttctaggctgtagggtggttcctacaaccacagc

SEQ ID NO: 276242 - DNA, 2785 bp, Homo sapiens
  misc_feature (52)..(52): n is a, c, g, or t
  misc_feature (279)..(279): n is a, c, g, or t
  misc_feature (324)..(324): n is a, c, g, or t
  misc_feature (464)..(464): n is a, c, g, or t
agattggcgagatttaccatggattcgtctgacctaatgcttcagtgacctnggtattttctgcaacgaagcaggttgcgtaatgccttggcatccgggctgtgtagacataacggaacttcaaccgggctggtgatgttggagccgatgcgatgagctcgcatagatatcgttgcctaccccggtgtcactctaaggtgaatatccgatggcttgagctattggttggtggtccgacaatcatgatgggcactacagctagcctatattcggagcatnttgacataggtgctggtcaacgcgtgtacaactgtacaatactantgtagaggcttgctaatgacattggatggtctagatgctcacgaatgtgtaatgactgagcatgtatgggaacgtattttgcatgttggatatataagggagtcacgaactagtcatctatacaggatggccagcgtganatgaggcaggatgagcagctcagccttcaggtggagacactttatctggattccccagctgtcatccatttgctatctccaactttcctgccaccttcatccttgcctcccttcctgcagattgtggacagtagttcctcagcctgcaccctggattccttcttccccttcctagctccatgggactcgccccaagactgtggcttcaaggaccaccagccccttactcttcaagccctgactgtggagttggtagatgcctctgatcctcagtattctctctggcaatgttccacggcttctccttcctgggagctggctccataacttgattttccccaaacgtgttgcaatccctgctgccccttagccacccagggtcttgtgtgggtatgagtgtagaggatgggggtatgccaggcctgggccgtcccaggcaggcccgctggaccctgatgctactcctatccactgccatgtacggtgcccatgccccattgctggcactgtgccatgtggacggccgagtgcccttccggccctcctcagccgtgctgctgactgagctgaccaagctactgttatgcgccttctcccttctggtaggctggcaagcatggccccaggggcccccaccctggcgccaggctgctcccttcgcactatcagccctgctctatggcgctaacaacaacctggtgatctatcttcagcgttacatggaccccagcacctaccaggtgctgagtaatctcaagattggaagcacagctgtgctctactgcctctgcctccggcaccgcctctctgtgcgtcaggggttagcgctgctgctgctgatggctgcgggagcctgctatgcagcagggggccttcaagttcccgggaacacccttcccagtccccctccagcagctgctgccagccccatgcccctgcatatcactccgctaggcctgctgctcctcattctgtactgcctcatctcaggcttgtcgtcagtgtacacagagctgctcatgaagcgacagcggctgcccctggcacttcagaacctcttcctctacacttttggtgtgcttctgaatctaggtctgcatgctggcggcggctctggcccaggcctcctggaaggtttctcaggatgggcagcactcgtggtgctgagccaggcactaaatggactgctcatgtctgctgtcatgaagcatggcagcagcatcacacgcctctttgtggtgtcctgctcgctggtggtcaacgccgtgctctcagcagtcctgctacggctgcagctcacagccgccttcttcctggccacattgctcattggcctggccatgcgcctgtactatggcagccgctagtccctgacaacttccaccctgattccggaccctgtagattgggcgccaccaccagatccccctcccaggccttcctccctctcccatcagcagccctgtaacaagtgccttgtgagaaaagctggagaagtgagggcagccaggttattctctggaggttggtggatgaaggggtacccctaggagatgtgaagtgtgggtttggttaaggaaatgcttaccatcccccacccccaaccaagttcttccagactaaagaattaaggtaacatcaatacctaggcctgagaaataaccccatccttgttgggcagctccctgctttgtcctgcatgaacagagttgatgaaagtggggtgtgggcaacaagtggctttccttgcctactttagtcacccagcagagccactggagctggctagtccagcccagccatggtgcatgactcttccataagggatcctcacccttccactttcatgcaagaaggcccagttgccacagattatacaaccattacccaaaccactctgacagtctcctccagttccagcaatgcctagagacatgctccctgccctctccacagtgctgctccccacacctagcctttgttctggaaaccccagagagggctgggcttgactcatctcagggaatgtagcccctgggccctggcttaagccgacactcctgacctctctgttcaccctgagggctgtcttgaagcccgctacccactctgaggctcctaggaggtaccatgcttcccactctggggcctgcccctgcctagcagtctcccagctcccaacagcctggggaagctctgcacagagtgacctgagaccaggtacaggaaacctgtagctcaatcagtgtctctttaactgcataagcaataagatcttaataaagtcttctaggctgtagggtggttcctacaaccacagc

SEQ ID NO: 276243 - DNA, 2180 bp, Homo sapiens
gcccgaatggttgcgtgtttccgtgtgtgggtccgggggaggcccacgaacgccagcgaaaccgctgacaccaccgcccaactatgaactcatcaggcgcctgaagaccgacacgccgaacatgcgccgcgcgcactcgcgcacgagtgagatcatcgcgccccggtcgtgagtgcgctcacacgcagcctgagactcgacgggagggggtcacgtggaagtatctgagagaggcgtacttggccactaggaaagcacctccccctttccaaaaatgctccggaagtgccttcgccctccgtaaagatggccggggcagtcggcacgagggaggcggggatgcgcctgcgcaacaagttcggcggggaagatggcggatgacaaggattctctgcctaagcttaaggacctggcatttctcaagaaccagctggaaagcctgcagcggcgtgtagaagacgaagtcaacagtggagtgggccaggatggctcgctgttgtcctccccgttcctcaagggattcctggctggctatgtggtggccaaactgagggcatcagcagtattgggctttgctgtgggcacctgcactggcatctatgcggctcaggcatatgctgtgcccaacgtggagaagacattaagggactatttgcagttgctacgcaaggggcccgactagctctaggtgccatggaagaggcaggatgagcagctcagccttcaggtggagacactttatctggattccccagctgtcatccatttgctatctccaactttcctgccaccttcatccttgcctcccttcctgcagattgtggacagtagttcctcagcctgcaccctggattccttcttccccttcctagctccatgggactcgccccaagactgtggcttcaaggaccaccagccccttactcttcaagccctgactgtggagttggtagatgcctctgatcctcagtattctctctggcaatgttccacggcttctccttcctgggagctggctccataacttgattttccccaaacgtgttgcaatccctgctgccccttagccacccagggtcttgtgtgggtatgagtgtagaggatgggggtatgccaggcctgggccgtcccaggcaggcccgctggaccctgatgctactcctatccactgccatgtacggtgcccatgccccattgctggcactgtgccatgtggacggccgagtgcccttccggccctcctcagccgtgctgctgactgagctgaccaagctactgttatgcgccttctcccttctggtaggctggcaagcatggccccaggggcccccaccctggcgccaggctgctcccttcgcactatcagccctgctctatggcgctaacaacaacctggtgatctatcttcagcgttacatggaccccagcacctaccaggtgctgagtaatctcaagattggaagcacagctgtgctctactgcctctgcctccggcaccgcctctctgtgcgtcaggggttagcgctgctgctgctgatggctgcgggagcctgctatgcagcagggggccttcaagttcccgggaacacccttcccagtccccctccagcagctgctgccagccccatgcccctgcatatcactccgctaggcctgctgctcctcattctgtactgcctcatctcaggcttgtcgtcagtgtacacagagctgctcatgaagcgacagcggctgcccctggcacttcagaacctcttcctctacacttttggtgtgcttctgaatctaggtctgcatgctggcggcggctctggcccaggcctcctggaaggtttctcaggatgggcagcactcgtggtgctgagccaggcactaaatggactgctcatgtctgctgtcatgaagcatggcagcagcatcacacgcctctttgtggtgtcctgctcgctggtggtcaacgccgtgctctcagcagtcctgctacggctgcagctcacagccgccttcttcctggccacattgctcattggcctggccatgcgcctgtactatggcagccgctagtccctgacaacttccaccctgattccggaccctgtagattgggcgccaccaccagatccccctcccaggccttcctccctctcccatcagcaggaggagacgggatcactcaagaa

SEQ ID NO: 276244 - DNA, 1848 bp, Homo sapiens
gcccgaatggttgcgtgtttccgtgtgtgggtccgggggaggcccacgaacgccagcgaaaccgctgacaccaccgcccaactatgaactcatcaggcgcctgaagaccgacacgccgaacatgcgccgcgcgcactcgcgcacgagtgagatcatcgcgccccggtcgtgagtgcgctcacacgcagcctgagactcgacgggagggggtcacgtggaagtatctgagagaggcgtacttggccactaggaaagcacctccccctttccaaaaatgctccggaagtgccttcgccctccgtaaagatggccggggcagtcggcacgagggaggcggggatgcgcctgcgcaacaagttcggcggggaagatggcggatgacaaggattctctgcctaagcttaaggacctggcatttctcaagaaccagctggaaagcctgcagcggcgtgtagaagacgaagtcaacagtggagtgggccaggatggctcgctgttgtcctccccgttcctcaagggattcctggctggctatgtggtggccaaactgagggcatcagcagtattgggctttgctgtgggcacctgcactggcatctatgcggctcaggcatatgctgtgcccaacgtggagaagacattaagggactatttgcagttgctacgcaaggggcccgactagctctaggtgccatggaagaggcaggatgagcagctcagccttcaggtggagacactttatctggattccccagctgtcatccatttgctatctccaactttcctgccaccttcatccttgcctcccttcctgcagattgtggacagtagttcctcagcctgcaccctggattccttcttccccttcctagctccatgggactcgccccaagactgtggcttcaaggaccaccagccccttactcttcaagccctgactgtggagttggtagatgcctctgatcctcagtattctctctggcaatgttccacggcttctccttcctgggagctggctccataacttgattttccccaaacgtgttgcaatccctgctgccccttagccacccagggtcttgtgtgggtatgagtgtagaggatgggggtatgccaggcctgggccgtcccaggcaggcccgctggaccctgatgctactcctatccactgccatgtacggtgcccatgccccattgctggcactgtgccatgtggacggccgagtgcccttccggccctcctcagccgtgctgctgactgagctgaccaagctactgttatgcgccttctcccttctggtaggctggcaagcatggccccaggggcccccaccctggcgccaggctgctcccttcgcactatcagccctgctctatggcgctaacaacaacctggtgatctatcttcagcgttacatggaccccagcacctaccaggtgctgagtaatctcaagattggaagcacagctgtgctctactgcctctgcctccggcaccgcctctctgtgcgtcaggggttagcgctgctgctgctgatggctgcgggagcctgctatgcagcagggggccttcaagttcccgggaacacccttcccagtccccctccagcagctgctgccagccccatgcccctgcatatcactccgctaggcctgctgctcctcattctgtactgcctcatctcaggcttgtcgtcagtgtacacagagctgctcatgaactctgcacagagtgacctgagaccaggtacaggaaacctgtagctcaatcagtgtctctttaactgcataagcaataagatcttaataaagtcttctaggctgtagggtggttcctacaaccacagc

SEQ ID NO: 276245 - DNA, 1678 bp, Homo sapiens
tgtaagtggcccgaggcgttgaatggcccggaggcgttgaatggcccggaggcgttgaatggcccggaggcgttacatggaccccagcacctaccaggtgctgagtaatctcaagattggaagcacagctgtgctctactgcctctgcctccggcaccgcctctctgtgcgtcaggggttagcgctgctgctgctgatggctgcgggagcctgctatgcagcagggggccttcaagttcccgggaacacccttcccagtccccctccagcagctgctgccagccccatgcccctgcatatcactccgctaggcctgctgctcctcattctgtactgcctcatctcaggcttgtcgtcagtgtacacagagctgctcatgaagcgacagcggctgcccctggcacttcagaacctcttcctctacacttttggtgtgcttctgaatctaggtctgcatgctggcggcggctctggcccaggcctcctggaaggtttctcaggatgggcagcactcgtggtgctgagccaggcactaaatggactgctcatgtctgctgtcatgaagcatggcagcagcatcacacgcctctttgtggtgtcctgctcgctggtggtcaacgccgtgctctcagcagtcctgctacggctgcagctcacagccgccttcttcctggccacattgctcattggcctggccatgcgcctgtactatggcagccgctagtccctgacaacttccaccctgattccggaccctgtagattgggcgccaccaccagatccccctcccaggccttcctccctctcccatcagcagccctgtaacaagtgccttgtgagaaaagctggagaagtgagggcagccaggttattctctggaggttggtggatgaaggggtacccctaggagatgtgaagtgtgggtttggttaaggaaatgcttaccatcccccacccccaaccaagttcttccagactaaagaattaaggtaacatcaatacctaggcctgagaaataaccccatccttgttgggcagctccctgctttgtcctgcatgaacagagttgatgaaagtggggtgtgggcaacaagtggctttccttgcctactttagtcacccagcagagccactggagctggctagtccagcccagccatggtgcatgactcttccataagggatcctcacccttccactttcatgcaagaaggcccagttgccacagattatacaaccattacccaaaccactctgacagtctcctccagttccagcaatgcctagagacatgctccctgccctctccacagtgctgctccccacacctagcctttgttctggaaaccccagagagggctgggcttgactcatctcagggaatgtagcccctgggccctggcttaagccgacactcctgacctctctgttcaccctgagggctgtcttgaagcccgctacccactctgaggctcctaggaggtaccatgcttcccactctggggcctgcccctgcctagcagtctcccagctcccaacagcctggggaagctctgcacagagtgacctgagaccaggtacaggaaacctgtagctcaatcagtgtctctttaactgcataagcaataagatcttaataaagtcttctaggctgtagggtggttcctacaaccacagc

SEQ ID NO: 276246 - DNA, 1212 bp, Homo sapiens
gcccgaatggttgcgtgtttccgtgtgtgggtccgggggaggcccacgaacgccagcgaaaccgctgacaccaccgcccaactatgaactcatcaggcgcctgaagaccgacacgccgaacatgcgccgcgcgcactcgcgcacgagtgagatcatcgcgccccggtcgtgagtgcgctcacacgcagcctgagactcgacgggagggggtcacgtggaagtatctgagagaggcgtacttggccactaggaaagcacctccccctttccaaaaatgctccggaagtgccttcgccctccgtaaagatggccggggcagtcggcacgagggaggcggggatgcgcctgcgcaacaagttcggcggggaagatggcggatgacaaggattctctgcctaagcttaaggacctggcatttctcaagaaccagctggaaagcctgcagcggcgtgtagaagacgaagtcaacagtggagtgggccaggatggctcgctgttgtcctccccgttcctcaagggattcctggctggctatgtggtggccaaactgagggcatcagcagtattgggctttgctgtgggcacctgcactggcatctatgcggctcaggcatatgctgtgcccaacgtggagaagacattaagggactatttgcagttgctacgcaaggggcccgactagctctaggtgccatggaagaggcaggatgagcagctcagccttcaggtggagacactttatctggattccccagctgtcatccatttgctatctccaactttcctgccaccttcatccttgcctcccttcctgcagattgtggacagtagttcctcagcctgcaccctggattccttcttccccttcctagctccatgggactcgccccaagactgtggcttcaaggaccaccagccccttactcttcaagccctgactgtggagttggtagatgcctctgatcctcagtattctctctggcaatgttccacggcttctccttcctgggagctggctccataacttgattttccccaaacgtgttgcaatccctgctgccccttagccacccagggtcttgtgtgggtatgagtgtagaggatgggggtatgccaggcctgggccgtcccaggcaggcccgctggaccctgatgctactcctatccactgccatgtacggtgcccatgaatagcgagggatcctctagatc

SEQ ID NO: 276247 - DNA, 2034 bp, Homo sapiens
gcccgaatggttgcgtgtttccgtgtgtgggtccgggggaggcccacgaacgccagcgaaaccgctgacaccaccgcccaactatgaactcatcaggcgcctgaagaccgacacgccgaacatgcgccgcgcgcactcgcgcacgagtgagatcatcgcgccccggtcgtgagtgcgctcacacgcagcctgagactcgacgggagggggtcacgtggaagtatctgagagaggcgtacttggccactaggaaagcacctccccctttccaaaaatgctccggaagtgccttcgccctccgtaaagatggccggggcagtcggcacgagggaggcggggatgcgcctgcgcaacaagttcggcggggaagatggcggatgacaaggattctctgcctaagcttaaggacctggcatttctcaagaaccagctggaaagcctgcagcggcgtgtagaagacgaagtcaacagtggagtgggccaggatggctcgctgttgtcctccccgttcctcaagggattcctggctggctatgtggtggccaaactgagggcatcagcagtattgggctttgctgtgggcacctgcactggcatctatgcggctcaggcatatgctgtgcccaacgtggagaagacattaagggactatttgcagttgctacgcaaggggcccgactagctctaggtgccatggaagaggcaggatgagcagctcagccttcaggtggagacactttatctggattccccagctgtcatccatttgctatctccaactttcctgccaccttcatccttgcctcccttcctgcagattgtggacagtagttcctcagcctgcaccctggattccttcttccccttcctagctccatgggactcgccccaagactgtggcttcaaggaccaccagccccttactcttcaagccctgactgtggagttggtagatgcctctgatcctcagtattctctctggcaatgttccacggctttcccaacagcctggggaagctctgcacagagtgacctgagaccaggtacaggaaacctgtagctcaatcagtgtctctttaactgcataagcaataagatcttaataaagtcttctaggctgtagggtggttcctacaaccacagcaaaaaaaaaaaaaaaaaaaaaaaaaaaaaaaaaaaaaaaaaaaaaaaaaaaaaaaaaaggggggggcccaaaaaattcctcacgcggagagagccccacaaatttattccgcgctcacccccggtttttttgttgtcaaaaaggcgggcccccatatgaggagcgctggtattatataatagcacaagaacgacgccgggcgcgggggttaaaaccaaggtgttggaggggggacaaacggtgacacctgggacatcctcttgtgggaaaagcacccatttttcttggggcgggcacatactatatgtggaacaacatcacccagagaaaaaatttaaaaagccctagaaggaaacaataattaaaactttgtggaggggggtctagcagtggttgtgcaaaaccgacgagtcgtgattgtgtgggcgcgggggcagaggaaaatttgggccacgaaaggcgagtcattgtttgtgctgcagcaaaatatttttttcagcgagacttggtgtaataataccgtggagagaagagagaatagatcagaacgataacagaaaatgaaaaaatgagaaacctaagataagacgaagaaagtactgagaagaataagaagaaataaaagacaaatagaagaaaccaaagcagaaaaggagaaaagaaacaaccaaaaacgagaagaaaacgacatagcagaaggaagaaaggacaaaaggcgaagcaagagaacaaggagaaaggaacacgacaagaatgagccaggacaaaagaaaaaagcagagagcaaagagccgacacgagacaaggaagcgacaaggaaggaagaagcggcaacaagagcgggcagacgaactgtcagacaaagcaacaaacaccagaaaaaaaaagac

SEQ ID NO: 276248 - DNA, 1413 bp, Homo sapiens
gcccgaatggttgcgtgtttccgtgtgtgggtccgggggaggcccacgaacgccagcgaaaccgctgacaccaccgcccaactatgaactcatcaggcgcctgaagaccgacacgccgaacatgcgccgcgcgcactcgcgcacgagtgagatcatcgcgccccggtcgtgagtgcgctcacacgcagcctgagactcgacgggagggggtcacgtggaagtatctgagagaggcgtacttggccactaggaaagcacctccccctttccaaaaatgctccggaagtgccttcgccctccgtaaagatggccggggcagtcggcacgagggaggcggggatgcgcctgcgcaacaagttcggcggggaagatggcggatgacaaggattctctgcctaagcttaaggacctggcatttctcaagaaccagctggaaagcctgcagcggcgtgtagaagacgaagtcaacagtggagtgggccaggatggctcgctgttgtcctccccgttcctcaagggattcctggctggctatgtggtggccaaactgagggcatcagcagtattgggctttgctgtgggcacctgcactggcatctatgcggctcaggcatatgctgtgcccaacgtggagaagacattaagggactatttgcagttgctacgcaaggggcccgactagctctaggtgccatggaagaggcaggatgagcagctcagccttcaggtggagacactttatctggattccccagctgtcatccatttgctatctccaactttcctgccaccttcatccttgcctcccttcctgcagattgtggacagtagttcctcagcctgcaccctggattccttcttccccttcctagctccatgggactcgccccaagactgtggcttcaaggaccaccagccccttactcttcaagccctgactgtggagttggtagatgcctctgatcctcagtattctctctggcaatgttccacggcttctccttcctgggagctggctccataacttgattttccccaaacgtgttgcaatccctgcccacacctagcctttgttctggaaaccccagagagggctgggcttgactcatctcagggaatgtagcccctgggccctggcttaagccgacactcctgacctctctgttcaccctgagggctgtcttgaagcccgctacccactctgaggctcctaggaggtaccatgcttcccactctggggcctgcccctgcctagcagtctcccagctcccaacagcctggggaagctctgcacagagtgacctgagaccaggtacaggaaacctgtagctcaatcagtgtctctttaactgcataagcaataagatcttaataaagtcttctaggctgtagggtggttcctacaaccacagc

SEQ ID NO: 276249 - DNA, 1214 bp, Homo sapiens
gcccgaatggttgcgtgtttccgtgtgtgggtccgggggaggcccacgaacgccagcgaaaccgctgacaccaccgcccaactatgaactcatcaggcgcctgaagaccgacacgccgaacatgcgccgcgcgcactcgcgcacgagtgagatcatcgcgccccggtcgtgagtgcgctcacacgcagcctgagactcgacgggagggggtcacgtggaagtatctgagagaggcgtacttggccactaggaaagcacctccccctttccaaaaatgctccggaagtgccttcgccctccgtaaagatggccggggcagtcggcacgagggaggcggggatgcgcctgcgcaacaagttcggcggggaagatggcggatgacaaggattctctgcctaagcttaaggacctggcatttctcaagaaccagctggaaagcctgcagcggcgtgtagaagacgaagtcaacagtggagtgggccaggatggctcgctgttgtcctccccgttcctcaagggattcctggctggctatgtggtggccaaactgagggcatcagcagtattgggctttgctgtgggcacctgcactggcatctatgcggctcaggcatatgctgtgcccaacgtggagaagacattaagggactatttgcagttgctacgcaaggggcccgactagctctaggtgccatggaagaggcaggatgagcagctcagccttcaggtggagacactttatctggattccccagctgtcatccatttgctatctccaactttcctgccaccttcatccttgcctcccttcctgcagattgtggacagtagttcctcagcctgcaccctggattccttcttccccttcctagctccatgggactcgccccaagactgtggcttgactcatctcagggaatgtagcccctgggccctggcttaagccgacactcctgacctctctgttcaccctgagggctgtcttgaagcccgctacccactctgaggctcctaggaggtaccatgcttcccactctggggcctgcccctgcctagcagtctcccagctcccaacagcctggggaagctctgcacagagtgacctgagaccaggtacaggaaacctgtagctcaatcagtgtctctttaactgcataagcaataagatcttaataaagtcttctaggctgtagggtggttcctacaaccacagc

SEQ ID NO: 276250 - DNA, 1687 bp, Homo sapiens
gctagtacgaggctgggtgttagatggcggatgacaaggattctctgcctaagcttaaggacctggcatttctcaagaaccagctggaaagcctgcagcggcgtgtagaagacgaagtcaacagtggagtgggccaggatggctcgctgttgtcctccccgttcctcaagggattcctggctggctatgtggtggccaaactgagggcatcagcagtattgggctttgctgtgggcacctgcactggcatctatgcggctcaggcatatgctgtgcccaacgtggagaagacattaagggactatttgcagttgctacgcaaggggcccgactagctctaggtgccatggaagaggcaggatgagcagctcagccttcaggtggagacactttatctggattccccagctgtcatccatttgctatctccaactttcctgccaccttcatccttgcctcccttcctgcagattgtggacagtagttcctcagcctgcaccctggattccttcttccccttcctagctccatgggactcgccccaagactgtggcttcaaggaccaccagccccttactcttcaagccctgactgtggagttggtagatgcctctgatcctcagtattctctctggcaatgttccacggctttcccaacagcctggggaagctctgcacagagtgacctgagaccaggtacaggaaacctgtagctcaatcagtgtctctttaactgcataagcaataagatcttaataaagtcttctaggctgtagggtggttcctacaaccacagcaaaaaaaaaaaaaaaaaaaaaaaaaaaaaaaaaaaaaaaaaaaaaaaaaaaaaaaaaaggggggggcccaaaaaattcctcacgcggagagagccccacaaatttattccgcgctcacccccggtttttttgttgtcaaaaaggcgggcccccatatgaggagcgctggtattatataatagcacaagaacgacgccgggcgcgggggttaaaaccaaggtgttggaggggggacaaacggtgacacctgggacatcctcttgtgggaaaagcacccatttttcttggggcgggcacatactatatgtggaacaacatcacccagagaaaaaatttaaaaagccctagaaggaaacaataattaaaactttgtggaggggggtctagcagtggttgtgcaaaaccgacgagtcgtgattgtgtgggcgcgggggcagaggaaaatttgggccacgaaaggcgagtcattgtttgtgctgcagcaaaatatttttttcagcgagacttggtgtaataataccgtggagagaagagagaatagatcagaacgataacagaaaatgaaaaaatgagaaacctaagataagacgaagaaagtactgagaagaataagaagaaataaaagacaaatagaagaaaccaaagcagaaaaggagaaaagaaacaaccaaaaacgagaagaaaacgacatagcagaaggaagaaaggacaaaaggcgaagcaagagaacaaggagaaaggaacacgacaagaatgagccaggacaaaagaaaaaagcagagagcaaagagccgacacgagacaaggaagcgacaaggaaggaagaagcggcaacaagagcgggcagacgaactgtcagacaaagcaacaaacaccagaaaaaaaaagac

SEQ ID NO: 276251 - DNA, 3093 bp, Homo sapiens
ccggttctcggtggtgcgggagcgggcgggagcagcggccgctctggtcggcggacgtgctgccgagtagtcccggaagcgaagcagcgatggcggagagtccgactgaggaggcggcaacggcgggcgccggggcggcgggccccggggcgagcagcgttgctggtgttgttggcgttagcggcagcggcggcgggttcgggccgcctttcctgccggatgtgtgggcggcggcggcggcagcgggcggggccgggggcccggggagcggcctggctccgctgcccgggctcccgccctcagccgctgcccacggggccgcgctgcttagccactgggaccccacgctcagctccgactgggacggcgagcgcaccgcgccgcagtgtctactccggatcaagcgggatatcatgtccatttataaggagcctcctccaggaatgttcgttgtacctgatactgttgacatgactaagattcatgcattgatcacaggcccatttgacactccttatgaagggggtttcttcctgttcgtgtttcggtgtccgcccgactatcccatccacccacctcgggtcaaactgatgacaacgggcaataacacagtgaggtttaaccccaacttctaccgcaatgggaaagtctgcttgagtattctaggtacatggactggacctgcctggagcccagcccagagcatctcctcagtgctcatctctatccagtccctgatgactgagaacccctatcacaatgagcccggctttgaacaggagagacatccaggagacagcaaaaactataatgaatgtatccggcacgagaccatcagagttgcagtctgtgacatgatggaaggaaagtgtccctgtcctgaacccctacgaggggtgatggagaagtcctttctggagtattacgacttctacgaggtggcctgcaaagatcgcctgcaccttcaaggccaaactatgcaggacccttttggagagaagcggggccactttgactaccagtccctcttgatgcgcctgggactgatacgtcagaaagtgctggagaggctccataatgagaatgcagaaatggactctgatagcagttcatctgggacagagacagaccttcatgggagcctgagggtttagaccctgctcccatctccccttcccccactcaagagtcccagcagaatcccttccccccaccccagggatggagaggcactgtgtatctccctccagactcgaagtcatcctgcaagatggcaagaaccaagcaagctccgatcccagggtgtgggagtgggggcctgttcccggtctgacctccttggcactggagcatctggggcttcgttcatccattcatcccgtatcaggggccaaggtacctttacaggagcacctagagcgagggcctttggcaaaaacaaaacaaccaacacacctctccacagggccagctccttagggataagtggaagatggaaattgcaattccaagagggagtgtgcccaaatgatttatggggatacctggaagggagcttggggtgggggctgtctgtgacacttaagcagtctgggtggttgtctatttgtctgtcttcagtcttgaagcagggcttcccaatgcccttttcctccctgccttccttcccccattatttcccacaggccagcataattttgtttttcctaatttatagtcactgttctagacagaccaaagagaaggaacagtggtggagtctaggctgctgatcagtaagctttacctagcacctgagcacctttctcccctcccctctttcctcacccttttctagatgtaagacagaaagtaaatgtgactgggacttaaccaaggtcttggtaaagcctgcatggcaccgtaagaagctgaaaatactgtttgttcccgcaatcactgatttgaaaagttcccaacacaggcagctgctgtgtatatgggattagagccactacatagaatagtctcttacagattttcataaatactagtcacaataagggtatttttcttgggggtggagtaagggggagactgatgctagtccttgttgtattttgttgggctgtccttgtgtattttcaccccagcctgtagtcctcctcacttcaaccccagggatttttggggagcaagggtagccaatggcagagggggttggggctgggactctggaggctcctccccttctttctcttccttccgcctcccccgtgcccccagctgctcttgtcactgtctctgatgggtatttgcctggctttgttgcttctctatctgtatttagctgcagtgatcctttagctggttggctcagaaaaaaaaaaatgtgctttaggtgccctgtaatcctgggcatcaagggaatccatccttcccctttttgatatgttctccccgtacttccagatttattgttatggctcccagtgggtattggcgattcttgtgatgcagggcctcagtcagtgtccagccatgcataagggagaggatagtgtgtacctgccctgccctctgctatgaaggtctctgccttgtggatcatgggactccccttggaggatctgtgcaaaggggggctgggcacaaaggagaatgtcctatttgggagggcaggaagcaaaggaactggacagggattggtgggcttggggaacggaagtttatcttggatacccttgaagaggctgggtctcttcacatgaagatcgaaaagggaccctgcttccaatttccctcttccattcctcgagctactccagggcttagaagaatgctcttggtctgtgggtccagtgttgtctgtcatccatttaagtgttcccactttcaagtgacaatcctctccttggccctgccatagggcagagcatgtctggcatagcagcctgacttttatgccctaatcttgagttgaggaaatatatgcacaggagtcaaagagatgtctttatatctgactgtatataaatgaagtttttttgttttttttgttttcctttttggtgcaataaagtttgttttggcagaaggagaaaaaaaactgtg

SEQ ID NO: 276252 - DNA, 2180 bp, Homo sapiens
aaaggtccactgtatagtttatagaattagttttttagtggagttgatgatgcctttccagttactaaaaaatcttcatttagcattcagtcgtagtacctgggaatcatggaggtaggggagtgaatgaattgccatgtgggaggaagtgagagtaagtggaaagtggcttttccaggctgacatttgatgccattgggatctctgatttttttcctctctccctcccctccccctgaggaaacaatgcccttttgataataatttgctctctgcctgcctgacaagtactcagctgagatttctcagccaacaagacagtacaaacacttgcggtaccaagcaccactttctcaaaccctggcctcattgaggtgataacaactgtcctgctcaagggattccccctttccccctcttcctcactccttcccccacctcctcttggtgttatacagggatatcatgtccatttataaggagcctcctccaggaatgttcgttgtacctgatactgttgacatgactaaggtatgtaacttgatgggggtttggggggttttgggaaattgggggccataaggttgcaaaagcctaaaagagattattcagctcacctctccgattacacagatgaagaaatcaagaccccaggagagtaagtggcttgtccaaggtcacatagtgaggtggagcagcactttgaagaggtgtctgttattagtgtaccccataggtactgattggcttggaaaatcccagttcatgtctgttgtcgcagcttgactatttatagggcattctttcactctcaaaaatgctcctgtttggataataaattatatggtcaccctatccattgtactacccagctcttcccccatcccgttactcttgacattaactatgctatggtactataaatcagatgtagggaaggttgggaatagggcaagcttgactgaagtgtttgtggttaaaggactttgctcaggatcctgtccttactggttgcgtttaagtatcccttccaccccaaagactatacctctcttgtcctcctctcagagagaaagcttaatacataaggtcacatttctctggcatagatacctaggtttctctgtcactgaatgctctacccacagaagtgcagttgcacttaaactgatgttagaaagaaatcatatttcctaaacctaatgctgtttaagtgaaacacatagttttcttacagtaaatttcttacagtaaaaattcagattttgtattgttggtgtatctttttttgttgttttgaatagatttcccttcatattttttttttatgtagttagaaatgtttttcctaggacatctcgtcctcagtcaagtaccagtgttaatagcctagtacctggggtcccagagttgatgccatgttgagaccagttgagtttactattccaaatgactgagagccagaatatgacgtagggtcttgccaggagggcaaggtgggaactatagacttaggcattggattgccacgtccctttccttttgctgttcaaatgcttagcagacctaaatgcctaggagcctttgtggaagaagaaatataactgagtcagttcaggttttcctcccttcagggggggaagtcctgttgaagaattatggcttgagggggaagagaatttagtgtcgttttcaggacggctgattttttttttttttttttttttaaacagtattggggaaagttctgggactggtctaatggctctgagtggaccctgagtcttccccattttcagtcatgatgtgctgcctgagccacatcctccacaataggtttgatcctctgcagaggaagcaagcagataccctaggcatccatcacaccccctaaccctgctgtgttactggcactgggctgtggcctccaatccctttcttcgtctcctttcatcatactttcccttcgtgccacataaatgtagggtggggttgcatcatatgcatgtttggcctgggcaaatccaaacatatattcagtcaaaatctgtgtcgatttctcaaaattaaaaacgctagggttatattttatagataagcatattatatttttccacagtggtgttttatccattatatgtaacactgatcagggaggtctgcacaaaaaaaaaaaatgc

SEQ ID NO: 276253 - DNA, 388 bp, Homo sapiens
gaatctcagagtttgaggactatctttctgaaataagtcaggcaaacaagattagaggaaaaaagaagtaaaaggaatgaacaaaacctcgagctactccagggcttagaagaatgctcttggtctgtgggtccagtgttgtctgtcatccatttaagtgttcccactttcaagtgacaatcctctccttggccctgccatagggcagagcatgtctggcatagcagcctgacttttatgccctaatcttgagttgaggaaatatatgcacaggagtcaaagagatgtctttatatctgactgtatataaatgaagtttttttgttttttttgttttcctttttggtgcaataaagtttgttttggcagaaggagaaaaaaaactgtg

SEQ ID NO: 276254 - DNA, 3050 bp, Homo sapiens
ccggttctcggtggtgcgggagcgggcgggagcagcggccgctctggtcggcggacgtgctgccgagtagtcccggaagcgaagcagcgatggcggagagtccgactgaggaggcggcaacggcgggcgccggggcggcgggccccggggcgagcagcgttgctggtgttgttggcgttagcggcagcggcggcgggttcgggccgcctttcctgccggatgtgtgggcggcggcggcggcagcgggctcccgccctcagccgctgcccacggggccgcgctgcttagccactgggaccccacgctcagctccgactgggacggcgagcgcaccgcgccgcagtgtctactccggatcaagcgggatatcatgtccatttataaggagcctcctccaggaatgttcgttgtacctgatactgttgacatgactaagattcatgcattgatcacaggcccatttgacactccttatgaagggggtttcttcctgttcgtgtttcggtgtccgcccgactatcccatccacccacctcgggtcaaactgatgacaacgggcaataacacagtgaggtttaaccccaacttctaccgcaatgggaaagtctgcttgagtattctaggtacatggactggacctgcctggagcccagcccagagcatctcctcagtgctcatctctatccagtccctgatgactgagaacccctatcacaatgagcccggctttgaacaggagagacatccaggagacagcaaaaactataatgaatgtatccggcacgagaccatcagagttgcagtctgtgacatgatggaaggaaagtgtccctgtcctgaacccctacgaggggtgatggagaagtcctttctggagtattacgacttctacgaggtggcctgcaaagatcgcctgcaccttcaaggccaaactatgcaggacccttttggagagaagcggggccactttgactaccagtccctcttgatgcgcctgggactgatacgtcagaaagtgctggagaggctccataatgagaatgcagaaatggactctgatagcagttcatctgggacagagacagaccttcatgggagcctgagggtttagaccctgctcccatctccccttcccccactcaagagtcccagcagaatcccttccccccaccccagggatggagaggcactgtgtatctccctccagactcgaagtcatcctgcaagatggcaagaaccaagcaagctccgatcccagggtgtgggagtgggggcctgttcccggtctgacctccttggcactggagcatctggggcttcgttcatccattcatcccgtatcaggggccaaggtacctttacaggagcacctagagcgagggcctttggcaaaaacaaaacaaccaacacacctctccacagggccagctccttagggataagtggaagatggaaattgcaattccaagagggagtgtgcccaaatgatttatggggatacctggaagggagcttggggtgggggctgtctgtgacacttaagcagtctgggtggttgtctatttgtctgtcttcagtcttgaagcagggcttcccaatgcccttttcctccctgccttccttcccccattatttcccacaggccagcataattttgtttttcctaatttatagtcactgttctagacagaccaaagagaaggaacagtggtggagtctaggctgctgatcagtaagctttacctagcacctgagcacctttctcccctcccctctttcctcacccttttctagatgtaagacagaaagtaaatgtgactgggacttaaccaaggtcttggtaaagcctgcatggcaccgtaagaagctgaaaatactgtttgttcccgcaatcactgatttgaaaagttcccaacacaggcagctgctgtgtatatgggattagagccactacatagaatagtctcttacagattttcataaatactagtcacaataagggtatttttcttgggggtggagtaagggggagactgatgctagtccttgttgtattttgttgggctgtccttgtgtattttcaccccagcctgtagtcctcctcacttcaaccccagggatttttggggagcaagggtagccaatggcagagggggttggggctgggactctggaggctcctccccttctttctcttccttccgcctcccccgtgcccccagctgctcttgtcactgtctctgatgggtatttgcctggctttgttgcttctctatctgtatttagctgcagtgatcctttagctggttggctcagaaaaaaaaaaatgtgctttaggtgccctgtaatcctgggcatcaagggaatccatccttcccctttttgatatgttctccccgtacttccagatttattgttatggctcccagtgggtattggcgattcttgtgatgcagggcctcagtcagtgtccagccatgcataagggagaggatagtgtgtacctgccctgccctctgctatgaaggtctctgccttgtggatcatgggactccccttggaggatctgtgcaaaggggggctgggcacaaaggagaatgtcctatttgggagggcaggaagcaaaggaactggacagggattggtgggcttggggaacggaagtttatcttggatacccttgaagaggctgggtctcttcacatgaagatcgaaaagggaccctgcttccaatttccctcttccattcctcgagctactccagggcttagaagaatgctcttggtctgtgggtccagtgttgtctgtcatccatttaagtgttcccactttcaagtgacaatcctctccttggccctgccatagggcagagcatgtctggcatagcagcctgacttttatgccctaatcttgagttgaggaaatatatgcacaggagtcaaagagatgtctttatatctgactgtatataaatgaagtttttttgttttttttgttttcctttttggtgcaataaagtttgttttggcagaaggagaaaaaaaactgtg

SEQ ID NO: 276255 - DNA, 3145 bp, Homo sapiens
aaaggtccactgtatagtttatagaattagttttttagtggagttgatgatgcctttccagttactaaaaaatcttcatttagcattcagtcgtagtacctgggaatcatggaggtaggggagtgaatgaattgccatgtgggaggaagtgagagtaagtggaaagtggcttttccaggctgacatttgatgccattgggatctctgatttttttcctctctccctcccctccccctgaggaaacaatgcccttttgataataatttgctctctgcctgcctgacaagtactcagctgagatttctcagccaacaagacagtacaaacacttgcggtaccaagcaccactttctcaaaccctggcctcattgaggtgataacaactgtcctgctcaagggattccccctttccccctcttcctcactccttcccccacctcctcttggtgttatacagggatatcatgtccatttataaggagcctcctccaggaatgttcgttgtacctgatactgttgacatgactaagattcatgcattgatcacaggcccatttgacactccttatgaagggggtttcttcctgttcgtgtttcggtgtccgcccgactatcccatccacccacctcgggtcaaactgatgacaacgggcaataacacagtgaggtttaaccccaacttctaccgcaatgggaaagtctgcttgagtattctaggtacatggactggacctgcctggagcccagcccagagcatctcctcagtgctcatctctatccagtccctgatgactgagaacccctatcacaatgagcccggctttgaacaggagagacatccaggagacagcaaaaactataatgaatgtatccggcacgagaccatcagagttgcagtctgtgacatgatggaaggaaagtgtccctgtcctgaacccctacgaggggtgatggagaagtcctttctggagtattacgacttctacgaggtggcctgcaaagatcgcctgcaccttcaaggccaaactatgcaggacccttttggagagaagcggggccactttgactaccagtccctcttgatgcgcctgggactgatacgtcagaaagtgctggagaggctccataatgagaatgcagaaatggactctgatagcagttcatctgggacagagacagaccttcatgggagcctgagggtttagaccctgctcccatctccccttcccccactcaagagtcccagcagaatcccttccccccaccccagggatggagaggcactgtgtatctccctccagactcgaagtcatcctgcaagatggcaagaaccaagcaagctccgatcccagggtgtgggagtgggggcctgttcccggtctgacctccttggcactggagcatctggggcttcgttcatccattcatcccgtatcaggggccaaggtacctttacaggagcacctagagcgagggcctttggcaaaaacaaaacaaccaacacacctctccacagggccagctccttagggataagtggaagatggaaattgcaattccaagagggagtgtgcccaaatgatttatggggatacctggaagggagcttggggtgggggctgtctgtgacacttaagcagtctgggtggttgtctatttgtctgtcttcagtcttgaagcagggcttcccaatgcccttttcctccctgccttccttcccccattatttcccacaggccagcataattttgtttttcctaatttatagtcactgttctagacagaccaaagagaaggaacagtggtggagtctaggctgctgatcagtaagctttacctagcacctgagcacctttctcccctcccctctttcctcacccttttctagatgtaagacagaaagtaaatgtgactgggacttaaccaaggtcttggtaaagcctgcatggcaccgtaagaagctgaaaatactgtttgttcccgcaatcactgatttgaaaagttcccaacacaggcagctgctgtgtatatgggattagagccactacatagaatagtctcttacagattttcataaatactagtcacaataagggtatttttcttgggggtggagtaagggggagactgatgctagtccttgttgtattttgttgggctgtccttgtgtattttcaccccagcctgtagtcctcctcacttcaaccccagggatttttggggagcaagggtagccaatggcagagggggttggggctgggactctggaggctcctccccttctttctcttccttccgcctcccccgtgcccccagctgctcttgtcactgtctctgatgggtatttgcctggctttgttgcttctctatctgtatttagctgcagtgatcctttagctggttggctcagaaaaaaaaaaatgtgctttaggtgccctgtaatcctgggcatcaagggaatccatccttcccctttttgatatgttctccccgtacttccagatttattgttatggctcccagtgggtattggcgattcttgtgatgcagggcctcagtcagtgtccagccatgcataagggagaggatagtgtgtacctgccctgccctctgctatgaaggtctctgccttgtggatcatgggactccccttggaggatctgtgcaaaggggggctgggcacaaaggagaatgtcctatttgggagggcaggaagcaaaggaactggacagggattggtgggcttggggaacggaagtttatcttggatacccttgaagaggctgggtctcttcacatgaagatcgaaaagggaccctgcttccaatttccctcttccattcctcgagctactccagggcttagaagaatgctcttggtctgtgggtccagtgttgtctgtcatccatttaagtgttcccactttcaagtgacaatcctctccttggccctgccatagggcagagcatgtctggcatagcagcctgacttttatgccctaatcttgagttgaggaaatatatgcacaggagtcaaagagatgtctttatatctgactgtatataaatgaagtttttttgttttttttgttttcctttttggtgcaataaagtttgttttggcagaaggagaaaaaaaactgtg

SEQ ID NO: 276256 - DNA, 2832 bp, Homo sapiens
ccggttctcggtggtgcgggagcgggcgggagcagcggccgctctggtcggcggacgtgctgccgagtagtcccggaagcgaagcagcgatggcggagagtccgactgaggaggcggcaacggcgggcgccggggcggcgggccccggggcgagcagcgttgctggtgttgttggcgttagcggcagcggcggcgggttcgggccgcctttcctgccggatgtgtgggcggcggcggcggcagcgggcggggccgggggcccggggagcggcctggctccgctgcccgggctcccgccctcagccgctgcccacggggccgcgctgcttagccactgggaccccacgctcagctccgactgggacggcgagcgcaccgcgccgcagtgtctactccggatcaagcgtacatggactggacctgcctggagcccagcccagagcatctcctcagtgctcatctctatccagtccctgatgactgagaacccctatcacaatgagcccggctttgaacaggagagacatccaggagacagcaaaaactataatgaatgtatccggcacgagaccatcagagttgcagtctgtgacatgatggaaggaaagtgtccctgtcctgaacccctacgaggggtgatggagaagtcctttctggagtattacgacttctacgaggtggcctgcaaagatcgcctgcaccttcaaggccaaactatgcaggacccttttggagagaagcggggccactttgactaccagtccctcttgatgcgcctgggactgatacgtcagaaagtgctggagaggctccataatgagaatgcagaaatggactctgatagcagttcatctgggacagagacagaccttcatgggagcctgagggtttagaccctgctcccatctccccttcccccactcaagagtcccagcagaatcccttccccccaccccagggatggagaggcactgtgtatctccctccagactcgaagtcatcctgcaagatggcaagaaccaagcaagctccgatcccagggtgtgggagtgggggcctgttcccggtctgacctccttggcactggagcatctggggcttcgttcatccattcatcccgtatcaggggccaaggtacctttacaggagcacctagagcgagggcctttggcaaaaacaaaacaaccaacacacctctccacagggccagctccttagggataagtggaagatggaaattgcaattccaagagggagtgtgcccaaatgatttatggggatacctggaagggagcttggggtgggggctgtctgtgacacttaagcagtctgggtggttgtctatttgtctgtcttcagtcttgaagcagggcttcccaatgcccttttcctccctgccttccttcccccattatttcccacaggccagcataattttgtttttcctaatttatagtcactgttctagacagaccaaagagaaggaacagtggtggagtctaggctgctgatcagtaagctttacctagcacctgagcacctttctcccctcccctctttcctcacccttttctagatgtaagacagaaagtaaatgtgactgggacttaaccaaggtcttggtaaagcctgcatggcaccgtaagaagctgaaaatactgtttgttcccgcaatcactgatttgaaaagttcccaacacaggcagctgctgtgtatatgggattagagccactacatagaatagtctcttacagattttcataaatactagtcacaataagggtatttttcttgggggtggagtaagggggagactgatgctagtccttgttgtattttgttgggctgtccttgtgtattttcaccccagcctgtagtcctcctcacttcaaccccagggatttttggggagcaagggtagccaatggcagagggggttggggctgggactctggaggctcctccccttctttctcttccttccgcctcccccgtgcccccagctgctcttgtcactgtctctgatgggtatttgcctggctttgttgcttctctatctgtatttagctgcagtgatcctttagctggttggctcagaaaaaaaaaaatgtgctttaggtgccctgtaatcctgggcatcaagggaatccatccttcccctttttgatatgttctccccgtacttccagatttattgttatggctcccagtgggtattggcgattcttgtgatgcagggcctcagtcagtgtccagccatgcataagggagaggatagtgtgtacctgccctgccctctgctatgaaggtctctgccttgtggatcatgggactccccttggaggatctgtgcaaaggggggctgggcacaaaggagaatgtcctatttgggagggcaggaagcaaaggaactggacagggattggtgggcttggggaacggaagtttatcttggatacccttgaagaggctgggtctcttcacatgaagatcgaaaagggaccctgcttccaatttccctcttccattcctcgagctactccagggcttagaagaatgctcttggtctgtgggtccagtgttgtctgtcatccatttaagtgttcccactttcaagtgacaatcctctccttggccctgccatagggcagagcatgtctggcatagcagcctgacttttatgccctaatcttgagttgaggaaatatatgcacaggagtcaaagagatgtctttatatctgactgtatataaatgaagtttttttgttttttttgttttcctttttggtgcaataaagtttgttttggcagaaggagaaaaaaaactgtg

SEQ ID NO: 276257 - DNA, 3032 bp, Homo sapiens
ccggttctcggtggtgcgggagcgggcgggagcagcggccgctctggtcggcggacgtgctgccgagtagtcccggaagcgaagcagcgatggcggagagtccgactgaggaggcggcaacggcgggcgccggggcggcgggccccggggcgagcagcgttgctggtgttgttggcgttagcggcagcggcggcgggttcgggccgcctttcctgccggatgtgtgggcggcggcggcggcagcgggcggggccgggggcccggggagcggcctggctccgctgcccgggctcccgccctcagccgctgcccacggggccgcgctgcttagccactgggaccccacgctcagctccgactgggacggcgagcgcaccgcgccgcagtgtctactccggatcaagcgggatatcatgtccatttataaggagcctcctccaggaatgttcgttgtacctgatactgttgacatgactaagattcatgcattgatcacaggcccatttgacactccttatgaagggggtttcttcctgttcgtgtttcggtgtccgcccgactatcccatccacccacctcgggtcaaactgatgacaacgggcaataacacagtgaggtttaaccccaacttctaccgcaatgggaaagtctgcttgagtattctaggtacatggactggacctgcctggagcccagcccagagcatctcctcagtgctcatctctatccagtccctgatgactgagaacccctatcacaatgagcccggctttgaacaggagagacatccaggagacagcaaaaactataatgaatgtatccggcacgagaccatcagagttgcagtctgtgacatgatggaaggaaagtgtccctgtcctgaacccctacgaggggtgatggagaagtcctttctggagtattacgacttctacgaggtggcctgcaaagatcgcctgcaccttcaaggccaaactatgcaggacccttttggagagaagcggggccactttgactaccagtccctcttgatgcgcctgggactgatacgtcagaaagtgctggagaggctccataatgagaatgcagaaatggactctgatagcagttcatctgggacagagacagaccttcatgggagcctgagggtttagaccctgctcccatctccccttcccccactcaagagtcccagcagaatcccttccccccaccccagggatggagaggcactgtgtatctccctccagactcgaagtcatcctgcaagatggcaagaaccaagcaagctccgatcccagggtgtgggagtgggggcctgttcccggtctgacctccttggcactggagcatctggggcttcgttcatccattcatcccgtatcaggggccaaggtacctttacaggagcacctagagcgagggcctttggcaaaaacaaaacaaccaacacacctctccacagggccagctccttagggataagtggaagatggaaattgcaattccaagagggagtgtgcccaaatgatttatggggatacctggaagggagcttggggtgggggctgtctgtgacacttaagcagtctgggtggttgtctatttgtctgtcttcagtcttgaagcagggcttcccaatgcccttttcctccctgccttccttcccccattatttcccacaggccagcataattttgtttttcctaatttatagtcactgttctagacagaccaaagagaaggaacagtggtggagtctaggctgctgatcagtaagctttacctagcacctgagcacctttctcccctcccctctttcctcacccttttctagatgtaagacagaaagtaaatgtgactgggacttaaccaaggtcttggtaaagcctgcatggcaccgtaagaagctgaaaatactgtttgttcccgcaatcactgatttgaaaagttcccaacacaggcagctgctgtgtatatgggattagagccactacatagaatagtctcttacagattttcataaatactagtcacaataagggtatttttcttgggggtggagtaagggggagactgatgctagtccttgttgtattttgttgggctgtccttgtgtattttcaccccagcctgtagtcctcctcacttcaaccccagggatttttggggagcaagggtagccaatggcagagggggttggggctgggactctggaggctcctccccttctttctcttccttccgcctcccccgtgcccccagctgctcttgtcactgtctctgatgggtatttgcctggctttgttgcttctctatctgtatttagctgcagtgatcctttagctggttggctcagcctttttgatatgttctccccgtacttccagatttattgttatggctcccagtgggtattggcgattcttgtgatgcagggcctcagtcagtgtccagccatgcataagggagaggatagtgtgtacctgccctgccctctgctatgaaggtctctgccttgtggatcatgggactccccttggaggatctgtgcaaaggggggctgggcacaaaggagaatgtcctatttgggagggcaggaagcaaaggaactggacagggattggtgggcttggggaacggaagtttatcttggatacccttgaagaggctgggtctcttcacatgaagatcgaaaagggaccctgcttccaatttccctcttccattcctcgagctactccagggcttagaagaatgctcttggtctgtgggtccagtgttgtctgtcatccatttaagtgttcccactttcaagtgacaatcctctccttggccctgccatagggcagagcatgtctggcatagcagcctgacttttatgccctaatcttgagttgaggaaatatatgcacaggagtcaaagagatgtctttatatctgactgtatataaatgaagtttttttgttttttttgttttcctttttggtgcaataaagtttgttttggcagaaggagaaaaaaaactgtg

SEQ ID NO: 276258 - DNA, 1582 bp, Homo sapiens
ttttttgcgcgaccatttctttattaaattatacaaaaagggagcttggggtgggggctgtctgtgacacttaagcagtctgggtggttgtctatttgtctgtcttcagtcttgaagcagggcttcccaatgcccttttcctccctgccttccttcccccattatttcccacaggccagcataattttgtttttcctaatttatagtcactgttctagacagaccaaagagaaggaacagtggtggagtctaggctgctgatcagtaagctttacctagcacctgagcacctttctcccctcccctctttcctcacccttttctagatgtaagacagaaagtaaatgtgactgggacttaaccaaggtcttggtaaagcctgcatggcaccgtaagaagctgaaaatactgtttgttcccgcaatcactgatttgaaaagttcccaacacaggcagctgctgtgtatatgggattagagccactacatagaatagtctcttacagattttcataaatactagtcacaataagggtatttttcttgggggtggagtaagggggagactgatgctagtccttgttgtattttgttgggctgtccttgtgtattttcaccccagcctgtagtcctcctcacttcaaccccagggatttttggggagcaagggtagccaatggcagagggggttggggctgggactctggaggctcctccccttctttctcttccttccgcctcccccgtgcccccagctgctcttgtcactgtctctgatgggtatttgcctggctttgttgcttctctatctgtatttagctgcagtgatcctttagctggttggctcagaaaaaaaaaaatgtgctttaggtgccctgtaatcctgggcatcaagggaatccatccttcccctttttgatatgttctccccgtacttccagatttattgttatggctcccagtgggtattggcgattcttgtgatgcagggcctcagtcagtgtccagccatgcataagggagaggatagtgtgtacctgccctgccctctgctatgaaggtctctgccttgtggatcatgggactccccttggaggatctgtgcaaaggggggctgggcacaaaggagaatgtcctatttgggagggcaggaagcaaaggaactggacagggattggtgggcttggggaacggaagtttatcttggatacccttgaagaggctgggtctcttcacatgaagatcgaaaagggaccctgcttccaatttccctcttccattcctcgagctactccagggcttagaagaatgctcttggtctgtgggtccagtgttgtctgtcatccatttaagtgttcccactttcaagtgacaatcctctccttggccctgccatagggcagagcatgtctggcatagcagcctgacttttatgccctaatcttgagttgaggaaatatatgcacaggagtcaaagagatgtctttatatctgactgtatataaatgaagtttttttgttttttttgttttcctttttggtgcaataaagtttgttttggcagaaggagaaaaaaaactgtg

SEQ ID NO: 276259 - DNA, 2679 bp, Homo sapiens
ccggttctcggtggtgcgggagcgggcgggagcagcggccgctctggtcggcggacgtgctgccgagtagtcccggaagcgaagcagcgatggcggagagtccgactgaggaggcggcaacggcgggcgccggggcggcgggccccggggcgagcagcgttgctggtgttgttggcgttagcggcagcggcggcgggttcgggccgcctttcctgccggatgtgtgggcggcggcggcggcagcgggcggggccgggggcccggggagcggcctggctccgctgcccgggctcccgccctcagccgctgcccacggggccgcgctgcttagccactgggaccccacgctcagctccgactgggacggcgagcgcaccgcgccgcagtgtctactccggatcaagcgggatatcatgtccatttataaggagcctcctccaggaatgttcgttgtacctgatactgttgacatgactaagattcatgcattgatcacaggcccatttgacactccttatgaagggggtttcttcctgttcgtgtttcggtgtccgcccgactatcccatccacccacctcgggtcaaactgatgacaacgggcaataacacagtgaggtttaaccccaacttctaccgcaatgggaaagtctgcttgagtattctaggtacatggactggacctgcctggagcccagcccagagcatctcctcagtgctcatctctatccagtccctgatgactgagaacccctatcacaatgagcccggctttgaacaggagagacatccaggagacagcaaaaactataatgaatgtatccggcacgagaccatcagagttgcagtctgtgacatgatggaaggaaagtgtccctgtcctgaacccctacgaggggtgatggagaagtcctttctggagtattacgacttctacgaggtggcctgcaaagatcgcctgcaccttcaaggccaaactatgcaggacccttttggagagaagcggggccactttgactaccagtccctcttgatgcgcctgggactgatacgtcagaaagtgctggagaggctccataatgagaatgcagaaatggactctgatagcagttcatctgggacagagacagaccttcatgggagcctgagggtttagaccctgctcccatctccccttcccccactcaagagtcccagcagaatcccttccccccaccccagggatggagaggcactgtgtatctccctccagactcgaagtcatcctgcaagatggcaagaaccaagcaagctccgatcccagggtgtgggagtgggggcctgttcccggtctgacctccttggcactggagcatctggggcttcgttcatccattcatcccgtatcaggggccaaggtacctttacaggagcacctagagcgagggcctttggcaaaaacaaaacaaccaacacacctctccacagggccagctccttagggataagtggaagatggaaattgcaattccaagagggagtgtgcccaaatgatttatggggatacctggaagggagcttggggtgggggctgtctgtgacacttaagcagtctgggtggttgtctatttgtctgtcttcagtcttgaagcagggcttcccaatgcccttttcctccctgccttccttcccccattatttcccacaggccagcataattttgtttttcctaatttatagtcactgttctagacagaccaaagagaaggaacagtggtggagtctaggctgctgatcagtaagctttacctagcacctgagcacctttctcccctcccctctttcctcacccttttctagatgtaagacagaaagtaaatgtgactgggacttaaccaaggtcttggtaaagcctgcatggcaccgtaagaagctgaaaatactgtttgttcccgcaatcactgatttgaaaagttcccaacacaggcagctgctgtgtatatgggattagagccactacatagaatagtctcttacagattttcataaatactagtcacaataagggtatttttcttgggggtggagtaagggggagactgatgctagtccttgttgtattttgttgggctgtccttgtgtattttcaccccagcctgtagtcctcctcacttcaaccccagggatttttggggagcaagggtagccaatggcagagggggttggggctgggactctggaggctcctccccttctttctcttccttccgcctcccccgtgcccccagctgctcttgtcactgtctctgatgggtatttgcctggctttgttgcttctctatctgtatttagctgcagtgatcctttagctggttggctcagaaaaaaaaaaatgtgctttaggtgccctgtaatcctgggcatcaagggaatccatccttcccctttttgatatgttctccccgtacttccagatttattgttatggctcccagtgggtattggcgattcttgtgatgcagagcatgtctggcatagcagcctgacttttatgccctaatcttgagttgaggaaatatatgcacaggagtcaaagagatgtctttatatctgactgtatataaatgaagtttttttgttttttttgttttcctttttggtgcaataaagtttgttttggcagaaggagaaaaaaaactgtg

SEQ ID NO: 276260 - DNA, 2385 bp, Homo sapiens
ccggttctcggtggtgcgggagcgggcgggagcagcggccgctctggtcggcggacgtgctgccgagtagtcccggaagcgaagcagcgatggcggagagtccgactgaggaggcggcaacggcgggcgccggggcggcgggccccggggcgagcagcgttgctggtgttgttggcgttagcggcagcggcggcgggttcgggccgcctttcctgccggatgtgtgggcggcggcggcggcagcgggcggggccgggggcccggggagcggcctggctccgctgcccgggctcccgccctcagccgctgcccacggggccgcgctgcttagccactgggaccccacgctcagctccgactgggacggcgagcgcaccgcgccgcagtgtctactccggatcaagcgggatatcatgtccatttataaggagcctcctccaggaatgttcgttgtacctgatactgttgacatgactaagattcatgcattgatcacaggcccatttgacactccttatgaagggggtttcttcctgttcgtgtttcggtgtccgcccgactatcccatccacccacctcgggtcaaactgatgacaacgggcaataacacagtgaggtttaaccccaacttctaccgcaatgggaaagtctgcttgagtattctaggtacatggactggacctgcctggagcccagcccagagcatctcctcagtgctcatctctatccagtccctgatgactgagaacccctatcacaatgagcccggctttgaacaggagagacatccaggagacagcaaaaactataatgaatgtatccggcacgagaccatcagagttgcagtctgtgacatgatggaaggaaagtgtccctgtcctgaacccctacgaggggtgatggagaagtcctttctggagtattacgacttctacgaggtggcctgcaaagatcgcctgcaccttcaaggccaaactatgcaggacccttttggagagaagcggggccactttgactaccagtccctcttgatgcgcctgggactgatacgtcagaaagtgctggagaggctccataatgagaatgcagaaatggactctgatagcagttcatctgggacagagacagaccttcatgggagcctgagggtttagaccctgctcccatctccccttcccccactcaagagtcccagcagaatcccttccccccaccccagggatggagaggcactgtgtatctccctccagactcgaagtcatcctgcaagatggcaagaaccaagcaagctccgatcccagggtgtgggagtgggggcctgttcccggtctgacctccttggcactggagcatctggggcttcgttcatccattcatcccgtatcaggggccaaggtacctttacaggagcacctagagcgagggcctttggcaaaaacaaaacaaccaacacacctctccacagggccagctccttagggataagtggaagatggaaattgcaattccaagagggagtgtgcccaaatgatttatggggatacctggaagggagcttggggtgggggctgtctgtgacacttaagcagtctgggtggttgtctatttgtctgtcttcagtcttgaagcagggcttcccaatgcccttttcctccctgccttccttcccccattatttcccacaggccagcataattttgtttttcctaatttatagtcactgttctagacagaccaaagagaaggaacagtggtggagtctaggctgctgatcagtaagctttacctagcacctgagcacctttctcccctcccctctttcctcacccttttctagatgtaagacagaaagtaaatgtgactgggacttaaccaaggtcttggtaaagcctgcatggcaccgtaagaagctgaaaatactgtttgttcccgcaatcactgatttgaaaagttcccaacacaggcagctgctgtgtatatgggattagagccactacatagaatagtctcttacagattttcataaatactagtcacaataagggtatttttcttgggggtggagtaagggggagactgatgctagtccttgttgtattttgttgggctgtccttgtgtattttcaccccagcctgtagtcctcctcacttcaaccccagggatttttggggagcaagggtagccaatggcagagggggttggggctgggactctggaggctcctccccttctttctcttccttccgcctcccccgtgcccccagctgctcttgtcactgtctctgatggggagcagcctggggttggtcgtcgtcgacgtctctgtacgcgaactgggcccttacccgtggatcgcaccagatacgacgggcgtggcggccgct

SEQ ID NO: 276261 - DNA, 2194 bp, Homo sapiens
ccggttctcggtggtgcgggagcgggcgggagcagcggccgctctggtcggcggacgtgctgccgagtagtcccggaagcgaagcagcgatggcggagagtccgactgaggaggcggcaacggcgggcgccggggcggcgggccccggggcgagcagcgttgctggtgttgttggcgttagcggcagcggcggcgggttcgggccgcctttcctgccggatgtgtgggcggcggcggcggcagcgggcggggccgggggcccggggagcggcctggctccgctgcccgggctcccgccctcagccgctgcccacggggccgcgctgcttagccactgggaccccacgctcagctccgactgggacggcgagcgcaccgcgccgcagtgtctactccggatcaagcgggatatcatgtccatttataaggagcctcctccaggaatgttcgttgtacctgatactgttgacatgactaagattcatgcattgatcacaggcccatttgacactccttatgaagggggtttcttcctgttcgtgtttcggtgtccgcccgactatcccatccacccacctcgggtcaaactgatgacaacgggcaataacacagtgaggtttaaccccaacttctaccgcaatgggaaagtctgcttgagtattctaggtacatggactggacctgcctggagcccagcccagagcatctcctcagtgctcatctctatccagtccctgatgactgagaacccctatcacaatgagcccggctttgaacaggagagacatccaggagacagcaaaaactataatgaatgtatccggcacgagaccatcagagttgcagtctgtgacatgatggaaggaaagtgtccctgtcctgaacccctacgaggggtgatggagaagtcctttctggagtattacgacttctacgaggtggcctgcaaagatcgcctgcaccttcaaggccaaactatgcaggacccttttggagagaagcggggccactttgactaccagtccctcttgatgcgcctgggactgatacgtcagaaagtgctggagaggctccataatgagaatgcagaaatggactctgatagcagttcatctgggacagagacagaccttcatgggagcctgagggtttagaccctgctcccatctccccttcccccactcaagagtcccagcagaatcccttccccccaccccagggatggagaggcactgtgtatctccctccagactcgaagtcatcctgcaagatggcaagaaccaagcaagctccgatcccagggtgtgggagtgggggcctgttcccggtctgacctccttggcactggagcatctggggcttcgttcatccattcatcccgtatcaggggccaaggtacctttacaggagcacctagagcgagggcctttggcaaaaacaaaacaaccaacacacctctccacagggccagctccttagggataagtggaagatggaaattgcaattccaagagggagtgtgcccaaatgatttatggggatacctggaagggagcttggggtgggggctgtctgtgacacttaagcagtctgggtggttgtctatttgtctgtcttcagtcttgaagcagggcttcccaatgcccttttcctccctgccttccttcccccattatttcccacaggccagcataattttgtttttcctaatttatagtcactgttctagacagaccaaagagaaggaacagtggtggagtctaggctgctgatcagtaagctttacctagcacctgagcacctttctcccctcccctctttcctcacccttttctagatgtaagacagaaagtaaatgtgactgggacttaaccaaggtcttggtaaagcctgcatggcaccgtaagaagctgaaaatactgtttgttcccgcaatcactgatttgaaaagttcccaacacaggcagctgctgtgtatatgggattagagccactacatagaatagtctcttacagattttcataaatactagtcacaataagggtatttttcttgggggtggagtaagggggagactgatgctagtccttgttgtattttgttgggctgtccttgtgtattttcaccccagcctgtagtcctcctcacttcaaccgcgatacggaggggtccttagagcagacctacataacg

SEQ ID NO: 276262 - DNA, 534 bp, Homo sapiens
tctggcacaatgacaacaagagcttcttggtgtggttgaacgaggaggatctgtgcaaaggggggctgggcacaaaggagaatgtcctatttgggagggcaggaagcaaaggaactggacagggattggtgggcttggggaacggaagtttatcttggatacccttgaagaggctgggtctcttcacatgaagatcgaaaagggaccctgcttccaatttccctcttccattcctcgagctactccagggcttagaagaatgctcttggtctgtgggtccagtgttgtctgtcatccatttaagtgttcccactttcaagtgacaatcctctccttggccctgccatagggcagagcatgtctggcatagcagcctgacttttatgccctaatcttgagttgaggaaatatatgcacaggagtcaaagagatgtctttatatctgactgtatataaatgaagtttttttgttttttttgttttcctttttggtgcaataaagtttgttttggcagaaggagaaaaaaaactgtg

SEQ ID NO: 276263 - DNA, 1127 bp, Homo sapiens
ccggttctcggtggtgcgggagcgggcgggagcagcggccgctctggtcggcggacgtgctgccgagtagtcccggaagcgaagcagcgatggcggagagtccgactgaggaggcggcaacggcgggcgccggggcggcgggccccggggcgagcagcgttgctggtgttgttggcgttagcggcagcggcggcgggttcgggccgcctttcctgccggatgtgtgggcggcggcggcggcagcgggcggggccgggggcccggggagcggcctggctccgctgcccgggctcccgccctcagccgctgcccacggggccgcgctgcttagccactgggaccccacgctcagctccgactgggacggcgagcgcaccgcgccgcagtgtctactccggatcaagcgggatatcatgtccatttataaggagcctcctccaggaatgttcgttgtacctgatactgttgacatgactaagattcatgcattgatcacaggcccatttgacactccttatgaagggggtttcttcctgttcgtgtttcggtgtccgcccgactatcccatccacccacctcgggtcaaactgatgacaacgggcaataacacagtgaggtttaaccccaacttctaccgcaatgggaaagtctgcttgagtattctagggtaagaggagacttttaagtagccaagtcggttgttagcagataattactctaggtcagcctttatcaaccggagtccctcatctgaactacagaacacagaaaatgattgagtgactcttctcaaatctcctcaggatggtatgtgactagtatcattctagatgcagaggggagaagttaatttattacagtggtaacctttgagaagtggttctcttaagagtgtggccctgagcatctgggaacttgtagccgagcagtttctggggccctatcttagacctacaaaagaaactctggggttggggccaaaaatctggtttttttggttgttgttttttgtctcaaaaaagaaagaaaagaaaattcttaggtgttcctagttgactgtattagctttatcagccatgttttttttttcctctttacctagaaaacaatgttgggctgacttactg

SEQ ID NO: 276264 - DNA, 371 bp, Homo sapiens
  misc_feature (2)..(2): n is a, c, g, or t
tnctgagccaaccagctaaaggatcactgcagctaaatacagatagagaagaaaaaaaaaaatgtgctttaggtgccctgtaatcctgggcatcaagggaatccatccttcccctttttgatatgttctccccgtacttccagatttattgttatggctcccagtgggtattggcgattcttgtgatgcagagcatgtctggcatagcagcctgacttttatgccctaatcttgagttgaggaaatatatgcacaggagtcaaagagatgtctttatatctgactgtatataaatgaagtttttttgttttttttgttttcctttttggtgcaataaagtttgttttggcagaaggagaaaaaaaactgtg

SEQ ID NO: 276265 - DNA, 3021 bp, Homo sapiens
ccggttctcggtggtgcgggagcgggcgggagcagcggccgctctggtcggcggacgtgctgccgagtagtcccggaagcgaagcagcgatggcggagagtccgactgaggaggcggcaacggcgggcgccggggcggcgggccccggggcgagcagcgttgctggtgttgttggcgttagcggcagcggcggcgggttcgggccgcctttcctgccggatgtgtgggcggcggcggcggcagcgggcggggccgggggcccggggagcggcctggctccgctgcccgggctcccgccctcagccgctgcccacggggccgcgctgcttagccactgggaccccacgctcagctccgactgggacggcgagcgcaccgcgccgcagtgtctactccggatcaagcgggatatcatgtccatttataaggagcctcctccaggaatgttcgttgtacctgatactgttgacatgactaagattcatgcattgatcacaggcccatttgacactccttatgaagggggtttcttcctgttcgtgtttcggtgtccgcccgactatcccatccacccacctcgggtcaaactgatgacaacgggcaataacacagtgaggtttaaccccaacttctaccgcaatgggaaagtctgcttgagtattctaggtacatggactggacctgcctggagcccagcccagagcatctcctcagtgctcatctctatccagtccctgatgactgagaacccctatcacaatgagcccggctttgaacaggagagacatccaggagacagcaaaaactataatgaatgtatccggcacgagaccatcagagttgcagtctgtgacatgatggaaggaaagtgtccctgtcctgaacccctacgaggggtgatggagaagtcctttctggagtattacgacttctacgaggtggcctgcaaagatcgcctgcaccttcaaggccaaactatgcaggacccttttggagagaagcggggccactttgactaccagtccctcttgatgcgcctgggactgatacgtcagaaagtgctggagaggctccataatgagaatgcagaaatggactctgatagcagttcatctgggacagagacagaccttcatgggagcctgagggtttagaccctgctcccatctccccttcccccactcaagagtcccagcagaatcccttccccccaccccagggatggagaggcactgtgtatctccctccagactcgaagtcatcctgcaagatggcaagaaccaagcaagctccgatcccagggtgtgggagtgggggcctgttcccggtctgacctccttggcactggagcatctggggcttcgttcatccattcatcccgtatcaggggccaaggtacctttacaggagcacctagagcgagggcctttggcaaaaacaaaacaaccaacacacctctccacagggccagctccttagggataagtggaagatggaaattgcaattccaagagggagtgtgcccaaatgatttatggggatacctggaagggagcttggggtgggggctgtctgtgacacttaagcagtctgggtggttgtctatttgtctgtcttcagtcttgaagcagggcttcccaatgcccttttcctccctgccttccttcccccattatttcccacaggccagcataattttgtttttcctaatttatagtcactgttctagacagaccaaagagaaggaacagtggtggagtctaggctgctgatcagtaagctttacctagcacctgagcacctttctcccctcccctctttcctcacccttttctagatgtaagacagaaagtaaatgtgactgggacttaaccaaggtcttggtaaagcctgcatggcaccgtaagaagctgaaaatactgtttgttcccgcaatcactgatttgaaaagttcccaacacaggcagctgctgtgtatatgggattagagccactacatagaatagtctcttacagattttcataaatactagtcacaataagggtatttttcttgggggtggagtaagggggagactgatgctagtccttgttgtattttgttgggctgtccttgtgtattttcaccccagcctgtagtcctcctcacttcaaccccagggatttttggggagcaagggtagccaatggcagagggggttggggctgggactctggaggctcctccccttctttctcttccttccgcctcccccgtgcccccagctgctcttgtcactgtctctgatgggtatttgcctggctttgttgcttctctatctgtatttagctgcagtgatcctttagctggttggctcagaaaaaaaaaaatgtgctttaggtgccctgtaatcctgggcatcaagggaatccatccttcccctttttgatatgttctccccgtacttccagatttattgttatggctcccagtgggtattggcgattcttgtgatgcagggcctcagtcagtgtccagccatgcataagggagaggatagtgtgtacctgccctgccctctgctatgaaggtctctgccttgtggatcatgggactccccttggaggatctgtgcaaaggggggctgggcacaaaggagaatgtcctatttgggagggcaggaagcaaaggaactggacagggattggtgggcttggggaacggaagtttatcttggatacccttgaagaggctgggtctcttcacatgaagatcgaaaagggaccctgcttccaatttccctcttccattcctcgagctactccagggcttagaagaatgctcttggtctgtgggtccagtgttgtctgtcatccatttaagtgttcccactttcaagtgacaatcctctccttggccctgccatagggcagagcatgtctggcatagcagcctgacttttatgccctaatcttgagttgaggaaatatatgcacagggagccataacaataaatctggaagtacgtgaaagcatccgca

SEQ ID NO: 276266 - DNA, 837 bp, Homo sapiens
ccggttctcggtggtgcgggagcgggcgggagcagcggccgctctggtcggcggacgtgctgccgagtagtcccggaagcgaagcagcgatggcggagagtccgactgaggaggcggcaacggcgggcgccggggcggcgggccccggggcgagcagcgttgctggtgttgttggcgttagcggcagcggcggcgggttcgggccgcctttcctgccggatgtgtgggcggcggcggcggcagcgggcggggccgggggcccggggagcggcctggctccgctgcccgggctcccgccctcagccgctgcccacggggccgcgctgcttagccactgggaccccacgctcagctccgactgggacggcgagcgcaccgcgccgcagtgtctactccggatcaagcgggatatcatgtccatttataaggagcctcctccaggaatgttcgttgtacctgatactgttgacatgactaagattcatgcattgatcacaggcccatttgacactccttatgaagggggtttcttcctgttcgtgtttcggtgtccgcccgactatcccatccacccacctcgggtcaaactgatgacaacgggcaataacacagtgaggtttaaccccaacttctaccgcaatgggaaagtctgcttgagtattctaggtacatggactggacctgcctggagcccagcccagagcatctcctcagtgctcatctctatccagtccctgatgactgagaacccctatcacaatgagcccggctttgaacaggagagacatccagagacagcaaaaactataatcgccgtcacgagatggtccggctcat

SEQ ID NO: 276267 - DNA, 675 bp, Homo sapiens
attttgagatggggttttattttgcagattcatgcattgatcacaggcccatttgacactccttatgaagggggtttcttcctgttcgtgtttcggtgtccgcccgactatcccatccacccacctcgggtcaaactgatgacaacgggcaataacacagtgaggtttaaccccaacttctaccgcaatgggaaagtctgcttgagtattctagggtaagaggagacttttaagtagccaagtcggttgttagcagataattactctaggtcagcctttatcaaccggagtccctcatctgaactacagaacacagaaaatgattgagtgactcttctcaaatctcctcaggatggtatgtgactagtatcattctagatgcagaggggagaagttaatttattacagtggtaacctttgagaagtggttctcttaagagtgtggccctgagcatctgggaacttgtagccgagcagtttctggggccctatcttagacctacaaaagaaactctggggttggggccaaaaatctggtttttttggttgttgttttttgtctcaaaaaagaaagaaaagaaaattcttaggtgttcctagttgactgtattagctttatcagccatgttttttttttcctctttacctagaaaacaatgttgggctgacttactg

SEQ ID NO: 276268 - DNA, 1653 bp, Homo sapiens
taaacaattccaaaataaaatttccagcacaactaaatattgttgatgataagaggatttttaaaaaagttcttttaaaacagaagcttatatacaacttagaatctaaaaccaatagatttatggtaaaccttaaaactgaaccaaaacaaacaaaaaccaaagttttaatcatttaaaaatcatgtttattgaggtacaacttatagtaaaacctgcccttttcagcgtatagcactgagtcttgacaaatgcacagttatgtaccaccaccgaccaaggcctggcacatttttacctcctcaaagttctccctggctgcttctcccactccttggcaaccactaacctgttttctgtccttatagtactgcttttttcagtgtcatataagtagaatcacactgtacatagtattttgagtctgacctctgtcaactggcataatgcatttgagaattatccatgttgctgtactggcagtgcattcttttttattgctgagcagtattcaattgcatggctgtaccagtttgtttattcatttgccagttgaaggataactgagatcttcctcgtttttagcaattttaaagaaagtttctatgaataattgtgtacaggtttttaattaaatgttttggagatataattcatataccacataattcacctttttaaagtgcataagtcactggtttttaatatattcacaaggtttgtgcataggtttttgtgtgaatactggttttcattcctcttggataaagatttaatttggtattacccttccagacacctttctgtgttttcatacgtatatatgtatgacggtttgaccttaggcagagtagcattttcaaaattttacatggggaaactttctaggtttaaagccattttatttttctgttctgtctggttttatctacgtgttatttacaatctgctgtgtaacaaattactacaaacttaggtaccttaacacatatttatttcacagtttctgtgggtcaggagatcagaaatggttctatttcaaggtctctcacagggctgcaatcaagatgttggcatggctgggtctcatctgaaggctggactggagagaatctacttccaaacttatgtggtagttggaagaatttagttcctcaaggctgctaaactgatggcctgtgttccttgcctctgggatggtagcttgcttcaacaaagtgtgcaagcagagaagacagagagagtccgctagcaagatagaagccacaatctcttgtaatctatcatttttgctgtatgctactggttaaaaataactcattaggttagcctactggctctcagggggaagagattatacaaaggcatgaatttctggaggagggaatgagggcaaagaactctgaaaagtttctcttccacaatctgaagaacttctagaaagtagaaggaagcaatattgcttagggatggacaacttggcactggttatgtgttccaagtgaggtaaccttgttcccaggaataaagagaaccagatgactgtaaacatttccctaaactgaaatgcactgttgtatgttcacctgaaatgaatggtgtaagctgaatatgagatttttgacaaaataaaaattttgctgtgttctcaga

SEQ ID NO: 276269 - DNA, 1156 bp, Homo sapiens
actctcatgtaagtcaacaacatcctgggattgggacacactttctgggcactgctggccagtcccaaaatggaacataaggaagtggttcttctacttcttttatttctgaaatcaggtcaaggagagcccctggatgactatgtgaatacccaggggccttcactgttcagtgtcactaagaagcagctgggggcaggaagcagagaagaatgtgcagcaaaatgtgaagaggacaaagaattcacctgcagggcattccaatatcacagtaaagagcaacaatgtgtgataatggctgaaaacaggaagtcctccataatcattaggatgagagatgcagttttatttgaaaagtaaatgtatctttcagagtgcaagactgggaatggaaagaactacagagggacgatgtccaaaacaaaaaatggcatcacctgtcaaaaatggagttccacttctccccgcagacctaggtcagacttttcctttcatctttgtgttcatctactgtaaagtgtccgtctgtgtctgtgagggattggttccaggacccctgtggctaccaaaatccatgcttctcaagtcccttatgtaaaatggtgcagtatttgcatataacctacataccttctcttgtgcaatccctaatataatgtaaatgctatgtaatcgttgttatactgtattgtttttatttgtattatgttttattgtcatattgttattttctctcatctttttcaagtcttttccatccacagttggttgaatttgtggatgtggaacccatggatacagagggccaactgtatttaggataatttcatcacttttaattcaaaccagaatatgtgaataagcagacagaaagaatctttttgatgtcgatgttcaactatttttggcaccatagtagaacatggttgctttctattttttcttgggtatggaggtttcttgaagacctagaacatagaagaatgcctagttaaaaaaaaaaatcaatgaaactacgagttttaggccaaatctgagaaaagaccaaagatgactatgtttgggactgaagtaaacatatcaagttagaactctcatcacatgtttgactcaaattgtggagcaaaatagtaaataaaatataaaaatgaaaatg

SEQ ID NO: 276270 - DNA, 1275 bp, Homo sapiens
actctcatgtaagtcaacaacatcctgggattgggacacactttctgggcactgctggccagtcccaaaatggaacataaggaagtggttcttctacttcttttatttctgaaatcaggtcaaggagagcccctggatgactatgtgaatacccaggggccttcactgttcagtgtcactaagaagcagctgggggcaggaagcagagaagaatgtgcagcaaaatgtgaagaggacaaagaattcacctgcagggcattccaatatcacagtaaagagcaacaatgtgtgataatggctgaaaacaggaagtcctccataatcattaggatgagagatgcagttttatttgaaaagtaaaggtgaccatggtccttgggccctaacatctggacgaagccttgtaaaacagaaatactgaggtgttttaatcctcagaaacatttagattgggacacaaatcttattttttactcttaaatttttcacattttgggggacatggtctatatttttctcagatttctgatatgttgtcttttaaaaatgtgtaaaagttacagttccttttctatagtttattttaaaatgtgggtcaatagtcccactgcttagaataagaggcacacaggatttcaatagaaattgcatgcctttttagatgtgcgaatgtttcattaagcgtatgaatatttgaagagatgtatgacactttaaaaactgtttcctctactgtgttggtggccaggtattaagactgttaataataacaatttagctctccaaatatcctgcatcacaggtgttaaagaggactggaaacaccttagttcttgtattcttgaggatgatttgccatattgtgtctagtatcacggcaaaactccaagtagcattttaaatagtatttatttgggttggaattatttctatgcattgactcatcttcctgggtttcattagctgtacgcattgtactttcttccttaccactatttatctcgaattcttgagattaaagtacagatgaaatctaaactttatctggtaaagttattagttcttacaagtagcaagcaaacggtaaactaaataggatgacctaattgtaccagatttaaaaaaaaaaacaaaaaaccctgattctcctgattctctctacaaaatgctaacatttaaatatgtcatttgtaaattgttaaccagaaggaacatgggaatgactgtaggttgagtttgaagtgtgaagtttgaaggcttagtttgcttgttttc

SEQ ID NO: 276271 - DNA, 3164 bp, Homo sapiens
actctcatgtaagtcaacaacatcctgggattgggacacactttctgggcactgctggccagtcccaaaatggaacataaggaagtggttcttctacttcttttatttctgaaatcaggtcaaggagagcccctggatgactatgtgaatacccaggggccttcactgttcagtgtcactaagaagcagctgggggcaggaagcagagaagaatgtgcagcaaaatgtgaagaggacaaagaattcacctgcagggcattccaatatcacagtaaagagcaacaatgtgtgataatggctgaaaacaggaagtcctccataatcattaggatgagagatgcagttttatttgaaaagtaaatgtatctttcagagtgcaagactgggaatggaaagaactacagagggacgatgtccaaaacaaaaaatggcatcacctgtcaaaaatggagttccacttctccccgcagacctaggtcagacttttcctttcatctttgtgttcatctactgtaaagtgtccgtctgtgtctgtgagggattggttccaggacccctgtggctaccaaaatccatgcttctcaagtcccttatgtaaaatggtgcagtatttgcatataacctacataccttctcttgtgcaatccctaatataatgtaaatgctatgtaatcgttgttatactgtattgtttttatttgtattatgttttattgtcatattgttattttctctcatctttttcaagtcttttccatccacagttggttgaatttgtggatgtggaacccatggatacagagggccaactgtatttaggataatttcatcacttttaattcaaaccagaatatgtgaataagcagacagaaagaatctttttgatgtcgatgttcaactatttttggcaccatagtagaacatggttgctttctattttttcttgggtatggaggtttcttgaagacctagaacatagaagaatgcctagttaaaaaaaaaaatcaatgaaactacgagttttaggccaaatctgagaaaagaccaaagatgactatgtttgggactgaagtaaacatatcaagttagaactctcatcacatgtttgactcaaattgtggagcaaaatagtaaataaaatataaaaatgaaaatgaagatacgtgaaattcaaatgtcacaacttgcctattatttattttagtgcatttttttgtgcttttcccagtttggtgttaggtggccttaagttctcagtaatgacacttatcaaataggaacttagtgttactcacctttatccattcccccaacactcaacaaattgcctttgctatatccctatgagatgagcagatcaaatattccccgtgagttaatgaaaactgattcaaccaaatggcgaagtcagagactatcgggggccatggagacactctgggccatttttatgaggtagtctaggctcatcttcatgagggaactgaggtcttggggggtgggggttacccaaataggttcacagaagaaccagaaataaaacctgcctttctagactgtaagtcttgtgattgtcatctaaatggttgtctctatacagcaactcatctctagaactgaaaataagtttaaatccctcctccatccccaataattcaagctgcatttcagagaaaaccaggactttggaatcagacagatcaactttgaattcttgatctgcttcttcatagctatttatgcttaggcaagttttgttttgttttgttttacgttgccactcagtcttctcatctgtaaaacagggataataacaccttcctcaaatggttttttttattaggactaaaagagagaatgtgtggaaagatgttagtggaattcctggcacatagttcacatggacaaaatggtgttaactacgaaaatttttacagagaaaagggcaactgacaaaagcaggtgtttggaatgaattaagaccatggcaggcttttgaggcctttatatttctcctgactgtgcaataaaaatattttggctctctgtctaagacttggctgtcacagtagcaatggtaatattagctactgtgccagaagcagcctatcaatagagaaattgaaaatctgaccacacaaatgctgcagcacccagctgaaatgcatttggatgacaatctcagatgggaatcgagagcatctccttctgccttgctaatagcaagctgatttttagaatatagtctaagtgcttctcttccatcctccccagattctcacctgctacacacccctcagagggactggaggaatccagacaacgatgcgcaggggccctggtgctatactactgatccagaacagagatatgactactgcgacattcctgagtgtgaagggcaggagtggctctagaaaatgttttcatttctgcccttcacctgtaaaataatttgttgtaaagccccttcccacagggatattattaataattgcgtaacgtgttcacctctcggaaaggagcaaaactttgctcagatcccagaattaacctgatttttttttttttttctgagacagaattttgctctcattgcccaggctagagtgcaatggtgcgatctcagctcaccacaacctccgcctctgggttcaagcgattctcctacctcagcctcccaagtagctggaattacatgcatgtgccaccatgcctggctaattttacatttttagtagagacagggtttctcccatgttggtcaggctggtcttgaactctcgacctcaggtgagccgcccgcctcagcctcccaaagtgctgggattacaggcatgagccaccatgcccagcagacctgaattattattattaaaatgttacatcaacatgtacaaatataaaactacatctaaactctaagtacagacttcttatgcttaaaactcttacacagtgttaaccccaagacagatttgcaattaagtagttaaaataagacaacaaagtcaataaaaatcaaataaacaatatacatttaatgtggtagactttgctgttttgctgaagctaagcaaggaaccagtttttaaatcagcaatccgttattttaatggactgagcaatttaatagtgcacctcaaaggtcaatgataaaaact

SEQ ID NO: 276272 - DNA, 3027 bp, Homo sapiens
cacccaggtagtgagctaaatacctactaaataggtcaaggagagcccctggatgactatgtgaatacccaggggccttcactgttcagtgtcactaagaagcagctgggggcaggaagcagagaagaatgtgcagcaaaatgtgaagaggacaaagaattcacctgcagggcattccaatatcacagtaaagagcaacaatgtgtgataatggctgaaaacaggaagtcctccataatcattaggatgagagatgcagttttatttgaaaagtaaatgtatctttcagagtgcaagactgggaatggaaagaactacagagggacgatgtccaaaacaaaaaatggcatcacctgtcaaaaatggagttccacttctccccgcagacctaggtcagacttttcctttcatctttgtgttcatctactgtaaagtgtccgtctgtgtctgtgagggattggttccaggacccctgtggctaccaaaatccatgcttctcaagtcccttatgtaaaatggtgcagtatttgcatataacctacataccttctcttgtgcaatccctaatataatgtaaatgctatgtaatcgttgttatactgtattgtttttatttgtattatgttttattgtcatattgttattttctctcatctttttcaagtcttttccatccacagttggttgaatttgtggatgtggaacccatggatacagagggccaactgtatttaggataatttcatcacttttaattcaaaccagaatatgtgaataagcagacagaaagaatctttttgatgtcgatgttcaactatttttggcaccatagtagaacatggttgctttctattttttcttgggtatggaggtttcttgaagacctagaacatagaagaatgcctagttaaaaaaaaaaatcaatgaaactacgagttttaggccaaatctgagaaaagaccaaagatgactatgtttgggactgaagtaaacatatcaagttagaactctcatcacatgtttgactcaaattgtggagcaaaatagtaaataaaatataaaaatgaaaatgaagatacgtgaaattcaaatgtcacaacttgcctattatttattttagtgcatttttttgtgcttttcccagtttggtgttaggtggccttaagttctcagtaatgacacttatcaaataggaacttagtgttactcacctttatccattcccccaacactcaacaaattgcctttgctatatccctatgagatgagcagatcaaatattccccgtgagttaatgaaaactgattcaaccaaatggcgaagtcagagactatcgggggccatggagacactctgggccatttttatgaggtagtctaggctcatcttcatgagggaactgaggtcttggggggtgggggttacccaaataggttcacagaagaaccagaaataaaacctgcctttctagactgtaagtcttgtgattgtcatctaaatggttgtctctatacagcaactcatctctagaactgaaaataagtttaaatccctcctccatccccaataattcaagctgcatttcagagaaaaccaggactttggaatcagacagatcaactttgaattcttgatctgcttcttcatagctatttatgcttaggcaagttttgttttgttttgttttacgttgccactcagtcttctcatctgtaaaacagggataataacaccttcctcaaatggttttttttattaggactaaaagagagaatgtgtggaaagatgttagtggaattcctggcacatagttcacatggacaaaatggtgttaactacgaaaatttttacagagaaaagggcaactgacaaaagcaggtgtttggaatgaattaagaccatggcaggcttttgaggcctttatatttctcctgactgtgcaataaaaatattttggctctctgtctaagacttggctgtcacagtagcaatggtaatattagctactgtgccagaagcagcctatcaatagagaaattgaatctcagatgggaatcgagagcatctccttctgccttgctaatagcaagctgatttttagaatatagtctaagtgcttctcttccatcctccccagattctcacctgctacacacccctcagagggactggaggaatccagacaacgatgcgcaggggccctggtgctatactactgatccagaacagagatatgactactgcgacattcctgagtgtgaagggcaggagtggctctagaaaatgttttcatttctgcccttcacctgtaaaataatttgttgtaaagccccttcccacagggatattattaataattgcgtaacgtgttcacctctcggaaaggagcaaaactttgctcagatcccagaattaacctgatttttttttttttttctgagacagaattttgctctcattgcccaggctagagtgcaatggtgcgatctcagctcaccacaacctccgcctctgggttcaagcgattctcctacctcagcctcccaagtagctggaattacatgcatgtgccaccatgcctggctaattttacatttttagtagagacagggtttctcccatgttggtcaggctggtcttgaactctcgacctcaggtgagccgcccgcctcagcctcccaaagtgctgggattacaggcatgagccaccatgcccagcagacctgaattattattattaaaatgttacatcaacatgtacaaatataaaactacatctaaactctaagtacagacttcttatgcttaaaactcttacacagtgttaaccccaagacagatttgcaattaagtagttaaaataagacaacaaagtcaataaaaatcaaataaacaatatacatttaatgtggtagactttgctgttttgctgaagctaagcaaggaaccagtttttaaatcagcaatccgttattttaatggactgagcaatttaatagtgcacctcaaaggtcaatgataaaaact

SEQ ID NO: 276273 - DNA, 3025 bp, Homo sapiens
ccatttattccacttggatctcccacctctaggtcaaggagagcccctggatgactatgtgaatacccaggggccttcactgttcagtgtcactaagaagcagctgggggcaggaagcagagaagaatgtgcagcaaaatgtgaagaggacaaagaattcacctgcagggcattccaatatcacagtaaagagcaacaatgtgtgataatggctgaaaacaggaagtcctccataatcattaggatgagagatgcagttttatttgaaaagtaaatgtatctttcagagtgcaagactgggaatggaaagaactacagagggacgatgtccaaaacaaaaaatggcatcacctgtcaaaaatggagttccacttctccccgcagacctaggtcagacttttcctttcatctttgtgttcatctactgtaaagtgtccgtctgtgtctgtgagggattggttccaggacccctgtggctaccaaaatccatgcttctcaagtcccttatgtaaaatggtgcagtatttgcatataacctacataccttctcttgtgcaatccctaatataatgtaaatgctatgtaatcgttgttatactgtattgtttttatttgtattatgttttattgtcatattgttattttctctcatctttttcaagtcttttccatccacagttggttgaatttgtggatgtggaacccatggatacagagggccaactgtatttaggataatttcatcacttttaattcaaaccagaatatgtgaataagcagacagaaagaatctttttgatgtcgatgttcaactatttttggcaccatagtagaacatggttgctttctattttttcttgggtatggaggtttcttgaagacctagaacatagaagaatgcctagttaaaaaaaaaaatcaatgaaactacgagttttaggccaaatctgagaaaagaccaaagatgactatgtttgggactgaagtaaacatatcaagttagaactctcatcacatgtttgactcaaattgtggagcaaaatagtaaataaaatataaaaatgaaaatgaagatacgtgaaattcaaatgtcacaacttgcctattatttattttagtgcatttttttgtgcttttcccagtttggtgttaggtggccttaagttctcagtaatgacacttatcaaataggaacttagtgttactcacctttatccattcccccaacactcaacaaattgcctttgctatatccctatgagatgagcagatcaaatattccccgtgagttaatgaaaactgattcaaccaaatggcgaagtcagagactatcgggggccatggagacactctgggccatttttatgaggtagtctaggctcatcttcatgagggaactgaggtcttggggggtgggggttacccaaataggttcacagaagaaccagaaataaaacctgcctttctagactgtaagtcttgtgattgtcatctaaatggttgtctctatacagcaactcatctctagaactgaaaataagtttaaatccctcctccatccccaataattcaagctgcatttcagagaaaaccaggactttggaatcagacagatcaactttgaattcttgatctgcttcttcatagctatttatgcttaggcaagttttgttttgttttgttttacgttgccactcagtcttctcatctgtaaaacagggataataacaccttcctcaaatggttttttttattaggactaaaagagagaatgtgtggaaagatgttagtggaattcctggcacatagttcacatggacaaaatggtgttaactacgaaaatttttacagagaaaagggcaactgacaaaagcaggtgtttggaatgaattaagaccatggcaggcttttgaggcctttatatttctcctgactgtgcaataaaaatattttggctctctgtctaagacttggctgtcacagtagcaatggtaatattagctactgtgccagaagcagcctatcaatagagaaattgaatctcagatgggaatcgagagcatctccttctgccttgctaatagcaagctgatttttagaatatagtctaagtgcttctcttccatcctccccagattctcacctgctacacacccctcagagggactggaggaatccagacaacgatgcgcaggggccctggtgctatactactgatccagaacagagatatgactactgcgacattcctgagtgtgaagggcaggagtggctctagaaaatgttttcatttctgcccttcacctgtaaaataatttgttgtaaagccccttcccacagggatattattaataattgcgtaacgtgttcacctctcggaaaggagcaaaactttgctcagatcccagaattaacctgatttttttttttttttctgagacagaattttgctctcattgcccaggctagagtgcaatggtgcgatctcagctcaccacaacctccgcctctgggttcaagcgattctcctacctcagcctcccaagtagctggaattacatgcatgtgccaccatgcctggctaattttacatttttagtagagacagggtttctcccatgttggtcaggctggtcttgaactctcgacctcaggtgagccgcccgcctcagcctcccaaagtgctgggattacaggcatgagccaccatgcccagcagacctgaattattattattaaaatgttacatcaacatgtacaaatataaaactacatctaaactctaagtacagacttcttatgcttaaaactcttacacagtgttaaccccaagacagatttgcaattaagtagttaaaataagacaacaaagtcaataaaaatcaaataaacaatatacatttaatgtggtagactttgctgttttgctgaagctaagcaaggaaccagtttttaaatcagcaatccgttattttaatggactgagcaatttaatagtgcacctcaaaggtcaatgataaaaact

SEQ ID NO: 276274 - DNA, 3057 bp, Homo sapiens
actctcatgtaagtcaacaacatcctgggattgggacacactttctgggcactgctggccagtcccaaaatggaacataaggaagtggttcttctacttcttttatttctgaaatcaggtcaaggagagcccctggatgactatgtgaatacccaggggccttcactgttcagtgtcactaagaagcagctgggggcaggaagcagagaagaatgtgcagcaaaatgtgaagaggacaaagaattcacctgcagggcattccaatatcacagtaaagagcaacaatgtgtgataatggctgaaaacaggaagtcctccataatcattaggatgagagatgcagttttatttgaaaagtaaatgtatctttcagagtgcaagactgggaatggaaagaactacagagggacgatgtccaaaacaaaaaatggcatcacctgtcaaaaatggagttccacttctccccgcagacctaggtcagacttttcctttcatctttgtgttcatctactgtaaagtgtccgtctgtgtctgtgagggattggttccaggacccctgtggctaccaaaatccatgcttctcaagtcccttatgtatataatgtaaatgctatgtaatcgttgttatactgtattgtttttatttgtattatgttttattgtcatattgttattttctctcatctttttcaagtcttttccatccacagttggttgaatttgtggatgtggaacccatggatacagagggccaactgtatttaggataatttcatcacttttaattcaaaccagaatatgtgaataagcagacagaaagaatctttttgatgtcgatgttcaactatttttggcaccatagtagaacatggttgctttctattttttcttgggtatggaggtttcttgaagacctagaacatagaagaatgcctagttaaaaaaaaaaatcaatgaaactacgagttttaggccaaatctgagaaaagaccaaagatgactatgtttgggactgaagtaaacatatcaagttagaactctcatcacatgtttgactcaaattgtggagcaaaatagtaaataaaatataaaaatgaaaatgaagatacgtgaaattcaaatgtcacaacttgcctattatttattttagtgcatttttttgtgcttttcccagtttggtgttaggtggccttaagttctcagtaatgacacttatcaaataggaacttagtgttactcacctttatccattcccccaacactcaacaaattgcctttgctatatccctatgagatgagcagatcaaatattccccgtgagttaatgaaaactgattcaaccaaatggcgaagtcagagactatcgggggccatggagacactctgggccatttttatgaggtagtctaggctcatcttcatgagggaactgaggtcttggggggtgggggttacccaaataggttcacagaagaaccagaaataaaacctgcctttctagactgtaagtcttgtgattgtcatctaaatggttgtctctatacagcaactcatctctagaactgaaaataagtttaaatccctcctccatccccaataattcaagctgcatttcagagaaaaccaggactttggaatcagacagatcaactttgaattcttgatctgcttcttcatagctatttatgcttaggcaagttttgttttgttttgttttacgttgccactcagtcttctcatctgtaaaacagggataataacaccttcctcaaatggttttttttattaggactaaaagagagaatgtgtggaaagatgttagtggaattcctggcacatagttcacatggacaaaatggtgttaactacgaaaatttttacagagaaaagggcaactgacaaaagcaggtgtttggaatgaattaagaccatggcaggcttttgaggcctttatatttctcctgactgtgcaataaaaatattttggctctctgtctaagacttggctgtcacagtagcaatggtaatattagctactgtgccagaagcagcctatcaatagagaaattgaatctcagatgggaatcgagagcatctccttctgccttgctaatagcaagctgatttttagaatatagtctaagtgcttctcttccatcctccccagattctcacctgctacacacccctcagagggactggaggaatccagacaacgatgcgcaggggccctggtgctatactactgatccagaacagagatatgactactgcgacattcctgagtgtgaagggcaggagtggctctagaaaatgttttcatttctgcccttcacctgtaaaataatttgttgtaaagccccttcccacagggatattattaataattgcgtaacgtgttcacctctcggaaaggagcaaaactttgctcagatcccagaattaacctgatttttttttttttttctgagacagaattttgctctcattgcccaggctagagtgcaatggtgcgatctcagctcaccacaacctccgcctctgggttcaagcgattctcctacctcagcctcccaagtagctggaattacatgcatgtgccaccatgcctggctaattttacatttttagtagagacagggtttctcccatgttggtcaggctggtcttgaactctcgacctcaggtgagccgcccgcctcagcctcccaaagtgctgggattacaggcatgagccaccatgcccagcagacctgaattattattattaaaatgttacatcaacatgtacaaatataaaactacatctaaactctaagtacagacttcttatgcttaaaactcttacacagtgttaaccccaagacagatttgcaattaagtagttaaaataagacaacaaagtcaataaaaatcaaataaacaatatacatttaatgtggtagactttgctgttttgctgaagctaagcaaggaaccagtttttaaatcagcaatccgttattttaatggactgagcaatttaatagtgcacctcaaaggtcaatgataaaaact

SEQ ID NO: 276275 - DNA, 3001 bp, Homo sapiens
actctcatgtaagtcaacaacatcctgggattgggacacactttctgggcactgctggccagtcccaaaatggaacataaggaagtggttcttctacttcttttatttctgaaatcaggtcaaggagagcccctggatgactatgtgaatacccaggggccttcactgttcagtgtcactaagaagcagctgggggcaggaatcctccataatcattaggatgagagatgcagttttatttgaaaagtaaatgtatctttcagagtgcaagactgggaatggaaagaactacagagggacgatgtccaaaacaaaaaatggcatcacctgtcaaaaatggagttccacttctccccgcagacctaggtcagacttttcctttcatctttgtgttcatctactgtaaagtgtccgtctgtgtctgtgagggattggttccaggacccctgtggctaccaaaatccatgcttctcaagtcccttatgtaaaatggtgcagtatttgcatataacctacataccttctcttgtgcaatccctaatataatgtaaatgctatgtaatcgttgttatactgtattgtttttatttgtattatgttttattgtcatattgttattttctctcatctttttcaagtcttttccatccacagttggttgaatttgtggatgtggaacccatggatacagagggccaactgtatttaggataatttcatcacttttaattcaaaccagaatatgtgaataagcagacagaaagaatctttttgatgtcgatgttcaactatttttggcaccatagtagaacatggttgctttctattttttcttgggtatggaggtttcttgaagacctagaacatagaagaatgcctagttaaaaaaaaaaatcaatgaaactacgagttttaggccaaatctgagaaaagaccaaagatgactatgtttgggactgaagtaaacatatcaagttagaactctcatcacatgtttgactcaaattgtggagcaaaatagtaaataaaatataaaaatgaaaatgaagatacgtgaaattcaaatgtcacaacttgcctattatttattttagtgcatttttttgtgcttttcccagtttggtgttaggtggccttaagttctcagtaatgacacttatcaaataggaacttagtgttactcacctttatccattcccccaacactcaacaaattgcctttgctatatccctatgagatgagcagatcaaatattccccgtgagttaatgaaaactgattcaaccaaatggcgaagtcagagactatcgggggccatggagacactctgggccatttttatgaggtagtctaggctcatcttcatgagggaactgaggtcttggggggtgggggttacccaaataggttcacagaagaaccagaaataaaacctgcctttctagactgtaagtcttgtgattgtcatctaaatggttgtctctatacagcaactcatctctagaactgaaaataagtttaaatccctcctccatccccaataattcaagctgcatttcagagaaaaccaggactttggaatcagacagatcaactttgaattcttgatctgcttcttcatagctatttatgcttaggcaagttttgttttgttttgttttacgttgccactcagtcttctcatctgtaaaacagggataataacaccttcctcaaatggttttttttattaggactaaaagagagaatgtgtggaaagatgttagtggaattcctggcacatagttcacatggacaaaatggtgttaactacgaaaatttttacagagaaaagggcaactgacaaaagcaggtgtttggaatgaattaagaccatggcaggcttttgaggcctttatatttctcctgactgtgcaataaaaatattttggctctctgtctaagacttggctgtcacagtagcaatggtaatattagctactgtgccagaagcagcctatcaatagagaaattgaatctcagatgggaatcgagagcatctccttctgccttgctaatagcaagctgatttttagaatatagtctaagtgcttctcttccatcctccccagattctcacctgctacacacccctcagagggactggaggaatccagacaacgatgcgcaggggccctggtgctatactactgatccagaacagagatatgactactgcgacattcctgagtgtgaagggcaggagtggctctagaaaatgttttcatttctgcccttcacctgtaaaataatttgttgtaaagccccttcccacagggatattattaataattgcgtaacgtgttcacctctcggaaaggagcaaaactttgctcagatcccagaattaacctgatttttttttttttttctgagacagaattttgctctcattgcccaggctagagtgcaatggtgcgatctcagctcaccacaacctccgcctctgggttcaagcgattctcctacctcagcctcccaagtagctggaattacatgcatgtgccaccatgcctggctaattttacatttttagtagagacagggtttctcccatgttggtcaggctggtcttgaactctcgacctcaggtgagccgcccgcctcagcctcccaaagtgctgggattacaggcatgagccaccatgcccagcagacctgaattattattattaaaatgttacatcaacatgtacaaatataaaactacatctaaactctaagtacagacttcttatgcttaaaactcttacacagtgttaaccccaagacagatttgcaattaagtagttaaaataagacaacaaagtcaataaaaatcaaataaacaatatacatttaatgtggtagactttgctgttttgctgaagctaagcaaggaaccagtttttaaatcagcaatccgttattttaatggactgagcaatttaatagtgcacctcaaaggtcaatgataaaaact

SEQ ID NO: 276276 - DNA, 3158 bp, Homo sapiens
actctcatgtaagtcaacaacatcctgggattgggacacactttctgggcactgctggccagtcccaaaatggaacataaggaagtggttcttctacttcttttatttctgaaatcaggtcaaggagagcccctggatgactatgtgaatacccaggggccttcactgttcagtgtcactaagaagcagctgggggcaggaagcagagaagaatgtgcagcaaaatgtgaagaggacaaagaattcacctgcaggtattttcatcgtcgttgcacctacccagaaatctgtaattcagatgggcattccaatatcacagtaaagagcaacaatgtgtgataatggctgaaaacaggaagtcctccataatcattaggatgagagatgcagttttatttgaaaagtaaatgtatctttcagagtgcaagactgggaatggaaagaactacagagggacgatgtccaaaacaaaaaatggcatcacctgtcaaaaatggagttccacttctccccgcagacctaggtcagacttttcctttcatctttgtgttcatctactgtaaagtgtccgtctgtgtctgtgagggattggttccaggacccctgtggctaccaaaatccatgcttctcaagtcccttatgtaaaatggtgcagtatttgcatataacctacataccttctcttgtgcaatccctaatataatgtaaatgctatgtaatcgttgttatactgtattgtttttatttgtattatgttttattgtcatattgttattttctctcatctttttcaagtcttttccatccacagttggttgaatttgtggatgtggaacccatggatacagagggccaactgtatttaggataatttcatcacttttaattcaaaccagaatatgtgaataagcagacagaaagaatctttttgatgtcgatgttcaactatttttggcaccatagtagaacatggttgctttctattttttcttgggtatggaggtttcttgaagacctagaacatagaagaatgcctagttaaaaaaaaaaatcaatgaaactacgagttttaggccaaatctgagaaaagaccaaagatgactatgtttgggactgaagtaaacatatcaagttagaactctcatcacatgtttgactcaaattgtggagcaaaatagtaaataaaatataaaaatgaaaatgaagatacgtgaaattcaaatgtcacaacttgcctattatttattttagtgcatttttttgtgcttttcccagtttggtgttaggtggccttaagttctcagtaatgacacttatcaaataggaacttagtgttactcacctttatccattcccccaacactcaacaaattgcctttgctatatccctatgagatgagcagatcaaatattccccgtgagttaatgaaaactgattcaaccaaatggcgaagtcagagactatcgggggccatggagacactctgggccatttttatgaggtagtctaggctcatcttcatgagggaactgaggtcttggggggtgggggttacccaaataggttcacagaagaaccagaaataaaacctgcctttctagactgtaagtcttgtgattgtcatctaaatggttgtctctatacagcaactcatctctagaactgaaaataagtttaaatccctcctccatccccaataattcaagctgcatttcagagaaaaccaggactttggaatcagacagatcaactttgaattcttgatctgcttcttcatagctatttatgcttaggcaagttttgttttgttttgttttacgttgccactcagtcttctcatctgtaaaacagggataataacaccttcctcaaatggttttttttattaggactaaaagagagaatgtgtggaaagatgttagtggaattcctggcacatagttcacatggacaaaatggtgttaactacgaaaatttttacagagaaaagggcaactgacaaaagcaggtgtttggaatgaattaagaccatggcaggcttttgaggcctttatatttctcctgactgtgcaataaaaatattttggctctctgtctaagacttggctgtcacagtagcaatggtaatattagctactgtgccagaagcagcctatcaatagagaaattgaatctcagatgggaatcgagagcatctccttctgccttgctaatagcaagctgatttttagaatatagtctaagtgcttctcttccatcctccccagattctcacctgctacacacccctcagagggactggaggaatccagacaacgatgcgcaggggccctggtgctatactactgatccagaacagagatatgactactgcgacattcctgagtgtgaagggcaggagtggctctagaaaatgttttcatttctgcccttcacctgtaaaataatttgttgtaaagccccttcccacagggatattattaataattgcgtaacgtgttcacctctcggaaaggagcaaaactttgctcagatcccagaattaacctgatttttttttttttttctgagacagaattttgctctcattgcccaggctagagtgcaatggtgcgatctcagctcaccacaacctccgcctctgggttcaagcgattctcctacctcagcctcccaagtagctggaattacatgcatgtgccaccatgcctggctaattttacatttttagtagagacagggtttctcccatgttggtcaggctggtcttgaactctcgacctcaggtgagccgcccgcctcagcctcccaaagtgctgggattacaggcatgagccaccatgcccagcagacctgaattattattattaaaatgttacatcaacatgtacaaatataaaactacatctaaactctaagtacagacttcttatgcttaaaactcttacacagtgttaaccccaagacagatttgcaattaagtagttaaaataagacaacaaagtcaataaaaatcaaataaacaatatacatttaatgtggtagactttgctgttttgctgaagctaagcaaggaaccagtttttaaatcagcaatccgttattttaatggactgagcaatttaatagtgcacctcaaaggtcaatgataaaaact

SEQ ID NO: 276277 - DNA, 2971 bp, Homo sapiens
tcaatacacagagagctcataagtagcatttgaatacatgaatcaaagtatggaatggcccagtttactgcagcctttttgcaggtgcaaaagatgatcttttagaaagcagaaacagggggtctggtgcatgagatctttttctcaatgtgactgtgctgtgcagaccttcacgtggtgtcttgtgaaagactttgaccactgtgtggactttccttcagtgtatctttcagagtgcaagactgggaatggaaagaactacagagggacgatgtccaaaacaaaaaatggcatcacctgtcaaaaatggagttccacttctccccgcagacctaggtcagacttttcctttcatctttgtgttcatctactgtaaagtgtccgtctgtgtctgtgagggattggttccaggacccctgtggctaccaaaatccatgcttctcaagtcccttatgtaaaatggtgcagtatttgcatataacctacataccttctcttgtgcaatccctaatataatgtaaatgctatgtaatcgttgttatactgtattgtttttatttgtattatgttttattgtcatattgttattttctctcatctttttcaagtcttttccatccacagttggttgaatttgtggatgtggaacccatggatacagagggccaactgtatttaggataatttcatcacttttaattcaaaccagaatatgtgaataagcagacagaaagaatctttttgatgtcgatgttcaactatttttggcaccatagtagaacatggttgctttctattttttcttgggtatggaggtttcttgaagacctagaacatagaagaatgcctagttaaaaaaaaaaatcaatgaaactacgagttttaggccaaatctgagaaaagaccaaagatgactatgtttgggactgaagtaaacatatcaagttagaactctcatcacatgtttgactcaaattgtggagcaaaatagtaaataaaatataaaaatgaaaatgaagatacgtgaaattcaaatgtcacaacttgcctattatttattttagtgcatttttttgtgcttttcccagtttggtgttaggtggccttaagttctcagtaatgacacttatcaaataggaacttagtgttactcacctttatccattcccccaacactcaacaaattgcctttgctatatccctatgagatgagcagatcaaatattccccgtgagttaatgaaaactgattcaaccaaatggcgaagtcagagactatcgggggccatggagacactctgggccatttttatgaggtagtctaggctcatcttcatgagggaactgaggtcttggggggtgggggttacccaaataggttcacagaagaaccagaaataaaacctgcctttctagactgtaagtcttgtgattgtcatctaaatggttgtctctatacagcaactcatctctagaactgaaaataagtttaaatccctcctccatccccaataattcaagctgcatttcagagaaaaccaggactttggaatcagacagatcaactttgaattcttgatctgcttcttcatagctatttatgcttaggcaagttttgttttgttttgttttacgttgccactcagtcttctcatctgtaaaacagggataataacaccttcctcaaatggttttttttattaggactaaaagagagaatgtgtggaaagatgttagtggaattcctggcacatagttcacatggacaaaatggtgttaactacgaaaatttttacagagaaaagggcaactgacaaaagcaggtgtttggaatgaattaagaccatggcaggcttttgaggcctttatatttctcctgactgtgcaataaaaatattttggctctctgtctaagacttggctgtcacagtagcaatggtaatattagctactgtgccagaagcagcctatcaatagagaaattgaatctcagatgggaatcgagagcatctccttctgccttgctaatagcaagctgatttttagaatatagtctaagtgcttctcttccatcctccccagattctcacctgctacacacccctcagagggactggaggaatccagacaacgatgcgcaggggccctggtgctatactactgatccagaacagagatatgactactgcgacattcctgagtgtgaagggcaggagtggctctagaaaatgttttcatttctgcccttcacctgtaaaataatttgttgtaaagccccttcccacagggatattattaataattgcgtaacgtgttcacctctcggaaaggagcaaaactttgctcagatcccagaattaacctgatttttttttttttttctgagacagaattttgctctcattgcccaggctagagtgcaatggtgcgatctcagctcaccacaacctccgcctctgggttcaagcgattctcctacctcagcctcccaagtagctggaattacatgcatgtgccaccatgcctggctaattttacatttttagtagagacagggtttctcccatgttggtcaggctggtcttgaactctcgacctcaggtgagccgcccgcctcagcctcccaaagtgctgggattacaggcatgagccaccatgcccagcagacctgaattattattattaaaatgttacatcaacatgtacaaatataaaactacatctaaactctaagtacagacttcttatgcttaaaactcttacacagtgttaaccccaagacagatttgcaattaagtagttaaaataagacaacaaagtcaataaaaatcaaataaacaatatacatttaatgtggtagactttgctgttttgctgaagctaagcaaggaaccagtttttaaatcagcaatccgttattttaatggactgagcaatttaatagtgcacctcaaaggtcaatgataaaaact

SEQ ID NO: 276278 - DNA, 1366 bp, Homo sapiens
actctcatgtaagtcaacaacatcctgggattgggacacactttctgggcactgctggccagtcccaaaatggaacataaggaagtggttcttctacttcttttatttctgaaatcaggtcaaggagagcccctggatgactatgtgaatacccaggggccttcactgttcagtgtcactaagaagcagctgggggcaggaagcagagaagaatgtgcagcaaaatgtgaagaggacaaagaattcacctgcagggcattccaatatcacagtaaagagcaacaatgtgtgataatggctgaaaacaggaagtcctccataatcattaggatgagagatgcagttttatttgaaaagtaaatgtatctttcagagtgcaagactgggaatggaaagaactacagagggacgatgtccaaaacaaaaaatggcatcacctgtcaaaaatggagttccacttctccccgcagacctagattctcacctgctacacacccctcagagggactggaggaatccagacaacgatgcgcaggggccctggtgctatactactgatccagaacagagatatgactactgcgacattcctgagtgtgaagggcaggagtggctctagaaaatgttttcatttctgcccttcacctgtaaaataatttgttgtaaagccccttcccacagggatattattaataattgcgtaacgtgttcacctctcggaaaggagcaaaactttgctcagatcccagaattaacctgatttttttttttttttctgagacagaattttgctctcattgcccaggctagagtgcaatggtgcgatctcagctcaccacaacctccgcctctgggttcaagcgattctcctacctcagcctcccaagtagctggaattacatgcatgtgccaccatgcctggctaattttacatttttagtagagacagggtttctcccatgttggtcaggctggtcttgaactctcgacctcaggtgagccgcccgcctcagcctcccaaagtgctgggattacaggcatgagccaccatgcccagcagacctgaattattattattaaaatgttacatcaacatgtacaaatataaaactacatctaaactctaagtacagacttcttatgcttaaaactcttacacagtgttaaccccaagacagatttgcaattaagtagttaaaataagacaacaaagtcaataaaaatcaaataaacaatatacatttaatgtggtagactttgctgttttgctgaagctaagcaaggaaccagtttttaaatcagcaatccgttattttaatggactgagcaatttaatagtgcacctcaaaggtcaatgataaaaact

SEQ ID NO: 276279 - DNA, 2022 bp, Homo sapiens
taaacaattccaaaataaaatttccagcacaactaaatattgttgatgataagaggatttttaaaaaagttcttttaaaacagaagcttatatacaacttagaatctaaaaccaatagatttatggtaaaccttaaaactgaaccaaaacaaacaaaaaccaaagttttaatcatttaaaaatcatgtttattgaggtacaacttatagtaaaacctgcccttttcagcgtatagcactgagtcttgacaaatgcacagttatgtaccaccaccgaccaaggcctggcacatttttacctcctcaaagttctccctggctgcttctcccactccttggcaaccactaacctgttttctgtccttatagtactgcttttttcagtgtcatataagtagaatcacactgtacatagtattttgagtctgacctctgtcaactggcataatgcatttgagaattatccatgttgctgtactggcagtgcattcttttttattgctgagcagtattcaattgcatggctgtaccagtttgtttattcatttgccagttgaaggataactgagatcttcctcgtttttagcaattttaaagaaagtttctatgaataattgtgtacaggtttttaattaaatgttttggagatataattcatataccacataattcacctttttaaagtgcataagtcactggtttttaatatattcacaaggtttgtgcataggtttttgtgtgaatactggttttcattcctcttggataaagatttaatttggtattacccttccagacacctttctgtgttttcatacgtatatatgtatgacggtttgaccttaggcagagtagcattttcaaaattttacatggggaaactttctaggtttaaagccattttatttttctgttctgtctggttttatctacgtgttatttacaatctgctgtgtaacaaattactacaaacttaggtaccttaacacatatttatttcacagtttctgtgggtcaggagatcagaaatggttctatttcaaggtctctcacagggctgcaatcaagatgttggcatggctgggtctcatctgaaggctggactggagagaatctacttccaaacttatgtggtagttggaagaatttagttcctcaaggctgctaaactgatggcctgtgttccttgcctctgggatggtagcttgcttcaacaaagtgtgcaagcagagaagacagagagagtccgctagcaagatagaagccacaatctcttgtaatctatcatttttgctgtatgctactggttaaaaataactcattaggttagcctactggctctcagggggaagagattatacaaaggcatgaatttctggaggagggaatgagggcaaagaactctgaaaagtttctcttccacaatctgaagaacttctagaaagtagaaggaagcaatattgcttagggatggacaacttggcactggttatgtgttccaagtgaggtaaccttgttcccaggaataaagagaaccagatgactgtaaacatttccctaaactgaaatgcactgttgtatgttcacctgaaatgaatggtgtaagctgaatatgagatttttgacaaaataaaaattttgctgtgttctcagatctggcaggctattgtgaggcaatgtgtcattttaccttataacgcagagttgtaacatgctactctgagcagctcatgacatctgcttgaaatttaagttgggcccctagtatgtgtttattataaagattttgatgctgcttttcagagttgggtaacctactttacccccttagctaatgtttcccaaatacacccaaacccacagaaaggaaaactattcctcattaactcacagccaacatcataaacattttatatctagagctgatgatacagtcaggtatttaccaacactcatgtatatatgtagagtttcaagaaataattgcttatccttactagattcaacatattctaatgtttca

SEQ ID NO: 276280 - DNA, 859 bp, Homo sapiens
actctcatgtaagtcaacaacatcctgggattgggacacactttctgggcactgctggccagtcccaaaatggaacataaggaagtggttcttctacttcttttatttctgaaatcaggtcaaggagagcccctggatgactatgtgaatacccaggggccttcactgttcagtgtcactaagaagcagctgggggcaggaagcagagaagaatgtgcagcaaaatgtgaagaggacaaagaattcacctgcagggcattccaatatcacagtaaagagcaacaatgtgtgataatggctgaaaacaggaagtcctccataatcattaggatgagagatgcagttttatttgaaaagtaaatgtatctttcagagtgcaagactgggaatggaaagaactacagagggacgatgtccaaaacaaaaaatggcatcacctgtcaaaaatggagttccacttctccccgcagacctagattctcacctgctacacacccctcagagggactggaggaatccagacaacgatgcgcaggggccctggtgctatactactgatccagaacagagatatgactactgcgacattcctgagtgtgaagggcaggagtggctctagaaaatgttttcatttctgcccttcacctgtaaaataatttgttgtaaagccccttcccacagggatattattaataattgcgtaacgtgttcacctctcggaaaggagcaaaactttgctcagatcccagaattaacctgatttttttttttttttctgagacagaattttgctctcattgcccaggcgagattgtgccactgcactccagcctgggaaacagcgagactgtctcaaaac

SEQ ID NO: 276281 - DNA, 960 bp, Homo sapiens
actctcatgtaagtcaacaacatcctgggattgggacacactttctgggcactgctggccagtcccaaaatggaacataaggaagtggttcttctacttcttttatttctgaaatcaggtcaaggagagcccctggatgactatgtgaatacccaggggccttcactgttcagtgtcactaagaagcagctgggggcaggaagcagagaagaatgtgcagcaaaatgtgaagaggacaaagaattcacctgcagggcattccaatatcacagtaaagagcaacaatgtgtgataatggctgaaaacaggaagtcctccataatcattaggatgagagatgcagttttatttgaaaagtaaaggctgcaatcaagatgttggcatggctgggtctcatctgaaggctggactggagagaatctacttccaaacttatgtggtagttggaagaatttagttcctcaaggctgctaaactgatggcctgtgttccttgcctctgggatggtagcttgcttcaacaaagtgtgcaagcagagaagacagagagagtccgctagcaagatagaagccacaatctcttgtaatctatcatttttgctgtatgctactggttaaaaataactcattaggttagcctactggctctcagggggaagagattatacaaaggcatgaatttctggaggagggaatgagggcaaagaactctgaaaagtttctcttccacaatctgaagaacttctagaaagtagaaggaagcaatattgcttagggatggacaacttggcactggttatgtgttccaagtgaggtaaccttgttcccaggaataaagagaaccagatgactgtaaacatttccctaaactgaaatgcactgttgtatgttcacctgaaatgaatggtgtaagctgaatatgagatttttgacaaaataaaaattttgctgtgttctcaga

SEQ ID NO: 276282 - DNA, 1329 bp, Homo sapiens
actctcatgtaagtcaacaacatcctgggattgggacacactttctgggcactgctggccagtcccaaaatggaacataaggaagtggttcttctacttcttttatttctgaaatcaggtcaaggagagcccctggatgactatgtgaatacccaggggccttcactgttcagtgtcactaagaagcagctgggggcaggaagcagagaagaatgtgcagcaaaatgtgaagaggacaaagaattcacctgcagggcattccaatatcacagtaaagagcaacaatgtgtgataatggctgaaaacaggaagtcctccataatcattaggatgagagatgcagttttatttgaaaagtaaaggctgcaatcaagatgttggcatggctgggtctcatctgaaggctggactggagagaatctacttccaaacttatgtggtagttggaagaatttagttcctcaaggctgctaaactgatggcctgtgttccttgcctctgggatggtagcttgcttcaacaaagtgtgcaagcagagaagacagagagagtccgctagcaagatagaagccacaatctcttgtaatctatcatttttgctgtatgctactggttaaaaataactcattaggttagcctactggctctcagggggaagagattatacaaaggcatgaatttctggaggagggaatgagggcaaagaactctgaaaagtttctcttccacaatctgaagaacttctagaaagtagaaggaagcaatattgcttagggatggacaacttggcactggttatgtgttccaagtgaggtaaccttgttcccaggaataaagagaaccagatgactgtaaacatttccctaaactgaaatgcactgttgtatgttcacctgaaatgaatggtgtaagctgaatatgagatttttgacaaaataaaaattttgctgtgttctcagatctggcaggctattgtgaggcaatgtgtcattttaccttataacgcagagttgtaacatgctactctgagcagctcatgacatctgcttgaaatttaagttgggcccctagtatgtgtttattataaagattttgatgctgcttttcagagttgggtaacctactttacccccttagctaatgtttcccaaatacacccaaacccacagaaaggaaaactattcctcattaactcacagccaacatcataaacattttatatctagagctgatgatacagtcaggtatttaccaacactcatgtatatatgtagagtttcaagaaataattgcttatccttactagattcaacatattctaatgtttca

SEQ ID NO: 276283 - DNA, 1541 bp, Homo sapiens
ccatttattccacttggatctcccacctctaggtcaaggagagcccctggatgactatgtgaatacccaggggccttcactgttcagtgtcactaagaagcagctgggggcaggaagcagagaagaatgtgcagcaaaatgtgaagaggacaaagaattcacctgcagggcattccaatatcacagtaaagagcaacaatgtgtgataatggctgaaaacaggaagtcctccataatcattaggatgagagatgcagttttatttgaaaagtaaagtgagtacattttcttcctcctcctcctactgtcctccccatcctcccactcttcctctttctctattctatctttaatttatgagaccagaggaggaaggcgctatggtgttgtaaaattgaattctgagttaggacaggatttgattactaactaaccatgtcagcttgagtatattacttcacctcctagatttaatttttttttgttcaaaaaatgaaaggattagatttacaaaatcacttctacctctatgaccctgaaaataagatttttaaaatattattttatatttaacaaggagatgggaagtctaagcattccttttggtcttggcttcttattctgcagggtgaccatggtccttgggccctaacatctggacgaagccttgtaaaacagaaatactgaggtgttttaatcctcagaaacatttagattgggacacaaatcttattttttactcttaaatttttcacattttgggggacatggtctatatttttctcagatttctgatatgttgtcttttaaaaatgtgtaaaagttacagttccttttctatagtttattttaaaatgtgggtcaatagtcccactgcttagaataagaggcacacaggatttcaatagaaattgcatgcctttttagatgtgcgaatgtttcattaagcgtatgaatatttgaagagatgtatgacactttaaaaactgtttcctctactgtgttggtggccaggtattaagactgttaataataacaatttagctctccaaatatcctgcatcacaggtgttaaagaggactggaaacaccttagttcttgtattcttgaggatgatttgccatattgtgtctagtatcacggcaaaactccaagtagcattttaaatagtatttatttgggttggaattatttctatgcattgactcatcttcctgggtttcattagctgtacgcattgtactttcttccttaccactatttatctcgaattcttgagattaaagtacagatgaaatctaaactttatctggtaaagttattagttcttacaagtagcaagcaaacggtaaactaaataggatgacctaattgtaccagatttaaaaaaaaaaacaaaaaaccctgattctcctgattctctctacaaaatgctaacatttaaatatgtcatttgtaaattgttaaccagaaggaacatgggaatgactgtaggttgagtttgaagtgtgaagtttgaaggcttagtttgcttgttttc

SEQ ID NO: 276284 - DNA, 1371 bp, Homo sapiens
accaaatcccaatgaagaccaccaaacttagcatttgggccaaactcagaagatgggtccactgtaaataaattccgggcgaacatattgagtctaaaaacaaaagaaagaaaggaataatcatcctcctcctactgtcctccccatcctcccactcttcctctttctctattctatctttaatttatgagaccagaggaggaaggcgctatggtgttgtaaaattgaattctgagttaggacaggatttgattactaactaaccatgtcagcttgagtatattacttcacctcctagatttaatttttttttgttcaaaaaatgaaaggattagatttacaaaatcacttctacctctatgaccctgaaaataagatttttaaaatattattttatatttaacaaggagatgggaagtctaagcattccttttggtcttggcttcttattctgcagggtgaccatggtccttgggccctaacatctggacgaagccttgtaaaacagaaatactgaggtgttttaatcctcagaaacatttagattgggacacaaatcttattttttactcttaaatttttcacattttgggggacatggtctatatttttctcagatttctgatatgttgtcttttaaaaatgtgtaaaagttacagttccttttctatagtttattttaaaatgtgggtcaatagtcccactgcttagaataagaggcacacaggatttcaatagaaattgcatgcctttttagatgtgcgaatgtttcattaagcgtatgaatatttgaagagatgtatgacactttaaaaactgtttcctctactgtgttggtggccaggtattaagactgttaataataacaatttagctctccaaatatcctgcatcacaggtgttaaagaggactggaaacaccttagttcttgtattcttgaggatgatttgccatattgtgtctagtatcacggcaaaactccaagtagcattttaaatagtatttatttgggttggaattatttctatgcattgactcatcttcctgggtttcattagctgtacgcattgtactttcttccttaccactatttatctcgaattcttgagattaaagtacagatgaaatctaaactttatctggtaaagttattagttcttacaagtagcaagcaaacggtaaactaaataggatgacctaattgtaccagatttaaaaaaaaaaacaaaaaaccctgattctcctgattctctctacaaaatgctaacatttaaatatgtcatttgtaaattgttaaccagaaggaacatgggaatgactgtaggttgagtttgaagtgtgaagtttgaaggcttagtttgcttgttttc

SEQ ID NO: 276285 - DNA, 3111 bp, Homo sapiens
actctcatgtaagtcaacaacatcctgggattgggacacactttctgggcactgctggccagtcccaaaatggaacataaggaagtggttcttctacttcttttatttctgaaatcaggtcaaggagagcccctggatgactatgtgaatacccaggggccttcactgttcagtgtcactaagaagcagctgggggcaggaagcagagaagaatgtgcagcaaaatgtgaagaggacaaagaattcacctgcagggcattccaatatcacagtaaagagcaacaatgtgtgataatggctgaaaacaggaagtcctccataatcattaggatgagagatgcagttttatttgaaaagtaaatgtatctttcagagtgcaagactgggaatggaaagaactacagagggacgatgtccaaaacaaaaaatggcatcacctgtcaaaaatggagttccacttctccccgcagacctaggtcagacttttcctttcatctttgtgttcatctactgtaaagtgtccgtctgtgtctgtgagggattggttccaggacccctgtggctaccaaaatccatgcttctcaagtcccttatgtaaaatggtgcagtatttgcatataacctacataccttctcttgtgcaatccctaatataatgtaaatgctatgtaatcgttgttatactgtattgtttttatttgtattatgttttattgtcatattgttattttctctcatctttttcaagtcttttccatccacagttggttgaatttgtggatgtggaacccatggatacagagggccaactgtatttaggataatttcatcacttttaattcaaaccagaatatgtgaataagcagacagaaagaatctttttgatgtcgatgttcaactatttttggcaccatagtagaacatggttgctttctattttttcttgggtatggaggtttcttgaagacctagaacatagaagaatgcctagttaaaaaaaaaaatcaatgaaactacgagttttaggccaaatctgagaaaagaccaaagatgactatgtttgggactgaagtaaacatatcaagttagaactctcatcacatgtttgactcaaattgtggagcaaaatagtaaataaaatataaaaatgaaaatgaagatacgtgaaattcaaatgtcacaacttgcctattatttattttagtgcatttttttgtgcttttcccagtttggtgttaggtggccttaagttctcagtaatgacacttatcaaataggaacttagtgttactcacctttatccattcccccaacactcaacaaattgcctttgctatatccctatgagatgagcagatcaaatattccccgtgagttaatgaaaactgattcaaccaaatggcgaagtcagagactatcgggggccatggagacactctgggccatttttatgaggtagtctaggctcatcttcatgagggaactgaggtcttggggggtgggggttacccaaataggttcacagaagaaccagaaataaaacctgcctttctagactgtaagtcttgtgattgtcatctaaatggttgtctctatacagcaactcatctctagaactgaaaataagtttaaatccctcctccatccccaataattcaagctgcatttcagagaaaaccaggactttggaatcagacagatcaactttgaattcttgatctgcttcttcatagctatttatgcttaggcaagttttgttttgttttgttttacgttgccactcagtcttctcatctgtaaaacagggataataacaccttcctcaaatggttttttttattaggactaaaagagagaatgtgtggaaagatgttagtggaattcctggcacatagttcacatggacaaaatggtgttaactacgaaaatttttacagagaaaagggcaactgacaaaagcaggtgtttggaatgaattaagaccatggcaggcttttgaggcctttatatttctcctgactgtgcaataaaaatattttggctctctgtctaagacttggctgtcacagtagcaatggtaatattagctactgtgccagaagcagcctatcaatagagaaattgaatctcagatgggaatcgagagcatctccttctgccttgctaatagcaagctgatttttagaatatagtctaagtgcttctcttccatcctccccagattctcacctgctacacacccctcagagggactggaggaatccagacaacgatgcgcaggggccctggtgctatactactgatccagaacagagatatgactactgcgacattcctgagtgtgaagggcaggagtggctctagaaaatgttttcatttctgcccttcacctgtaaaataatttgttgtaaagccccttcccacagggatattattaataattgcgtaacgtgttcacctctcggaaaggagcaaaactttgctcagatcccagaattaacctgatttttttttttttttctgagacagaattttgctctcattgcccaggctagagtgcaatggtgcgatctcagctcaccacaacctccgcctctgggttcaagcgattctcctacctcagcctcccaagtagctggaattacatgcatgtgccaccatgcctggctaattttacatttttagtagagacagggtttctcccatgttggtcaggctggtcttgaactctcgacctcaggtgagccgcccgcctcagcctcccaaagtgctgggattacaggcatgagccaccatgcccagcagacctgaattattattattaaaatgttacatcaacatgtacaaatataaaactacatctaaactctaagtacagacttcttatgcttaaaactcttacacagtgttaaccccaagacagatttgcaattaagtagttaaaataagacaacaaagtcaataaaaatcaaataaacaatatacatttaatgtggtagactttgctgttttgctgaagctaagcaaggaaccagtttttaaatcagcaatccgttattttaatggactgagcaatttaatagtgcacctcaaaggtcaatgataaaaact

SEQ ID NO: 276286 - DNA, 3354 bp, Homo sapiens
gcgaagtgaagggtggcccaggtggggccaggctgactgaatgtatctcctagctatggactaaataatacatggggggaaataaacaagtattcatgagggtgaaaatgtgacccagcaggaaaattacaactattttcaattgacgttgaataggatgagtcatggaatttaagtgatttactgaagattatactactggtagatagaagagctaaagaaagatggatactatgatgctgaatgtgcggaatctgtttgagcagcttgtgcgccgggtggagattctcagtgaaggaaatgaagtccaatttatccagttggcgaaggactttgaggatttccgtaaaaagtggcagaggactgaccatgagctggggaaatacaaggatcttttgatgaaagcagagactgagcgaagtgctctggatgttaagctgaagcatgcacgtaatcaggtggatgtagagatcaaacggagacagagagctgaggctgactgcgaaaagctggaacgacagattcagctgattcgagagatgctcatgtgtgacacatctggcagcattcaactaagcgaggagcaaaaatcagctctggcttttctcaacagaggccaaccatccagcagcaatgctgggaacaaaagactatcaaccattgatgaatctggttccattttatcagatatcagctttgacaagactgatgaatcactggattgggactcttctttggtgaagactttcaaactgaagaagagagaaaagaggcgctctactagccgacagtttgttgatggtccccctggacctgtaaagaaaactcgttccattggctctgcagtagaccaggggaatgaatccatagttgcaaaaactacagtgactgttcccaatgatggcgggcccatcgaagctgtgtccactattgagactgtgccatattggaccaggagccgaaggaaaacaggtactttacaaccttggaacagtgactccaccctgaacagcaggcagctggagccaagaactgagacagacagtgtgggcacgccacagagtaatggagggatgcgcctgcatgactttgtttctaagacggttattaaacctgaatcctgtgttccatgtggaaagcggataaaatttggcaaattatctctgaagtgtcgagactgtcgtgtggtctctcatccagaatgtcgggaccgctgtccccttccctgcattcctaccctgataggaacacctgtcaagattggagagggaatgctggcagactttgtgtcccagacttctccaatgatcccctccattgttgtgcattgtgtaaatgagattgagcaaagaggtctgactgagacaggcctgtataggatctctggctgtgaccgcacagtaaaagagctgaaagagaaattcctcagagtgaaaactgtacccctcctcagcaaagtggatgatatccatgctatctgtagccttctaaaagactttcttcgaaacctcaaagaacctcttctgacctttcgccttaacagagcctttatggaagcagcagaaatcacagatgaagacaacagcatagctgccatgtaccaagctgttggtgaactgccccaggccaacagggacacattagctttcctcatgattcacttgcagagagtggctcagagtccacatactaaaatggatgttgccaatctggctaaagtctttggccctacaatagtggcccatgctgtgcccaatccagacccagtgacaatgttacaggacatcaagcgtcaacccaaggtggttgagcgcctgctttccttgcctctggagtattggagtcagttcatgatggtggagcaagagaacattgaccccctacatgtcattgaaaactcaaatgccttttcaacaccacagacaccagatattaaagtgagtttactgggacctgtgaccactcctgaacatcagcttctcaagactccttcatctagttccctgtcacagagagtccgttccaccctcaccaagaacactcctagatttgggagcaaaagcaagtctgccactaacctaggacgacaaggcaacttttttgcttctccaatgctcaagtgaagtcacatctgcctgttacttcccagcattgactgactataagaaaggacacatctgtactctgctctgcagcctcctgtactcattactacttttagcattctccaggcttttactcaagtttaattgtgcatgagggttttattaaaactatatatatctccccttccttctcctcaagtcacataatatcagcactttgtgctggtcattgttgggagcttttagatgagacatctttccaggggtagaagggttagtatggaattggttgtgattctttttggggaagggggttattgttcctttggcttaaagccaaatgctgctcatagaatgatctttctctagtttcatttagaactgatttccgtgagacaatgacagaaaccctacctatctgataagattagcttgtctcagggtgggaagtgggagggcagggcaaagaaaggattagaccagaggatttaggatgcctccttctaagaaccagaagttctcattccccattatgaactgagctataatatggagctttcataaaaatgggatgcattgaggacagaactagtgatgggagtatgcgtagctttgatttggatgattaggtctttaatagtgttgagtggcacaaccttgtaaatgtgaaagtacaactcgtatttatctctgatgtgccgctggctgaactttgggttcatttggggtcaaagccagtttttcttttaaaattgaattcattctgatgcttggcccccatacccccaaccttgtccagtggagcccaacttctaaaggtcaatatatcatcctttggcatcccaactaacaataaagagtaggctataagggaagattgtcaatattttgtggtaagaaaagctacagtcattttttctttgcactttggatgctgaaatttttcccatggaacatagccacatctagatagatgtgagctttttcttctgttaaaattattcttaatgtctgtaaaaacgattttcttctgtagaatgtttgacttcgtattgacccttatctgtaaaacacctatttgggataatatttggaaaaaaagtaaatagctttttcaaaatgaagaacatgaggctggttttcttgtcttgcaaggtaattttcaatgccttttagaaaatcatttctggggctgggcttggtggcttatgcctctaatcccagcactttgggaggccaagataggtgg

SEQ ID NO: 276287 - DNA, 673 bp, Homo sapiens
cggacgcgtgggtcgacccacgcgtccgccagaggatttaggatgcctccttctaagaaccagaagttctcattccccattatgaactgagctataatatggagctttcataaaaatgggatgcattgaggacagaactagtgatgggagtatgcgtagctttgatttggatgattaggtctttaatagtgttgagtggcacaaccttgtaaatgtgaaagtacaactcgtatttatctctgatgtgccgctggctgaactttgggttcatttggggtcaaagccagtttttcttttaaaattgaattcattctgatgcttggcccccatacccccaaccttgtccagtggagcccaacttctaaaggtcaatatatcatcctttggcatcccaactaacaataaagagtaggctataagggaagattgtcaatattttgtggtaagaaaagctacagtcattttttctttgcactttggatgctgaaatttttcccatggaacatagccacatctagatagatgtgagctttttcttctgttaaaattattcttaatgtctgtaaaaacgattttcttctgtagaatgtttgacttcgtattgacccttatctgtaaaacacctatttgggataatatttggaaaaaaagtaaatagctttttcaaaatgaa

SEQ ID NO: 276288 - DNA, 285 bp, Homo sapiens
tactactactaaatttgcggccgcgtcgacagggaagattgtcaatattttgtggtaagaaaagctacagtcattttttctttgcactttggatgctgaaatttttcccatggaacatagccacatctagatagatgtgagctttttcttctgttaaaattattcttaatgtctgtaaaaacgattttcttctgtagaatgtttgacttcgtattgacccttatctgtaaaacacctatttgggataatatttggaaaaaaagtaaatagctttttcaaaatgaa

SEQ ID NO: 276289 - DNA, 3559 bp, Homo sapiens
gcgaagtgaagggtggcccaggtggggccaggctgactgaagtgagtagtgggggtgccagaccaggtgcgtctgccgctggattgtgataggaagcagagtgttcgtgtgaaagatggatactatgatgctgaatgtgcggaatctgtttgagcagcttgtgcgccgggtggagattctcagtgaaggaaatgaagtccaatttatccagttggcgaaggactttgaggatttccgtaaaaagtggcagaggactgaccatgagctggggaaatacaaggatcttttgatgaaagcagagactgagcgaagtgctctggatgttaagctgaagcatgcacgtaatcaggtggatgtagagatcaaacggagacagagagctgaggctgactgcgaaaagctggaacgacagattcagctgattcgagagatgctcatgtgtgacacatctggcagcattcaactaagcgaggagcaaaaatcagctctggcttttctcaacagaggccaaccatccagcagcaatgctgggaacaaaagactatcaaccattgatgaatctggttccattttatcagatatcagctttgacaagactgatgaatcactggattgggactcttctttggtgaagactttcaaactgaagaagagagaaaagaggcgctctactagccgacagtttgttgatggtccccctggacctgtaaagaaaactcgttccattggctctgcagtagaccaggggaatgaatccatagttgcaaaaactacagtgactgttcccaatgatggcgggcccatcgaagctgtgtccactattgagactgtgccatattggaccaggagccgaaggaaaacaggtactttacaaccttggaacagtgactccaccctgaacagcaggcagctggagccaagaactgagacagacagtgtgggcacgccacagagtaatggagggatgcgcctgcatgactttgtttctaagacggttattaaacctgaatcctgtgttccatgtggaaagcggataaaatttggcaaattatctctgaagtgtcgagactgtcgtgtggtctctcatccagaatgtcgggaccgctgtccccttccctgcattcctaccctgataggaacacctgtcaagattggagagggaatgctggcagactttgtgtcccagacttctccaatgatcccctccattgttgtgcattgtgtaaatgagattgagcaaagaggtctgactgagacaggcctgtataggatctctggctgtgaccgcacagtaaaagagctgaaagagaaattcctcagagtgaaaactgtacccctcctcagcaaagtggatgatatccatgctatctgtagccttctaaaagactttcttcgaaacctcaaagaacctcttctgacctttcgccttaacagagcctttatggaagcagcagaaatcacagatgaagacaacagcatagctgccatgtaccaagctgttggtgaactgccccaggccaacagggacacattagctttcctcatgattcacttgcagagagtggctcagagtccacatactaaaatggatgttgccaatctggctaaagtctttggccctacaatagtggcccatgctgtgcccaatccagacccagtgacaatgttacaggacatcaagcgtcaacccaaggtggttgagcgcctgctttccttgcctctggagtattggagtcagttcatgatggtggagcaagagaacattgaccccctacatgtcattgaaaactcaaatgccttttcaacaccacagacaccagatattaaagtgagtttactgggacctgtgaccactcctgaacatcagcttctcaagactccttcatctagttccctgtcacagagagtccgttccaccctcaccaagaacactcctagatttgggagcaaaagcaagtctgccactaacctaggacgacaaggcaacttttttgcttctccaatgctcaagtgaagtcacatctgcctgttacttcccagcattgactgactataagaaaggacacatctgtactctgctctgcagcctcctgtactcattactacttttagcattctccaggcttttactcaagtttaattgtgcatgagggttttattaaaactatatatatctccccttccttctcctcaagtcacataatatcagcactttgtgctggtcattgttgggagcttttagatgagacatctttccaggggtagaagggttagtatggaattggttgtgattctttttggggaagggggttattgttcctttggcttaaagccaaatgctgctcatagaatgatctttctctagtttcatttagaactgatttccgtgagacaatgacagaaaccctacctatctgataagattagcttgtctcagggtgggaagtgggagggcagggcaaagaaaggattagaccagaggatttaggatgcctccttctaagaaccagaagttctcattccccattatgaactgagctataatatggagctttcataaaaatgggatgcattgaggacagaactagtgatgggagtatgcgtagctttgatttggatgattaggtctttaatagtgttgagtggcacaaccttgtaaatgtgaaagtacaactcgtatttatctctgatgtgccgctggctgaactttgggttcatttggggtcaaagccagtttttcttttaaaattgaattcattctgatgcttggcccccatacccccaaccttgtccagtggagcccaacttctaaaggtcaatatatcatcctttggcatcccaactaacaataaagagtaggctataagggaagattgtcaatattttgtggtaagaaaagctacagtcattttttctttgcactttggatgctgaaatttttcccatggaacatagccacatctagatagatgtgagctttttcttctgttaaaattattcttaatgtctgtaaaaacgattttcttctgtagaatgtttgacttcgtattgacccttatctgtaaaacacctatttgggataatatttggaaaaaaagtaaatagctttttcaaaatgaaaaaaaacaaaaaaaaacagaaaagaaaaaaaaaaaaaaaaagaaaaaaaaaaaaaaatagagaagaaaagaaaaaaagaaaaaaaaagagagggggggggaggaaatataaatagtggggggagaaaagaacgttttttgagagagggaacaatggggagatatataacgaagcaggcgcggagcctacaaacaaaaagcgaaaaagaaaaaaacgcatgcgtcgtctatcgaaagaccaccctggtgggggacaacatgaggcaccacccacataatctcagccggaaacaaacaaagttgagcgatacccacgtattcgggaacctgattattattaaattcggagcacaatcagtaggaataaaagaaagagctatgagcataggagacagtaaaactcggaagcgcagagcaagccacacagaccaacgcataat

SEQ ID NO: 276290 - DNA, 1896 bp, Homo sapiens
cagcttcgagacagagtgatagatggaactccttgtggccaggacacaaatgatatctgtgtccagggcctttgccggcaagctgaaattcctcagagtgaaaactgtacccctcctcagcaaagtggatgatatccatgctatctgtagccttctaaaagactttcttcgaaacctcaaagaacctcttctgacctttcgccttaacagagcctttatggaagcagcagaaatcacagatgaagacaacagcatagctgccatgtaccaagctgttggtgaactgccccaggccaacagggacacattagctttcctcatgattcacttgcagagagtggctcagagtccacatactaaaatggatgttgccaatctggctaaagtctttggccctacaatagtggcccatgctgtgcccaatccagacccagtgacaatgttacaggacatcaagcgtcaacccaaggtggttgagcgcctgctttccttgcctctggagtattggagtcagttcatgatggtggagcaagagaacattgaccccctacatgtcattgaaaactcaaatgccttttcaacaccacagacaccagatattaaagtgagtttactgggacctgtgaccactcctgaacatcagcttctcaagactccttcatctagttccctgtcacagagagtccgttccaccctcaccaagaacactcctagatttgggagcaaaagcaagtctgccactaacctaggacgacaaggcaacttttttgcttctccaatgctcaagtgaagtcacatctgcctgttacttcccagcattgactgactataagaaaggacacatctgtactctgctctgcagcctcctgtactcattactacttttagcattctccaggcttttactcaagtttaattgtgcatgagggttttattaaaactatatatatctccccttccttctcctcaagtcacataatatcagcactttgtgctggtcattgttgggagcttttagatgagacatctttccaggggtagaagggttagtatggaattggttgtgattctttttggggaagggggttattgttcctttggcttaaagccaaatgctgctcatagaatgatctttctctagtttcatttagaactgatttccgtgagacaatgacagaaaccctacctatctgataagattagcttgtctcagggtgggaagtgggagggcagggcaaagaaaggattagaccagaggatttaggatgcctccttctaagaaccagaagttctcattccccattatgaactgagctataatatggagctttcataaaaatgggatgcattgaggacagaactagtgatgggagtatgcgtagctttgatttggatgattaggtctttaatagtgttgagtggcacaaccttgtaaatgtgaaagtacaactcgtatttatctctgatgtgccgctggctgaactttgggttcatttggggtcaaagccagtttttcttttaaaattgaattcattctgatgcttggcccccatacccccaaccttgtccagtggagcccaacttctaaaggtcaatatatcatcctttggcatcccaactaacaataaagagtaggctataagggaagattgtcaatattttgtggtaagaaaagctacagtcattttttctttgcactttggatgctgaaatttttcccatggaacatagccacatctagatagatgtgagctttttcttctgttaaaattattcttaatgtctgtaaaaacgattttcttctgtagaatgtttgacttcgtattgacccttatctgtaaaacacctatttgggataatatttggaaaaaaagtaaatagctttttcaaaatgaa

SEQ ID NO: 276291 - DNA, 1557 bp, Homo sapiens
aatggatgttgccaaagactttagccagattggaacatccattttagtctttggccctacaatagtggcccatgctgtgcccaatccagacccagtgacaatgttacaggacatcaagcgtcaacccaaggtggttgagcgcctgctttccttgcctctggagtattggagtcagttcatgatggtggagcaagagaacattgaccccctacatgtcattgaaaactcaaatgccttttcaacaccacagacaccagatattaaagtgagtttactgggacctgtgaccactcctgaacatcagcttctcaagactccttcatctagttccctgtcacagagagtccgttccaccctcaccaagaacactcctagatttgggagcaaaagcaagtctgccactaacctaggacgacaaggcaacttttttgcttctccaatgctcaagtgaagtcacatctgcctgttacttcccagcattgactgactataagaaaggacacatctgtactctgctctgcagcctcctgtactcattactacttttagcattctccaggcttttactcaagtttaattgtgcatgagggttttattaaaactatatatatctccccttccttctcctcaagtcacataatatcagcactttgtgctggtcattgttgggagcttttagatgagacatctttccaggggtagaagggttagtatggaattggttgtgattctttttggggaagggggttattgttcctttggcttaaagccaaatgctgctcatagaatgatctttctctagtttcatttagaactgatttccgtgagacaatgacagaaaccctacctatctgataagattagcttgtctcagggtgggaagtgggagggcagggcaaagaaaggattagaccagaggatttaggatgcctccttctaagaaccagaagttctcattccccattatgaactgagctataatatggagctttcataaaaatgggatgcattgaggacagaactagtgatgggagtatgcgtagctttgatttggatgattaggtctttaatagtgttgagtggcacaaccttgtaaatgtgaaagtacaactcgtatttatctctgatgtgccgctggctgaactttgggttcatttggggtcaaagccagtttttcttttaaaattgaattcattctgatgcttggcccccatacccccaaccttgtccagtggagcccaacttctaaaggtcaatatatcatcctttggcatcccaactaacaataaagagtaggctataagggaagattgtcaatattttgtggtaagaaaagctacagtcattttttctttgcactttggatgctgaaatttttcccatggaacatagccacatctagatagatgtgagctttttcttctgttaaaattattcttaatgtctgtaaaaacgattttcttctgtagaatgtttgacttcgtattgacccttatctgtaaaacacctatttgggataatatttggaaaaaaagtaaatagctttttcaaaatgaa

SEQ ID NO: 276292 - DNA, 1393 bp, Homo sapiens
ggccgtgatcgtatagtggttagtactctgcgttgattgaccccctacatgtcattgaaaactcaaatgccttttcaacaccacagacaccagatattaaagtgagtttactgggacctgtgaccactcctgaacatcagcttctcaagactccttcatctagttccctgtcacagagagtccgttccaccctcaccaagaacactcctagatttgggagcaaaagcaagtctgccactaacctaggacgacaaggcaacttttttgcttctccaatgctcaagtgaagtcacatctgcctgttacttcccagcattgactgactataagaaaggacacatctgtactctgctctgcagcctcctgtactcattactacttttagcattctccaggcttttactcaagtttaattgtgcatgagggttttattaaaactatatatatctccccttccttctcctcaagtcacataatatcagcactttgtgctggtcattgttgggagcttttagatgagacatctttccaggggtagaagggttagtatggaattggttgtgattctttttggggaagggggttattgttcctttggcttaaagccaaatgctgctcatagaatgatctttctctagtttcatttagaactgatttccgtgagacaatgacagaaaccctacctatctgataagattagcttgtctcagggtgggaagtgggagggcagggcaaagaaaggattagaccagaggatttaggatgcctccttctaagaaccagaagttctcattccccattatgaactgagctataatatggagctttcataaaaatgggatgcattgaggacagaactagtgatgggagtatgcgtagctttgatttggatgattaggtctttaatagtgttgagtggcacaaccttgtaaatgtgaaagtacaactcgtatttatctctgatgtgccgctggctgaactttgggttcatttggggtcaaagccagtttttcttttaaaattgaattcattctgatgcttggcccccatacccccaaccttgtccagtggagcccaacttctaaaggtcaatatatcatcctttggcatcccaactaacaataaagagtaggctataagggaagattgtcaatattttgtggtaagaaaagctacagtcattttttctttgcactttggatgctgaaatttttcccatggaacatagccacatctagatagatgtgagctttttcttctgttaaaattattcttaatgtctgtaaaaacgattttcttctgtagaatgtttgacttcgtattgacccttatctgtaaaacacctatttgggataatatttggaaaaaaagtaaatagctttttcaaaatgaa

SEQ ID NO: 276293 - DNA, 1968 bp, Homo sapiens
gcgaagtgaagggtggcccaggtggggccaggctgactgaagtgagtagtgggggtgccagaccaggtgcgtctgccgctggattgtgataggaagcagagtgttcgtgtgaaagatggatactatgatgctgaatgtgcggaatctgtttgagcagcttgtgcgccgggtggagattctcagtgaaggaaatgaagtccaatttatccagttggcgaaggactttgaggatttccgtaaaaagtggcagaggactgaccatgagctggggaaatacaaggatcttttgatgaaagcagagactgagcgaagtgctctggatgttaagctgaagcatgcacgtaatcaggtggatgtagagatcaaacggagacagagagctgaggctgactgcgaaaagctggaacgacagattcagctgattcgagagatgctcatgtgtgacacatctggcagcattcaactaagcgaggagcaaaaatcagctctggcttttctcaacagaggccaaccatccagcagcaatgctgggaacaaaagactatcaaccattgatgaatctggttccattttatcagatatcagctttgacaagactgatgaatcactggattgggactcttctttggtgaagactttcaaactgaagaagagagaaaagaggcgctctactagccgacagtttgttgatggtccccctggacctgtaaagaaaactcgttccattggctctgcagtagaccaggggaatgaatccatagttgcaaaaactacagtgactgttcccaatgatggcgggcccatcgaagctgtgtccactattgagactgtgccatattggaccaggagccgaaggaaaacaggtactttacaaccttggaacagtgactccaccctgaacagcaggcagctggagccaagaactgagacagacagtgtgggcacgccacagagtaatggagggatgcgcctgcatgactttgtttctaagacggttattaaacctgaatcctgtgttccatgtggaaagcggataaaatttggcaaattatctctgaagtgtcgagactgtcgtgtggtctctcatccagaatgtcgggaccgctgtccccttccctgcattcctaccctgataggaacacctgtcaagattggagagggaatgctggcagactttgtgtcccagacttctccaatgatcccctccattgttgtgcattgtgtaaatgagattgagcaaagaggtctgactgagacaggcctgtataggatctctggctgtgaccgcacagtaaaagagctgaaagagaaattcctcagagtgaaaactgtacccctcctcagcaaagtggatgatatccatgctatctgtagccttctaaaagactttcttcgaaacctcaaagaacctcttctgacctttcgccttaacagagcctttatggaagcagcagaaatcacagatgaagacaacagcatagctgccatgtaccaagctgttggtgaactgccccaggccaacagggacacattagctttcctcatgattcacttgcagagagtggctcagagtccacatactaaaatggatgttgccaatctggctaaagtctttggccctacaatagtggcccatgctgtgcccaatccagacccagtgacaatgttacaggacatcaagcgtcaacccaaggtggttgagcgcctgctttccttgcctctggagtattggagtcagttcatgatggtggagcaagagaacattgaccccctacatgtcattgaaaactcaaatgccttttcaacaccacagacaccagatattaaagcagtccctggaggaggattgtgtgtccattttacagctggagaagccgagatccagaaaggacccccaagttgtgggcagaataaatctacagcagcttttaactattaaaccaacttagattttggtagtctttcaga

SEQ ID NO: 276294 - DNA, 494 bp, Homo sapiens
gttccaccctcaccaagaacactcctaggtatgcagaattggccttcctaggaaataaaaaacaactactttcttagacttcttattatattgaagcttattgaaagaaaaattgcattcgattttagctagcaactagactttaaaagggaacgtggggctataaggattccttctttaaaaaggttctgaaagtctttactatttcccctctctcgttgttggtgactaagaatacttaagcaactattgcaaaatagttgtctagggtttcctacttataatgggttatatcaagtaatattatagttgtttattcaaccattttttatagaatatttttccagttcattctctttttattgtagatttgggagcaaaagcaagtctgccactaacctaggacgacaaggcaacttttttgcttctccaatgctcaagtgaagtcacatctgcctgttacttcccagcattgactgactataagaaaggac

SEQ ID NO: 276295 - DNA, 275 bp, Homo sapiens
gaagtgtggagttagagaatggcctaaatcaggacgtgtcagctattcattgagttcaaaagatacactagtgtgttacagaatgatgacaaaaatgatctctgggactttgctagatgtctaaccttagctcttaagtgcttcagagggtaatcagcttaaaactagccatctaaaaagatgccttcttttttcccacctctcttaaaaatatgtctgaactttgaagttgagtttactgggacctgtgaccactcctgaacatcagcttctca

SEQ ID NO: 276296 - DNA, 3120 bp, Homo sapiens
gcgaagtgaagggtggcccaggtggggccaggctgactgaagtgagtagtgggggtgccagaccaggtgcgtctgccgctggattgtgataggaagcagagtgttcgtgtgaaagatggatactatgatgctgaatgtgcggaatctgtttgagcagcttgtgcgccgggtggagattctcagtgaaggaaatgaagtccaatttatccagttggcgaaggactttgaggatttccgtaaaaagtggcagaggactgaccatgagctggggaaatacaaggatcttttgatgaaagcagagactgagcgaagtgctctggatgttaagctgaagcatgcacgtaatcaggtggatgtagagatcaaacggagacagagagctgaggctgactgcgaaaagctggaacgacagattcagctgattcgagagatgctcatgtgtgacacatctggcagcattcaactaagcgaggagcaaaaatcagctctggcttttctcaacagaggccaaccatccagcagcaatgctgggaacaaaagactatcaaccattgatgaatctggttccattttatcagatatcagctttgacaagactgatgaatcactggattgggactcttctttggtgaagactttcaaactgaagaagagagaaaagaggcgctctactagccgacagtttgttgatggtccccctggacctgtaaagaaaactcgttccattggctctgcagtagaccaggggaatgaatccatagttgcaaaaactacagtgactgttcccaatgatggcgggcccatcgaagctgtgtccactattgagactgtgccatattggaccaggagccgaaggaaaacaggtactttacaaccttggaacagtgactccaccctgaacagcaggcagctggagccaagaactgagacagacagtgtgggcacgccacagagtaatggagggatgcgcctgcatgactttgtttctaagacggttattaaacctgaatcctgtgttccatgtggaaagcggataaaatttggcaaattatctctgaagtgtcgagactgtcgtgtggtctctcatccagaatgtcgggaccgctgtccccttccctgcattcctaccctgataggaacacctgtcaagattggagagggaatgctggcagactttgtgtcccagacttctccaatgatcccctccattgttgtgcattgtgtaaatgagattgagcaaagaggtctgactgagacaggcctgtataggatctctggctgtgaccgcacagtaaaagagctgaaagagaaattcctcagagtgaaaactgtacccctcctcagcaaagtggatgatatccatgctatctgtagccttctaaaagactttcttcgaaacctcaaagaacctcttctgacctttcgccttaacagagcctttatggaagcagcagaaatcacagatgaagacaacagcatagctgccatgtaccaagctgttggtgaactgccccaggccaacagggacacattagctttcctcatgattcacttgcagagagtggctcagagtccacatactaaaatggatgttgccaatctggctaaagtctttggccctacaatagtggcccatgctgtgcccaatccagacccagtgacaatgttacaggacatcaagcgtcaacccaaggtggttgagcgcctgctttccttgcctctggagtattggagtcagttcatgatggtggagcaagagaacattgaccccctacatgtcattgaaaactcaaatgccttttcaacaccacagacaccagatattaaagtgagtttactgggacctgtgaccactcctgaacatcagcttctcaagactccttcatctagttccctgtcacagagagtccgttccaccctcaccaagaacactcctagatttgggagcaaaagcaagtctgccactaacctaggacgacaaggcaacttttttgcttctccaatgctcaagtgaagtcacatctgcctgttacttcccagcattgactgactataagaaaggacacatctgtactctgctctgcagcctcctgtactcattactacttttagcattctccaggcttttactcaagtttaattgtgcatgagggttttattaaaactatatatatctccccttccttctcctcaagtcacataatatcagcactttgtgctggtcattgttgggagcttttagatgagacatctttccaggggtagaagggttagtatggaattggttgtgattctttttggggaagggggttattgttcctttggcttaaagccaaatgctgctcatagaatgatctttctctagtttcatttagaactgatttccgtgagacaatgacagaaaccctacctatctgataagattagcttgtctcagggtgggaagtgggagggcagggcaaagaaaggattagaccagaggatttaggatgcctccttctaagaaccagaagttctcattccccattatgaactgagctataatatggagctttcataaaaatgggatgcattgaggacagaactagtgatgggagtatgcgtagctttgatttggatgattaggtctttaatagtgttgagtggcacaaccttgtaaatgtgaaagtacaactcgtatttatctctgatgtgccgctggctgaactttgggttcatttggggtcaaagccagtttttcttttaaaattgaattcattctgatgcttggcccccatacccccaaccttgtccagtggagcccaacttctaaaggtcaatatatcatcctttggcatcccaactaacaataaagagtaggctataagggaagattgtcaatattttgtggtaagaaaagctacagtcattttttctttgcactttggatgctgaaatttttcccatggaacatagccacatctagatagatgtgagctttttcttctgttaaaattattcttaatgtctgtaaaaacgattttcttctgtagaatgtttgacttcgtattgacccttatctgtaaaacacctatttgggataatatttggaaaaaaagtaaatagctttttcaaaatgaa

SEQ ID NO: 276297 - DNA, 3245 bp, Homo sapiens
gcgaagtgaagggtggcccaggtggggccaggctgactgaagtgagtagtgggggtgccagaccaggtgcgtctgccgctggattgtgataggaagcagagtgttcgtgtgaaagatggatactatgatgctgaatgtgcggaatctgtttgagcagcttgtgcgccgggtggagattctcagtgaaggaaatgaagtccaatttatccagttggcgaaggactttgaggatttccgtaaaaagtggcagaggactgaccatgagctggggaaatacaaggatcttttgatgaaagcagagactgagcgaagtgctctggatgttaagctgaagcatgcacgtaatcaggtggatgtagagatcaaacggagacagagagctgaggctgactgcgaaaagctggaacgacagattcagctgattcgagagatgctcatgtgtgacacatctggcagcattcaactaagcgaggagcaaaaatcagctctggcttttctcaacagaggccaaccatccagcagcaatgctgggaacaaaagactatcaaccattgatgaatctggttccattttatcagatatcagctttgacaagactgatgaatcactggattgggactcttctttggtgaagactttcaaactgaagaagagagaaaagaggcgctctactagccgacagtttgttgatggtccccctggacctgtaaagaaaactcgttccattggctctgcagtagaccaggggaatgaatccatagttgcaaaaactacagtgactgttcccaatgatggcgggcccatcgaagctgtgtccactattgagactgtgccatattggaccaggagccgaaggaaaacaggtactttacaaccttggaacagtgactccaccctgaacagcaggcagctggagccaagaactgagacagacagtgtgggcacgccacagagtaatggagggatgcgcctgcatgactttgtttctaagacggttattaaacctgaatcctgtgttccatgtggaaagcggataaaatttggcaaattatctctgaagtgtcgagactgtcgtgtggtctctcatccagaatgtcgggaccgctgtccccttccctgcattcctaccctgataggaacacctgtcaagattggagagggaatgctggcagactttgtgtcccagacttctccaatgatcccctccattgttgtgcattgtgtaaatgagattgagcaaagaggtctgactgagacaggcctgtataggatctctggctgtgaccgcacagtaaaagagctgaaagagaaattcctcagagtgaaaactgtacccctcctcagcaaagtggatgatatccatgctatctgtagccttctaaaagactttcttcgaaacctcaaagaacctcttctgacctttcgccttaacagagcctttatggaagcagcagaaatcacagatgaagacaacagcatagctgccatgtaccaagctgttggtgaactgccccaggccaacagggacacattagctttcctcatgattcacttgcagagagtggctcagagtccacatactaaaatggatgttgccaatctggctaaagtctttggccctacaatagtggcccatgctgtgcccaatccagacccagtgacaatgttacaggacatcaagcgtcaacccaaggtggttgagcgcctgctttccttgcctctggagtattggagtcagttcatgatggtggagcaagagaacattgaccccctacatgtcattgaaaactcaaatgccttttcaacaccacagacaccagatattaaagtgagtttactgggacctgtgaccactcctgaacatcagcttctcaagactccttcatctagttccctgtcacagagagtccgttccaccctcaccaagaacactcctagatttgggagcaaaagcaagtctgccactaacctaggacgacaaggcaacttttttgcttctccaatgctcaagtgaagtcacatctgcctgttacttcccagcattgactgactataagaaaggacacatctgtactctgctctgcagcctcctgtactcattactacttttagcattctccaggcttttactcaagtttaattgtgcatgagggttttattaaaactatatatatctccccttccttctcctcaagtcacataatatcagcactttgtgctggtcattgttgggagcttttagatgagacatctttccaggggtagaagggttagtatggaattggttgtgattctttttggggaagggggttattgttcctttggcttaaagccaaatgctgctcatagaatgatctttctctagtttcatttagaactgatttccgtgagacaatgacagaaaccctacctatctgataagattagcttgtctcagggtgggaagtgggagggcagggcaaagaaaggattagaccagaggatttaggatgcctccttctaagaaccagaagttctcattccccattatgaactgagctataatatggagctttcataaaaatgggatgcattgaggacagaactagtgatgggagtatgcgtagctttgatttggatgattaggtctttaatagtgttgagtggcacaaccttgtaaatgtgaaagtacaactcgtatttatctctgatgtgccgctggctgaactttgggttcatttggggtcaaagccagtttttcttttaaaattgaattcattctgatgcttggcccccatacccccaaccttgtccagtggagcccaacttctaaaggtcaatatatcatcctttggcatcccaactaacaataaagagtaggctataagggaagattgtcaatattttgtggtaagaaaagctacagtcattttttctttgcactttggatgctgaaatttttcccatggaacatagccacatctagatagatgtgagctttttcttctgttaaaattattcttaatgtctgtaaaaacgattttcttctgtagaatgtttgacttcgtattgacccttatctgtaaaacacctatttgggataatatttggaaaaaaagtaaatagctttttcaaaatgaagaacatgaggctggttttcttgtcttgcaaggtaattttcaatgccttttagaaaatcatttctggggctgggcttggtggcttatgcctctaatcccagcactttgggaggccaagataggtgg

SEQ ID NO: 276298 - DNA, 1313 bp, Homo sapiens
acgcgtccgcggacgcgtgggctgagtttactgggacctgtgaccactcctgaacatcagcttctcaagactccttcatctagttccctgtcacagagagtccgttccaccctcaccaagaacactcctagatttgggagcaaaagcaagtctgccactaacctaggacgacaaggcaacttttttgcttctccaatgctcaagtgaagtcacatctgcctgttacttcccagcattgactgactataagaaaggacacatctgtactctgctctgcagcctcctgtactcattactacttttagcattctccaggcttttactcaagtttaattgtgcatgagggttttattaaaactatatatatctccccttccttctcctcaagtcacataatatcagcactttgtgctggtcattgttgggagcttttagatgagacatctttccaggggtagaagggttagtatggaattggttgtgattctttttggggaagggggttattgttcctttggcttaaagccaaatgctgctcatagaatgatctttctctagtttcatttagaactgatttccgtgagacaatgacagaaaccctacctatctgataagattagcttgtctcagggtgggaagtgggagggcagggcaaagaaaggattagaccagaggatttaggatgcctccttctaagaaccagaagttctcattccccattatgaactgagctataatatggagctttcataaaaatgggatgcattgaggacagaactagtgatgggagtatgcgtagctttgatttggatgattaggtctttaatagtgttgagtggcacaaccttgtaaatgtgaaagtacaactcgtatttatctctgatgtgccgctggctgaactttgggttcatttggggtcaaagccagtttttcttttaaaattgaattcattctgatgcttggcccccatacccccaaccttgtccagtggagcccaacttctaaaggtcaatatatcatcctttggcatcccaactaacaataaagagtaggctataagggaagattgtcaatattttgtggtaagaaaagctacagtcattttttctttgcactttggatgctgaaatttttcccatggaacatagccacatctagatagatgtgagctttttcttctgttaaaattattcttaatgtctgtaaaaacgattttcttctgtagaatgtttgacttcgtattgacccttatctgtaaaacacctatttgggataatatttggaaaaaaagtaaatagctttttcaaaatgaa

SEQ ID NO: 276299 - DNA, 324 bp, Homo sapiens
tcctttaaaattttgtctgcctttcatcttttagaccaacagtcttactttcatgtttaaaggcagtgaccataacagtcaagttaaacacaacaacttagattgcctaaatttgaatataggccttttttttttttttttttttttgggggggggggtttctttttgccccggggtgggggcgcaattttgggttaaagggaggttttgctttcgggtttaaggcctttttcaaattaatttaaatacttgggggatcttttagggtggccttgggggtttgcaattttggctttggccgttttttaacataaggaaacggct

SEQ ID NO: 276300 - DNA, 229 bp, Homo sapiens
catgattttaagccataccagaaaaaagagagccaacagatttctcaacaatccttaggcaaagaagccctccagtccactactggaaacatatttttgccatattttcctgccctttacttgaaaaattttaactggaaaagacacagtcactttgagtgttgaggtaatgctagaattcagccatgtgccacgatcacaaagtcatacaatattgccaaccttctac

SEQ ID NO: 276301 - DNA, 411 bp, Homo sapiens
taaaacgttagagattaaaaagtttataaagtaaaaaagttacagtaaggtaaggttaatttattgttgaagaaagaaacattttaacagtaaatttagtgtagcctgttgatgaagtcctcaatagcctacaggaatgccccgtggcttaccttttcatgctctttaaccctgtgtttcaaagagcagacgttttacattttgaacatgtccaatttgtcagtttgttcttttatagattgggattttagtgtcttatctaagaaaccattgcctcacctaaggtcacaaatattttctctcatgttttcttctagcagttttatagctttgggttttacatttaggtaaaaggtcccattttgagttagtttttgtatatggttcatgattatagattcaaattcttta

SEQ ID NO: 276302 - DNA, 1685 bp, Homo sapiens
  misc_feature (2)..(2): n is a, c, g, or t
  misc_feature (4)..(4): n is a, c, g, or t
  misc_feature (6)..(8): n is a, c, g, or t
gncncnnngctgggactaagtgcctggagagcctcctgggctcagtgcccccgccctgccctggcctccacagccttcgggagctcccagacccagtgctgagtgaggaggtggtggagggcattgctgctggcattgaggcagccctctgggacctgacacaaggcaccaatggccggtacaagaccaagtatcgcagcctgctgttcaacctgcgggaccccaggaacctggacttgtttctcaaagtggttcatggagatgtcaccccctacgacctggtgcggatgagctcgatgcagctggccccccaggagctggcccgctggcgggaccaggaggagaaaaggggcctgaatatcattgagcagcaacagaaggagccgtgcagacttccagcctccaaaatgacccacaagggcgaagtggagattcagcgggacatggaccagacactgaccctggaggatctgggaccgcagatgttcatggactgcagcccacaggccctgcccatcgcatcagaggacaccacggggcagcatgaccaccacttcttagaccccaactgccacatctgcaaggactgggagccctcgaatgagctgctaggctccttcgaagccgccaagagctgcggggacaatatcttccagaaagccctaagccaaactcctatgccaccctgggaaggtgttctggacatgttctccatcaagcggttccgggccagggcccagctggtctcgggacacagctgtcggcttgtccaggctctgcccaccgtgatccgctcggcaggctgcatcccctccaacattgtctgggaccttctggccagcatctgcccagccaaggccaaggtctggaggtcactcactcaagtctgttgctggctgtgctgctccccaaggaagggcttccagacacagcagggtccagcccctggttggggaaaggttcaaaagatggtctccttcaacagtaaggtggagaagagatactatcagccagatgacaggaggccgaatgtgcccctgaagggcacccctcccccaggaggtgcctggcagcagagccagggcaggggcagtatagctccaaggggaatctctgcttggcagaggccccccagaggcagggggaggctctggccagagcctgaaaactggcagcatcctgggcgagggcagtggcccccagagccaggcttgcgccagtcccagcatccctattcagtagcaccagctggtcatggctttggccgtggccagcacttccacagggactcctgtccccaccaagccctgctccggcacctcgaatccctggcgaccatgagtcaccagctccaagccttactgtgcccccagaccaagagctccatcccccgccctctgcagcgtttgtctagcgcccttgcagctccagagccccctggcccagcccgtgactcctctttggggcctacagatgaagctggctctgagtgtcccttccctagaaaggcctgaccctccttacccaccagaacaggggttttgatgccctcactagtgttgaagcctgttccagagagaggtgggactgcaaggagaggatggtcagccctacccacctgccctgtttgagcttcctgtttgacaatgtttgctgttgattttttgttcaataaagaatttggt

SEQ ID NO: 276303 - DNA, 744 bp, Homo sapiens
atcagccagatgacaggaggccgaatgtatctcttctccaccttactggtggagaagagatactatcagccagatgacaggaggccgaatgtgcccctgaagggcacccctcccccaggaggtgcctggcagcagagccagggcaggggcagtatagctccaaggggaatctctgcttggcagaggccccccagaggcagggggaggctctggccagagcctgaaaactggcagcatcctgggcgagggcagtggcccccagagccaggcttgcgccagtcccagcatccctattcagtagcaccagctggtcatggctttggccgtggccagcacttccacagggactcctgtccccaccaagccctgctccggcacctcgaatccctggcgaccatgagtcaccagctccaagccttactgtgcccccagaccaagagctccatcccccgccctctgcagcgtttgtctagcgcccttgcagctccagagccccctggcccagcccgtgactcctctttggggcctacagatgaagctggctctgagtgtcccttccctagaaaggcctgaccctccttacccaccagaacaggggttttgatgccctcactagtgttgaagcctgttccagagagaggtgggactgcaaggagaggatggtcagccctacccacctgccctgtttgagcttcctgtttgacaatgtttgctgttgattttttgttcaataaagaatttggt

SEQ ID NO: 276304 - DNA, 973 bp, Homo sapiens
  misc_feature (2)..(2): n is a, c, g, or t
  misc_feature (4)..(4): n is a, c, g, or t
  misc_feature (6)..(8): n is a, c, g, or t
gncncnnngctgggactaagtgcctggagagcctcctgggctcagtgcccccgccctgccctggcctccacagccttcgggagctcccagacccagtgctgagtgaggaggtggtggagggcattgctgctggcattgaggcagccctctgggacctgacacaaggcaccaatggccggtacaagaccaagtatcgcagcctgctgttcaacctgcgggaccccaggaacctggacttgtttctcaaagtggttcatggagatgtcaccccctacgacctggtgcggatgagctcgatgcagctggccccccaggagctggcccgctggcgggaccaggaggagaaaaggggcctgaatatcattgagcagcaacagaaggagccgtgcagacttccagcctccaaaatgacccacaagggcgaagtggagattcagcgggacatggaccagacactgaccctggaggatctggtggttaagttggagcctgacctggtgctgggcagagcccatgcctgggggtcccacgcctcgcctcaccagcagtgtggtcttgggcatgtcacctgactgctctgaggcccaccttgtttgtgataaaacggggacagcgatccttaacgcataggggaacatggggtgggacagtgctgctggcacaggcctgccagcgccttgtcactgtcggtcctcctccttttggcctcaccccaaggcccccacatgagtggtattaagtcccatcatcatagtcatccccaacctggcattctgcccagatctctgctgggaagcagcaggctgcgctgttccaggcagtgactttttcagatggaaggaacgaagacccactgtattcagtggattggtttagggatgctccaggcagggaaccacccggcaccctggcagtccatccagagggcctcctggaacttgtcctcagacctgggaagccaacgggagtgaca

SEQ ID NO: 276305 - DNA, 904 bp, Homo sapiens
gtggagcacatggggatggtcctgctgcccctgcctgccttccagcccctgcccaccaggctgcgccctttggggggcccaggtctggaggtcactcactcaagtctgttgctggctgtgctgctccccaaggaagggcttccagacacagcagggtccagcccctggttggggaaaggttcaaaagatggtctccttcaacagtaaggtggagaagagatactatcagccagatgacaggaggccgaatgtgcccctgaagggcacccctcccccaggaggtgcctggcagcagagccagggcaggggcagtatagctccaaggggaatctctgcttggcagaggccccccagaggcagggggaggctctggccagagcctgaaaactggcagcatcctgggcgagggcagtggcccccagagccaggcttgcgccagtcccagcatccctattcagtagcaccagctggtcatggctttggccgtggccagcacttccacagggactcctgtccccaccaagccctgctccggcacctcgaatccctggcgaccatgagtcaccagctccaagccttactgtgcccccagaccaagagctccatcccccgccctctgcagcgtttgtctagcgcccttgcagctccagagccccctggcccagcccgtgactcctctttggggcctacagatgaagctggctctgagtgtcccttccctagaaaggcctgaccctccttacccaccagaacaggggttttgatgccctcactagtgttgaagcctgttccagagagaggtgggactgcaaggagaggatggtcagccctacccacctgccctgtttgagcttcctgtttgacaatgtttgctgttgattttttgttcaataaagaatttggt

SEQ ID NO: 276306 - DNA, 1994 bp, Homo sapiens
  misc_feature (2)..(2): n is a, c, g, or t
  misc_feature (4)..(4): n is a, c, g, or t
  misc_feature (6)..(8): n is a, c, g, or t
gncncnnngctgggactaagtgcctggagagcctcctgggctcagtgcccccgccctgccctggcctccacagccttcgggagctcccagacccagtgctgagtgaggaggtggtggagggcattgctgctggcattgaggcagccctctgggacctgacacaaggcaccaatggccggtacaagaccaagtatcgcagcctgctgttcaacctgcgggaccccaggaacctggacttgtttctcaaagtggttcatggagatgtcaccccctacgacctggtgcggatgagctcgatgcagctggccccccaggagctggcccgctggcgggaccaggaggagaaaaggggaccgcagatgttcatggactgcagcccacaggccctgcccatcgcatcagaggacaccacggggcagcatgaccaccacttcttagaccccaactgccacatctgcaaggactgggagccctcgaatgagctgctaggctccttcgaagccgccaagagctgcggggacaatatcttccagaaagccctaagccaaactcctatgcctgctccagagatgcccaaaaccagggagttgtctcccacggaaccacaggacaggtgtggggttgggagcagggaggtggataacccagcagggttgagggggaggccaccacctggtgcaacagacatagcactggcttttcctgtgtggccttgggcaagtcttccctcccttgggaacctcactttccccatctgtgcaatggaactaatcatcccagcctcctggcagccccctgcacaaggccaagcttgggccagtgttccagtccccacagtagggacacaggatctgctctgaaaagaaaggaggtgccggggaagtcctcatggcctgctctgtctggccctgtcttctgtccctccctctagggtccctccatctgggctccatgtgcctgctgcacccacaaaggccctgccctgcctgccaccctgggaaggtgttctggacatgttctccatcaagcggttccgggccagggcccagctggtctcgggacacagctgtcggcttgtccaggctctgcccaccgtgatccgctcggcaggctgcatcccctccaacattgtctgggaccttctggccagcatctgcccagccaaggccaaggtctggaggtcactcactcaagtctgttgctggctgtgctgctccccaaggaagggcttccagacacagcagggtccagcccctggttggggaaaggttcaaaagatggtctccttcaacagtaaggtggagaagagatactatcagccagatgacaggaggccgaatgtgcccctgaagggcacccctcccccaggaggtgcctggcagcagagccagggcaggggcagtatagctccaaggggaatctctgcttggcagaggccccccagaggcagggggaggctctggccagagcctgaaaactggcagcatcctgggcgagggcagtggcccccagagccaggcttgcgccagtcccagcatccctattcagtagcaccagctggtcatggctttggccgtggccagcacttccacagggactcctgtccccaccaagccctgctccggcacctcgaatccctggcgaccatgagtcaccagctccaagccttactgtgcccccagaccaagagctccatcccccgccctctgcagcgtttgtctagcgcccttgcagctccagagccccctggcccagcccgtgactcctctttggggcctacagatgaagctggctctgagtgtcccttccctagaaaggcctgaccctccttacccaccagaacaggggttttgatgccctcactagtgttgaagcctgttccagagagaggtgggactgcaaggagaggatggtcagccctacccacctgccctgtttgagcttcctgtttgacaatgtttgctgttgattttttgttcaataaagaatttggt

SEQ ID NO: 276307 - DNA, 1137 bp, Homo sapiens
  misc_feature (2)..(2): n is a, c, g, or t
  misc_feature (4)..(4): n is a, c, g, or t
  misc_feature (6)..(8): n is a, c, g, or t
gncncnnngctgggactaagtgcctggagagcctcctgggctcagtgcccccgccctgccctggcctccacagccttcgggagctcccagacccagtgctgagtgaggaggtggtggagggcattgctgctggcattgaggcagccctctgggacctgacacaaggcaccaatggccggtacaagaccaagtatcgcagcctgctgttcaacctgcgggaccccaggaacctggacttgtttctcaaagtggttcatggagatgtcaccccctacgacctggtgcggatgagctcgatgcagctggccccccaggagctggcccgctggcgggaccaggaggagaaaaggggcctgaatatcattgagcagcaacagaaggagccgtgcagacttccagcctccaaaatgacccacaagggcgaagtggagattcagcgggacatggaccagacactgaccctggaggatctgggaccgcagatgttcatggactgcagcccacaggccctgcccatcgcatcagaggacaccacggggcagcatgaccaccacttcttagaccccaactgccacatctgcaaggactgggagccctcgaatgagctgctaggctccttcgaagccgccaagagctgcggggacaatatcttccagaaagccctaagccaaactcctatgcctgctccagagatgcccaaaaccagggagttgtctcccacggaaccacaggacagggtccctccatctgggctccatgtgcctgctgcacccacaaaggccctgccctgcctgccaccctgggaaggtgttctggacatgttctccatcaagcggttccgggccagggcccagctggtctcgggacacagctgtcggcttgtccagccctggcccagcccgtgactcctctttggggcctacagatgaagctggctctgagtgtcccttccctagaaaggcctgaccctccttacccaccagaacaggggttttgatgccctcactagtgttgaagcctgttccagagagaggtgggactgcaaggagaggatggtcagccctacccacctgccctgtttgagcttcctgtttgacaatgtttgctgttgattttttgttcaataaagaatttggt

SEQ ID NO: 276308 - DNA, 383 bp, Homo sapiens
cctgacaaaaagatgagactaaataactgtgtcaggcattgtgttaacctaggaaataccacaggaatattttggtactctatctaacaggttcatactctaatggaggagataaagttaatagacaatgataattcagtgtgatgatggatgctacaaggacagggtgcctgagaaatatacaggggggattaatatggtttggctgtgttcctacccaaacctcatcttgaattgtagttcccacaattcccatgtgttatgagagagagccggtgggagataattgaaccattgggacagtttcccccatactgttctcatggtagtaagtctcagaagacctgatggttttttatacagggaaaccccttttgtttggt

SEQ ID NO: 276309 - DNA, 490 bp, Homo sapiens
ctgcatattctcttcagtggccatttctactcatccattgttttctttcagttatcccctcttcacccccacttaggaatcagagttggcttctagctgacatatccttggatactcacaagtgtgtgctagtctatattcctcagtaccacctgatccaggcttctctattaccaaattctgttcctgcatcagaataccttcattctacactgcactgaggccatgaggatttaatctgtttttgttgttgttgttgttgaacttatccagtatgctggagtgattttctgcccagtccttagttcttgagtcttgttcctttcgtagttggtcactccattatatcttgatctcagcatttcccagttggccaggttcaacttcctggttacctcttaagataaggttagaggacttgtacaccacctttactgctggaaaaaaagagtttgtaactagtttcatagtgtaaagctttctccgtatt

SEQ ID NO: 276310 - DNA, 451 bp, Homo sapiens
ctgaaacaagttagagaactttacacggaggatgtagattagtagattctcccacagttcacaacctatgcagagcagggtcctctctcctgccccctgtggaactctccatctggggtgagtaacaaaagcattccttgaatcatgtcaccatcacccagatgtgtccttgtttaagatgctaagatgccccagtttgagacaccaggagacccaagcactgccccagaggttcattacccaaaataaaataacagggcggggcccatggatccctgtttgaatgagtctccgggcgccaaattagagaactaccgaaatattaatggaaggatggatggatgagtaggagcctggaactttctcaagacctgggatgtcaaatcccaaggagacctcacgtgtccagctgtggtgtggactgggggccgctccagccagctcactgccg

SEQ ID NO: 276311 - DNA, 431 bp, Homo sapiens
gtggtgccaaacccacatactctcctatcctcaatacctccctctactacccattattctgttctggatctcaaacatgctttctttactattcctttgcacccttcatcccagcctctctttgccttcacttagactgaccctgacacccattaggctcagcaaattacctgggctgtactgccgcaaggcttcacagacagcccccattacttcagtcaagcccaaatttcatcctcatctgttagtcatactcctattcaccgttctcaactactcatacatgccctgctcttgtttacactgccggtttacactgtttctccaagccatcacagctgatatcgcctggtgctatccccaaactgccactctaaactcttgaagtaaataaataatctttgctggcagaactatgctgaatctcctta

SEQ ID NO: 276312 - DNA, 616 bp, Homo sapiens
gagagtaagacagaagataggcacagagagagagagagacagacagagagacacagaaaaagaaagagaggggcagacagacagagaaagagacagatagagaaagagagaggcagacagagagagacagaaacagacagaaagagagagagagaaacagacagggagggagtgagagagagacagacggggagagaaagagagtaagatagaagacagacacagtgagacaggcagagagggagagagagggacaaagacagagacagaaagaaagaaagagacagacagacagacagagaaagagacacagagagaaagacagagatgaacagagagagacagagagaaacagacagagagaaggtcctagcccagtagcgatacagtgccttttctttcattttctctttcttttctttttgtctttcttttatgtatgtatgtatgtatgtatgtatgtatgtatgtatgtatgtatgtatttatctggagaccgggtctcactctgtcacccaggctgtagtgcagtggcacgatcttgggtcactgcaacctccgcctgccaggttcaagcaattcttccgcctcagcctcccgagtagctggggttaca

SEQ ID NO: 276313 - DNA, 380 bp, Homo sapiens
ttatatacattatgatggaatgctttcctagagtgatattctgtggtggaaagagcaaatcaaaggtctttgtgttctctgtgaccgtggaagaaattgccattaagtagtaatataaataggggttttaaaaaacgtgggaaaagtctgaagaagcatttgcagaaactccttacaaagtcagtgacagctaggccaggccaaggtgggcggatcacttaaggccaggagtttgagaccagcctggccaacatggcaaaaccctgtctctactaaaaatacaaaaattagctgagcgtgggtggctgagatgggagaattgcttgaacccaggaggcagaggttgcagtgagctgagatcgcaccactgcactccagtc

SEQ ID NO: 276314 - DNA, 303 bp, Homo sapiens
aaatagcagttcgagatgttaatcatagagttcccatatcacctagcaattttattcttaggtatgtgtccaaaagatgaaaaacacgtacatgaatgcttgttatagcattatcataatatccccaaagtggaaacaacccaaatgtccttgaatggaagaataggtagataaaatggggtatgtccatacagtagaatattattcagcaataaaaaggagtaaagtatttatacatgctacagcatggatgaatctcaaaaacatgctaagtgaagaagccagacatgaaagtccacatat

SEQ ID NO: 276315 - DNA, 441 bp, Homo sapiens
ggctgctccagacttcttggctcctgcaggccacctggacggatatgtgcaggtcacaggggttacaatggctaagcttcagctcacaggcctgacatttttgtctttttatttataaaatatgaagttgtaggaaaagattaaaaaaaagtgtaagttccttctggggattactggggtagggctgatatttctccggactgcttcaagtgtgaccagggactgcgtggacaccttaaagaaaattttataatgagtctaagtgagaacttgtgacggtgaataactcttctctttcctggtacctggacttcagagattaatacaaaaccctgtgggtcaggacttggcaacaccaagaagcattcaaatataatgatttattcaactgtgtattgtcatggaaataataattaaatggcacatctttgttgtctgaaa

SEQ ID NO: 276316 - DNA, 340 bp, Homo sapiens
tcagtaaccatgatcacgaccacatttgagaatcagggctctttgcagctggggcaatacttctggatcgggagcaacttatcatggaggacctggtattagaggacacgttgacaacatagaataatacagataaactcctacttctagaaaccaagaggagcaacaaagccaaaatatattagaggaatttgaagaggaagaactataaagtcaggagggggaaaattgccagaaacaatggctaaccagttgcctcagcatcatatatggagcagcccaccttttcatcagtctgagatgccacttttatcatataataaaggcctcatatatactt

SEQ ID NO: 276317 - DNA, 1214 bp, Homo sapiens
  misc_feature (1130)..(1130): n is a, c, g, or t
  misc_feature (1210)..(1210): n is a, c, g, or t
tcagtaaccatgatcacgaccacatttgagaatcagggctctttgcagctggggcaatacttctggatcgggagcaacttatcatggaggacctggtattagaggacacgttgacaacatagaataatacagataaactcctacttctagaaaccaagaggagcaacaaagccaaaatatattagaggaatttgaagaggaagaactataaagtcaggagggggaaaattgccagaaacagtaagttcctcttcaaagtttccttggtctttcttgctctatacgcagcccttcctgcttaatcaggaaggagcacttgtttctctgtttaatgggtaactagcaaacctcttacttggtaaacaacccttcccgcctagttggtaatggacagcctctcccttcctgcctaattggccttattcaatttcaagcactagtcaattgggtcagcttagactgtgctgtccaactccagcaaatggggaaaggacacagaaacagaaactgtgttagggataaaaacccctgctctacccggcttgatgtgctcttgggatcagtcagacgcaagctgtacccttctgcagaagtaaatgtgccttgctgagaaattctttgtttaagtggtggtttttctttgcagcactgaacacttgtttctaacacctggggggcagaggttgtggtgagccgagatcttgccattgccctccagcctggcgccatggctcacatgggaggctgagacaggcagatcacttgagcacagaagttcgagatcagcctgggcaacattggcaaaaccctgtctctacaaaaaatacaaaaactagctgggcatggtggttcaggcttgtcatcccagctacttgtgaggctgaggtgggaggataacttgagtccagtaggcagaggttacagtgagctgggatcatgccattgcattccagcctgggtgacagccagactctgtccccccccacaaaaaaagacagtcaacagaagattttaagcaaggaagcaactgctttgagatttgggggaaggtaaatctgggagtagatatcaagtgcatagggaaaggctaaagccaaggggaccagataaaagattattaaagatttctngagtgattatacctagtaatggagagggtttagacagatgaacattctcatgtccatcccatgtccatgtcatgtccatntcag

SEQ ID NO: 276318 - DNA, 158 bp, Homo sapiens
tgctcttggtgtttgaaagacccaaaggagaatcctcaaaagaaaatgttttggaagagctccaagaaacctccaaagaaatatagcaaattttgtttttttactgtttatttaacaacttggatttcacatttctttcttttttccctttttttttt

SEQ ID NO: 276319 - DNA, 893 bp, Homo sapiens
caccgcgtcgtcgtcggccgagacattgcgcacggtcaggcggcgctcggtgccctcctcctcgatgccgtacttggcgctcgcccacaaccgcgtctcctccttgaaccacgcggcctcagtggacggctggggcacctcacataggaacgtggccgactccttctcccgcacctccagatcttgcagccgctttttgaagggaaccgcgggctctgccaggagagaagactgctattttgaagcatacatgggaagctggttcctggacccccgcatataccaaaatctgtgcatactcaagttctacggtcagccctgtggaacccaagcataggacaagccggccctccctatacacacaggtttgacatcctgagaacactgctggttcccttcccatttggttccagaaaatctgcgtataagtggactcagtggtgcaaacctatgttgttcaagggtcaactatatatgatgaattattgttacctacagtcactctaccatgctactaaacactagaactgattcattttctctgactgtgtgtctctacccattaaccagcccctcttcatctcccttcccgcttccctccccagcctctggtaaccatcattcagttctctacctccgtgaaatcaacatgagtaagaactggtgaaacccaaacatagtctcgaatttagcttttttttttttttttaactgtaagaggctaaacattcttgaggaggacacaaaaaagtctgaagacaactgtccagatgagaatcttgcacttgcacaagtagagaggagagttagtttttataccatcgcatccccaatcccagctttattgatgcataacaaataaaaattgtacatatttaaagtgtacaatgtga

SEQ ID NO: 276320 - DNA, 569 bp, Homo sapiens
agctatacttgagtgctttgcccacacatggtgtaagtcataaaaagagcccagcaatatcttgtggtgtattctaaagggatgtctttgtgatcgctgttccctaagtcgccaggtgaccccattaagaaaatccacgtgagaaatttctttcaaactgactgccagtcaaagaaagacttgctatccccagggaatcaattaatatgacattttcacatgagaactgtacattttgtttctaagaccatgtgtgttcatttccactttgaccaacaggaaactcaaaggcaagctttcatgtctgctttaagaacaattgagagaggaccttggttctgcacatgcattccaatttgttgcaatctttaggtctgtccagacatttatctatttatggttctctatgtattttaaattttctcataagctatttctaatcctttcaggaatgaggcaaggtgtaaatcgataactctttcatgctgatagaatccacttaataccctagccggttaataataaaccactgaggtggcctgtgctcatctcagagtaactgtttcaga

SEQ ID NO: 276321 - DNA, 442 bp, Homo sapiens
cagtccccgccctccatctcacctcacccgtctcccaaccacccttttccatgttaccctcccttcctcacattgttacgggaatcttctgggatgaaaatgagtgtggttggcccttttgcgttgtttcagtcctctcggtacctccccgcccagccctgcgatcttaactcaccgggcccggctccccggccgcttgcataattagggagggcgagggcggggcgggaggcctgtggagaccaggcggaggctgcaatttttggtgccggccggcagagcaggttctggcggctgaggaaaatccggaccaataagttgattcaaacatcatcagttcctttcagaaatgttactagctcccagccttgccagcatctgcatagagagaatctcacatttattatatttgtgtcatctactaattttatgaactatagta

SEQ ID NO: 276322 - DNA, 694 bp, Homo sapiens
  misc_feature (12)..(12): n is a, c, g, or t
  misc_feature (29)..(29): n is a, c, g, or t
  misc_feature (71)..(71): n is a, c, g, or t
ctttacggctangtacgaggcgggtgtgnctcatctctcgctcctgggctcacatattcctccctcctggnctcctaaagtgttcagattacaggcgtgagccaccatgcctggcccttttcttatatttttaaatacatactactactcagaagctataaagaagtctggtaacaaatacatcaggagcacaagtggaggttgtggtgagccgagattgtgccactgcactccagcctgggcgacagagggagactctgcctcaaaaacaaaaaaacagaagaaatggtggcaggcgtggtggcatgtgcctgtactcccagctactcaggaagctgtggtgggaggatcgcttgagcccaggaggtcaaggctgtggtgagctgtgattgcaccaccacaagccagccagggcaacagagtgaaagcctgtctcaaaaacaaaacaaaacccaaaaaacaaattgacataagggctgcaaaaaacaaaaaaaaaaaaaaaaaaaaaaaaaaaactcccgggggtctctaattattcggggcggcgggaaaaaaaggtgtaatgaaaatgggaacatggtcattaggttgttctcttggacaagtttttttggtcaaggggggaaaatttggcaggttcccaataaggaggacgaataaatcgaaaagccaggtacctgtagagagtaaagaa

SEQ ID NO: 276323 - DNA, 893 bp, Homo sapiens
  misc_feature (12)..(12): n is a, c, g, or t
  misc_feature (29)..(29): n is a, c, g, or t
  misc_feature (71)..(71): n is a, c, g, or t
ctttacggctangtacgaggcgggtgtgnctcatctctcgctcctgggctcacatattcctccctcctggnctcctaaagtgttcagattacaggcgtgagccaccatgcctggcccttttcttatatttttaaatacatactactactcagaagctataaagaagtctggtaacaaatacatcaggagcacaagtggaggttgtggtgagccgagattgtgccactgcactccagcctgggcgacagagggagactctgcctcaaaaacaaaaaaacagaagaaatggtggcaggcgtggtggcatgtgcctgtactcccagctactcaggaagctgtggtgggaggatcgcttgagcccaggaggtcaaggctgtggtgagctgtgattgcaccaccacaagccagccagggcaacagagtgaaagcctgtctcaaaaacaaaacaaaacccaaaaaacaaattgacataagggctgcaaaaaacaaaacaggaaggataaataaatggggacaggagcagcatcgggggaggtgaccagtaagctaaggtctgtggatcatgcccttggccatataactatggacccacttcgccttttatgttcccccctggcccatttgtgacccttgaagagtcatgagaaataagcagaacttctagttaaaagataagacctgcacagtatttattaacaagcaagagtgtgaaaccccatctctactaaaaatacaaaaattacctgggtgtagtggcgcatgcctgtagtcccagctactcaggaggctgaggcaagagaatcgcttgaacctgggaggtggaggttgcagtgagctgagatcatgccactgcactccagactgggcaacagagcaagactctctttccagaa

SEQ ID NO: 276324 - DNA, 445 bp, Homo sapiens
cagcttgggcaacatgacacaacctggtctctacaaaaaatacaaaaattagctgggcatgggggcatgcacctgtagtcccagctattcaggaggctgaggtagaagaatctcttgagcctgggagattgaggctgcagtgagctatgatcagaccactgcactccagcctgggtaacagtgagatcctgtctctaaaaaataaattttaaaaaagtattattaggtcccacttttcaatttttggttttgttgcaattgctcgagggcttcatcataattatttcccagaagtcctttccaaaaacacaatatattgatcagaaataagaatcctctcatgagttgtaaccacttgcaaaatcaaaaccaaattggtaaaatgagtaaccaaattggtttactctttttttttgttttgtttttttgtttttttgaggtttgc

SEQ ID NO: 276325 - DNA, 5140 bp, Homo sapiens
  misc_feature (1757)..(1757): n is a, c, g, or t
  misc_feature (2029)..(2029): n is a, c, g, or t
  misc_feature (2031)..(2031): n is a, c, g, or t
  misc_feature (2034)..(2034): n is a, c, g, or t
  misc_feature (2246)..(2246): n is a, c, g, or t
  misc_feature (2992)..(2992): n is a, c, g, or t
  misc_feature (3597)..(3597): n is a, c, g, or t
  misc_feature (3803)..(3803): n is a, c, g, or t
gtccacaagtcctgggtctgggctctagccagatgggggtggagtggaggacacagggagtccctcatgcttgagtcccctggggccaccttgaggcagcctatcccaatgcatccccgccccactatccgggtggggcgcagaagagaggggagcccttctccgctcagtctccaggagactcagggcctgccagttctcaccagctgggaggtggacaaggtgatatggggagagatggaagaggaccgggaggagaggtggagagcggacagaggggctggctgttgagatgggtggacaggaggaaggacatctgggaggaccaggtctctccgctcctcttggcctcatgtgtctccgtcatgtgtggatgaggacatcagacctccctacctttccaggttttgtggggatcactgagatgaggcacgggaagccatcttgaattccctccccatcagtttgtgttctccctccttttctctcccggtaccttcctccttcccctccccttcgccccccttactttccccaatctctaataggacttcagtcagagctgcattgacaggcagccctaggcagccagataaggaacctcggcaaaaggtttttgagcatgaatgagcttaaagcttggcactagagcccagtgctggctgggttcgggcacgtgctggctaggacaggaagccaggcctggagcaagccctggtcaatggctacctggcctcaggaggtgaaggaccttgtcccaggctgggcagaggtcaggagactcagccccgagctagctggggacaagggctgccactgcacttagcactttcaggctccaaggcccagggcaggtgctgaggtgcctgtcttggagccgccatgcagccccgtccccacagctgtctaacggcagggggcagggaagttacaatcctaatcattcacattttctgacttggaggccctctcctaggtatcagcacatttactcctaactacacacagggaggagggaattattagcatcatccccactgcataaatgaggatcttgaggttaagcaactgcttagggtgcaatacacatggcagtgttcacaatcctttcagtggcctcatcagcagctctcaacaggcacgtttatagggaagaagtcaagagaaggggaagcctgaaagccacaggtgagactgggaaaggccaagagagggtcccagtcactcaaagggagccagaagtccaaggagggtcccccgaccccgacttgtacactggagaagggctgcccctacttcaaggccacagggcagctgcaggccacagtgtccacagcgtccttggtaaagtcgactatattcacatctgcattctgtgagtgcgggtataggtgggagtggaggagggaacttactttctgggtttacgggcacggtgtggtgtcagcccatttggaagcaaagcctagatatggagggggccagacgaacaggacctgggaatgcacaggaccccctgaagcaggccggggatctgagtgatcttgctgtatctaagctgacattggaacatgaacagtctgaaatcccatgagccccgctgccctgcacctgcgaccctcaggctagaccttggactgtctacaacacgagtcaggcccaacccgccctggaaatcatcgtaggaggttccagctcagtgcccagagacagcccccacatcccaccccatcaggtcagctcaggctggagcaggnatatgagcaacacccctcattccacccccatacacatgcataagcccatccgcctgcgccctgccagtctgaccagcacagtcctggggacaggagcgtggtggaggagctgcaggtgggggccagagaagcctccacagagagcaaaagcccagggtcagccagaagacaggacaccagaagaagacaggaagaatcaagaagaccagaggaacagagaagaggccccagagcaaggcaaggaacggccaaggcaccaggacatggatgcngnggngccagggggacgtggctgggccagcatgttggcgtgcaggctttggaaagccatcagcagggcgctgtttgcagagttcctggccacggggctgtatgtgttctttggcgtgggctcagtcatgcgctggcccacagcacttccctccgtgctacagattgccatcaccttcaacctggtcaccgccatggctgtgcaggtcacctggaagnccagcggggcccacgccaaccccgccgtgacgctggccttcctcgtaggctcccacatctctctgccccgtgctgtggcctatgtggctgcccagctggtgggggccacggtgggggctgctctgctttatggggtcatgccgggagacatccgagagacccttgggatcaacgtggctccacccacgtcctctgctctccgactgttcccaagttcttccctccacctcgaggcctgcctcactcgccccttctccatttcgtaaccatctgtgttccaccttcttcccccaaatctcctccttccacacctgctgccagtctcctctcaagcaagcctcctgaaccactggccccaaccaacccactggtggggtgggaggagcaccactcacttctgcagggagcaagggtccagagcagatatggacccctctgcacaggcctcccgaagtcctgaagctgggcggcagtgaggtgtcacccccttccagctgaggagaccaggcccagtggcaggggtttctctgtctgtccgtgggcagagcccgcgtctggtccagagtaactccctctgtccaggtccggaacagtgtctcaactggccaggcggtggcagtggagctgcttctgaccctgcagctggtgctctgtgtcttcgcttccaccgacagccgtcagacatcaggctccccggccaccatgattgggatctctgtggcactgggccacctcattgggatccncttcactggctgctccatgaatccagcccgctccttcggccctgccatcatcattgggaagttcacagtccactggctggaccaattttcaaacttggataaagaaaaagacaaacagaaatagacacacacaccagcagagacagaaacagcaatagccaggactcctggctaaaacgggggaagtgagaggaaagaggcgggggcgggtgaggagactggccccaggccccagccacggctgcagagcctgggctcagccccagggagggcagggagagcaaggggcaaggtccccttaccttgtgggcttgggaaacacgactcgtggttctcaaatttagcaccttacagacagttgagggagacctgggagatcaagtcggcactggggaagcaggcagcggtcccagagccaccctgtggtcctgatagctcctgggtggggtgacgacatccttctcctcaggtcttctgggtggggcccctgatgggagccctcctggcctcactgatctacaacttcgtcctgttccccgacaccaagaccctggcgcagcggctggctatcctcacaggcaccgtagaggtggggacaggggcangggcaggggcggagcccctgaagaaggaatcccagccgggttcgggagccgtggagatggagagtgtgtgaaacagcctacgcctggccgcgcccttgggcttcctgccttgcaggacctgcctggaggttctccctgggggtggcgggagggggaggcttgaccttttgtcctgaccaggtgggctggaggggacaagccctatncctggcattacgtttctaggtagaatctgggagtgaatttgtcccattccctctctgtagggcttccccacctctcggtgggacagagcagaggaaggcaggggatttaggatcgccctcccatcctctcacccactggaccccgtaggagtcctgaccccagatgcccaagtcttgggggagaaaggaatgggagcccagacagccactctgcttagacatgggagctatagggacctcagggagccccagcttcttacccacccaggaaacccttggtccagagaggacaggctttctggaggaatcaggccctgggacagcctctgagctcctgggggtgtttctctgaccttgggtgtggttttggggggtatatttcctccttcagactgggggcttcctgaggacagagactgctctaccaatagatctttgtttgttttgagacagaatcttgatctgttacccaggctggagtgcagtggcatgatctcggctcactgcaacctctacctcctgggttcaagggattctcctgcctcagcctcccaagtagctgggattacaggcgcctgccaccacgcccagctaattttttgtatttttagtagagatggggtttcatcatattggtcagggtggtctcaaactcctgacctgaggcgatctgcccacctcggcctcccaaagtgctgggattacaggcgtgagccaccgtgcccggcctctcccaataggtctttattcctcaatcctccaaatgctctggagaggcccccacccttgagaagaactgacacagagaagaacattttctcaggctcgtagagaggtgggatagaggaagggaggtttgagccagacaggcctttcccagggaagcctcctcccaggtgcttgccccagctcccaccccacagcccactctcaggcaggaacaatcctcagaggggaagtgcccatctagccattgactcatgacctgggtcaaagaagccgtctccaggctctctgtcagcattacaggatccccagaaagctgttgaataagccctaagggtggtaggaacccaggagggacccaggaaactaagatttgagattcagtgcctctgaaagactaccaaaatctaagttggtttaatagttaaaagctgctgtagatttattctgcccacaacttgggggtcctttctggatctcggcttctccagctgtaaaatggacacacaatcctcctccagggactgctgtgaaatcaagaaatcggaaaatactttcagaagttaaaatgctagaaaaacaaccccaataaatgatgattattgttgctg

SEQ ID NO: 276326 - DNA, 4341 bp, Homo sapiens
  misc_feature (1757)..(1757): n is a, c, g, or t
  misc_feature (2029)..(2029): n is a, c, g, or t
  misc_feature (2031)..(2031): n is a, c, g, or t
  misc_feature (2034)..(2034): n is a, c, g, or t
  misc_feature (2246)..(2246): n is a, c, g, or t
  misc_feature (2586)..(2586): n is a, c, g, or t
  misc_feature (2798)..(2798): n is a, c, g, or t
  misc_feature (3004)..(3004): n is a, c, g, or t
gtccacaagtcctgggtctgggctctagccagatgggggtggagtggaggacacagggagtccctcatgcttgagtcccctggggccaccttgaggcagcctatcccaatgcatccccgccccactatccgggtggggcgcagaagagaggggagcccttctccgctcagtctccaggagactcagggcctgccagttctcaccagctgggaggtggacaaggtgatatggggagagatggaagaggaccgggaggagaggtggagagcggacagaggggctggctgttgagatgggtggacaggaggaaggacatctgggaggaccaggtctctccgctcctcttggcctcatgtgtctccgtcatgtgtggatgaggacatcagacctccctacctttccaggttttgtggggatcactgagatgaggcacgggaagccatcttgaattccctccccatcagtttgtgttctccctccttttctctcccggtaccttcctccttcccctccccttcgccccccttactttccccaatctctaataggacttcagtcagagctgcattgacaggcagccctaggcagccagataaggaacctcggcaaaaggtttttgagcatgaatgagcttaaagcttggcactagagcccagtgctggctgggttcgggcacgtgctggctaggacaggaagccaggcctggagcaagccctggtcaatggctacctggcctcaggaggtgaaggaccttgtcccaggctgggcagaggtcaggagactcagccccgagctagctggggacaagggctgccactgcacttagcactttcaggctccaaggcccagggcaggtgctgaggtgcctgtcttggagccgccatgcagccccgtccccacagctgtctaacggcagggggcagggaagttacaatcctaatcattcacattttctgacttggaggccctctcctaggtatcagcacatttactcctaactacacacagggaggagggaattattagcatcatccccactgcataaatgaggatcttgaggttaagcaactgcttagggtgcaatacacatggcagtgttcacaatcctttcagtggcctcatcagcagctctcaacaggcacgtttatagggaagaagtcaagagaaggggaagcctgaaagccacaggtgagactgggaaaggccaagagagggtcccagtcactcaaagggagccagaagtccaaggagggtcccccgaccccgacttgtacactggagaagggctgcccctacttcaaggccacagggcagctgcaggccacagtgtccacagcgtccttggtaaagtcgactatattcacatctgcattctgtgagtgcgggtataggtgggagtggaggagggaacttactttctgggtttacgggcacggtgtggtgtcagcccatttggaagcaaagcctagatatggagggggccagacgaacaggacctgggaatgcacaggaccccctgaagcaggccggggatctgagtgatcttgctgtatctaagctgacattggaacatgaacagtctgaaatcccatgagccccgctgccctgcacctgcgaccctcaggctagaccttggactgtctacaacacgagtcaggcccaacccgccctggaaatcatcgtaggaggttccagctcagtgcccagagacagcccccacatcccaccccatcaggtcagctcaggctggagcaggnatatgagcaacacccctcattccacccccatacacatgcataagcccatccgcctgcgccctgccagtctgaccagcacagtcctggggacaggagcgtggtggaggagctgcaggtgggggccagagaagcctccacagagagcaaaagcccagggtcagccagaagacaggacaccagaagaagacaggaagaatcaagaagaccagaggaacagagaagaggccccagagcaaggcaaggaacggccaaggcaccaggacatggatgcngnggngccagggggacgtggctgggccagcatgttggcgtgcaggctttggaaagccatcagcagggcgctgtttgcagagttcctggccacggggctgtatgtgttctttggcgtgggctcagtcatgcgctggcccacagcacttccctccgtgctacagattgccatcaccttcaacctggtcaccgccatggctgtgcaggtcacctggaagnccagcggggcccacgccaaccccgccgtgacgctggccttcctcgtaggctcccacatctctctgccccgtgctgtggcctatgtggctgcccagctggtgggggccacggtgggggctgctctgctttatggggtcatgccgggagacatccgagagacccttgggatcaacgtggtccggaacagtgtctcaactggccaggcggtggcagtggagctgcttctgaccctgcagctggtgctctgtgtcttcgcttccaccgacagccgtcagacatcaggctccccggccaccatgattgggatctctgtggcactgggccacctcattgggatccncttcactggctgctccatgaatccagcccgctccttcggccctgccatcatcattgggaagttcacagtccactgggtcttctgggtggggcccctgatgggagccctcctggcctcactgatctacaacttcgtcctgttccccgacaccaagaccctggcgcagcggctggctatcctcacaggcaccgtagaggtggggacaggggcangggcaggggcggagcccctgaagaaggaatcccagccgggttcgggagccgtggagatggagagtgtgtgaaacagcctacgcctggccgcgcccttgggcttcctgccttgcaggacctgcctggaggttctccctgggggtggcgggagggggaggcttgaccttttgtcctgaccaggtgggctggaggggacaagccctatncctggcattacgtttctaggtagaatctgggagtgaatttgtcccattccctctctgtagggcttccccacctctcggtgggacagagcagaggaaggcaggggatttaggatcgccctcccatcctctcacccactggaccccgtaggagtcctgaccccagatgcccaagtcttgggggagaaaggaatgggagcccagacagccactctgcttagacatgggagctatagggacctcagggagccccagcttcttacccacccaggaaacccttggtccagagaggacaggctttctggaggaatcaggccctgggacagcctctgagctcctgggggtgtttctctgaccttgggtgtggttttggggggtatatttcctccttcagactgggggcttcctgaggacagagactgctctaccaatagatctttgtttgttttgagacagaatcttgatctgttacccaggctggagtgcagtggcatgatctcggctcactgcaacctctacctcctgggttcaagggattctcctgcctcagcctcccaagtagctgggattacaggcgcctgccaccacgcccagctaattttttgtatttttagtagagatggggtttcatcatattggtcagggtggtctcaaactcctgacctgaggcgatctgcccacctcggcctcccaaagtgctgggattacaggcgtgagccaccgtgcccggcctctcccaataggtctttattcctcaatcctccaaatgctctggagaggcccccacccttgagaagaactgacacagagaagaacattttctcaggctcgtagagaggtgggatagaggaagggaggtttgagccagacaggcctttcccagggaagcctcctcccaggtgcttgccccagctcccaccccacagcccactctcaggcaggaacaatcctcagaggggaagtgcccatctagccattgactcatgacctgggtcaaagaagccgtctccaggctctctgtcagcattacaggatccccagaaagctgttgaataagccctaagggtggtaggaacccaggagggacccaggaaactaagatttgagattcagtgcctctgaaagactaccaaaatctaagttggtttaatagttaaaagctgctgtagatttattctgcccacaacttgggggtcctttctggatctcggcttctccagctgtaaaatggacacacaatcctcctccagggactgctgtgaaatcaagaaatcggaaaatactttcagaagttaaaatgctagaaaaacaaccccaataaatgatgattattgttgctg

SEQ ID NO: 276327 - DNA, 3067 bp, Homo sapiens
  misc_feature (1757)..(1757): n is a, c, g, or t
  misc_feature (2029)..(2029): n is a, c, g, or t
  misc_feature (2031)..(2031): n is a, c, g, or t
  misc_feature (2034)..(2034): n is a, c, g, or t
  misc_feature (2246)..(2246): n is a, c, g, or t
gtccacaagtcctgggtctgggctctagccagatgggggtggagtggaggacacagggagtccctcatgcttgagtcccctggggccaccttgaggcagcctatcccaatgcatccccgccccactatccgggtggggcgcagaagagaggggagcccttctccgctcagtctccaggagactcagggcctgccagttctcaccagctgggaggtggacaaggtgatatggggagagatggaagaggaccgggaggagaggtggagagcggacagaggggctggctgttgagatgggtggacaggaggaaggacatctgggaggaccaggtctctccgctcctcttggcctcatgtgtctccgtcatgtgtggatgaggacatcagacctccctacctttccaggttttgtggggatcactgagatgaggcacgggaagccatcttgaattccctccccatcagtttgtgttctccctccttttctctcccggtaccttcctccttcccctccccttcgccccccttactttccccaatctctaataggacttcagtcagagctgcattgacaggcagccctaggcagccagataaggaacctcggcaaaaggtttttgagcatgaatgagcttaaagcttggcactagagcccagtgctggctgggttcgggcacgtgctggctaggacaggaagccaggcctggagcaagccctggtcaatggctacctggcctcaggaggtgaaggaccttgtcccaggctgggcagaggtcaggagactcagccccgagctagctggggacaagggctgccactgcacttagcactttcaggctccaaggcccagggcaggtgctgaggtgcctgtcttggagccgccatgcagccccgtccccacagctgtctaacggcagggggcagggaagttacaatcctaatcattcacattttctgacttggaggccctctcctaggtatcagcacatttactcctaactacacacagggaggagggaattattagcatcatccccactgcataaatgaggatcttgaggttaagcaactgcttagggtgcaatacacatggcagtgttcacaatcctttcagtggcctcatcagcagctctcaacaggcacgtttatagggaagaagtcaagagaaggggaagcctgaaagccacaggtgagactgggaaaggccaagagagggtcccagtcactcaaagggagccagaagtccaaggagggtcccccgaccccgacttgtacactggagaagggctgcccctacttcaaggccacagggcagctgcaggccacagtgtccacagcgtccttggtaaagtcgactatattcacatctgcattctgtgagtgcgggtataggtgggagtggaggagggaacttactttctgggtttacgggcacggtgtggtgtcagcccatttggaagcaaagcctagatatggagggggccagacgaacaggacctgggaatgcacaggaccccctgaagcaggccggggatctgagtgatcttgctgtatctaagctgacattggaacatgaacagtctgaaatcccatgagccccgctgccctgcacctgcgaccctcaggctagaccttggactgtctacaacacgagtcaggcccaacccgccctggaaatcatcgtaggaggttccagctcagtgcccagagacagcccccacatcccaccccatcaggtcagctcaggctggagcaggnatatgagcaacacccctcattccacccccatacacatgcataagcccatccgcctgcgccctgccagtctgaccagcacagtcctggggacaggagcgtggtggaggagctgcaggtgggggccagagaagcctccacagagagcaaaagcccagggtcagccagaagacaggacaccagaagaagacaggaagaatcaagaagaccagaggaacagagaagaggccccagagcaaggcaaggaacggccaaggcaccaggacatggatgcngnggngccagggggacgtggctgggccagcatgttggcgtgcaggctttggaaagccatcagcagggcgctgtttgcagagttcctggccacggggctgtatgtgttctttggcgtgggctcagtcatgcgctggcccacagcacttccctccgtgctacagattgccatcaccttcaacctggtcaccgccatggctgtgcaggtcacctggaagnccagcggggcccacgccaaccccgccgtgacgctggccttcctcgtaggctcccacatctctctgccccgtgctgtggcctatgtggctgcccagctggtgggggccacggtgggggctgctctgctttatggggtcatgccgggagacatccgagagacccttgggatcaacgtggctccacccacgtcctctgctctccgactgttcccaagttcttccctccacctcgaggcctgcctcactcgccccttctccatttcgtaaccatctgtgttccaccttcttcccccaaatctcctccttccacacctgctgccagtctcctctcaagcaagcctcctgaaccactggccccaaccaacccactggtggggtgggaggagcaccactcacttctgcagggagcaagggtccagagcagatatggacccctctgcacaggcctcccgaagtcctgaagctgggcggcagtgaggtgtcacccccttccagctgaggagaccaggcccagtggcaggggtttctctgtctgtccgtgggcagagcccgcgtctggtccagagtaactccctctgtccaggtccggaacagtgtctcaactggccaggcggtggcagtggagctgcttctgaccctgcagctggtgctctgtgtcttcgcttccaccgacagccgtcagacatcaggctccccggccaccatgattgggatctctgtggcactgggccacctcattgggctgtctctccaggaggacacaaagaaaagatcaagacaggatgtgccaaatgtagcaaggaggcatacaataatctgcaa

SEQ ID NO: 276328 - DNA, 444 bp, Homo sapiens
taaattcatactgtgaggaaaagcaaaagataggaggtgaggcaaaagctactctttaactgtgagttttttttccttgcgatggggtttggctgcctagtctagattctcacgctagccccactttcgtctgctctgtggcatatttttaacctgagttgcaggacaggtggtttccagagtgttgcctgatgcatcccaaatgctgccttagcaatacacatctgaacaggggcccatcactaatagcaagcatttcattaatctgagcaaaactcatgggttttcacagggaccctaccagctcagaagcacgttgatataaataagtagaaaaccaaagacagctaaattttaaatcttgagtcaaaactttaaaatcaaagtcaaattgatttcattttggtgagctttcaaatcatgcttttaaaaataaattatgta

SEQ ID NO: 276329 - DNA, 530 bp, Homo sapiens
tggtagaatactgaagtagaaaacagaccactaaacaatgatcttgcagtatcaaacattttctcaaaaaattatgacataggatcaaaaaaacagaatgctaggcacccaagataaaaagcacaaaatgtaagagaatagatcacctgttcaaagaaccaaagctcacaataacgtatgacagaacacctatacattaaaaaaaaaaagaaagaaatgccgataacagaattgaaaaaaacaaaatgaggtcggatgcagtggctcacgcctgtaatcccagtatttagagaggccaaggtgggtggatcacctgaggtcaggagttcgagactgcctggcctatgtggtgagactccatctctactaaaaacacaaaaattagctgggcatggtggcaggcacctataatcccagctatatgggaggctggggcaggagaatcgcttgaacccgggaggcagaggttgcagtgagctgagattgcgccattgcactccagcctgggtgacaagagccaaactccatct

SEQ ID NO: 276330 - DNA, 433 bp, Homo sapiens
gacacctcaggtccaggagctgaagtgagcatcactcagttgacagaaagcatctagaatgtgtcagcgaaaggcactggaattatcattccttcttgagaaggaaagaagaagaaagaagaaggaggaggaggagcaggaggaagaggagcaggaggagcaggacaaggaggaggaagtcttcttcccttgaggaattcttagtctcctgggaaagatagctctttatactgataatatgccacattttcttatgggtcttgatggacatgcacaaagtttaaaaatatcacaaaaaggagagatgattgagagtagctgatagagggtgaaagcagactttacagggtactggatgccgtaatagagctgtgagcactaaactggaatgtgccaaacacaagagagaatcgtggtgcccttcctggtagag

SEQ ID NO: 276331 - DNA, 418 bp, Homo sapiens
agaactgaagcaaatttgctaattttgtagtattctgtaaagcagcaaactgtgatattcagtgaagttctcactgcaaattgggaaccgagaaaggatataacacatcctttgcactcctatagaacctatcaaggctaaagatgttgagcctgactctcttaacagctccagtgtctgaaataaatattctaatgtctaaatgaaattgtgctcattccctcagggtttagtgtaaaacaatatgctcttgaggtgaggacaagaaggccgtcacctgagcatgtgagttttcatgttgatactctgaacattccattctagactacctggaatcaaggaccacatctgagtgtgttatacttgcaaacagtttggcttattatcattgcaattggaaatcttacaagcatatata

SEQ ID NO: 276332 - DNA, 404 bp, Homo sapiens
aaaaatacattggttaaagtaattattacaactttacattttaagtttgacctttatgaatctctttctacctgcaaatcattgagatttgtgtttttccacacagtattctccatttcatcaggagtattagagttgaagcatttcttaaaagagtgattttaggcaagtgggttgcctgacctcaggagtttgagaccagcctgggcaacatggtgaaatcctgtctctactaaaatacaaaaaattagccaggcgtggtgacatgcacctgtagtcccagctactcgggaggctgaggcaggagaattgcttgaagctgggaaggggaagttgcagtgagccaagatggcgccactgcactccagcctgggagacagagtgagactctgtctcaaaaaaaa

SEQ ID NO: 276333 - DNA, 4220 bp, Homo sapiens
aactatcggcttaggtcgaggccgggggtgaactcctggatatgatgattgctgaagaggaaagcctgaaggaaagactcatcaaaagcatatccgtctgtcagaaagagctgaacactctgtgcagcgagttacatgttgagccatttcaggaagaaggagagacgaccatcttgcaactagaaaaagatttgcgcacccaagtggaattgatgcgaaaacagaaaaaggagagaaaacaggaactgaagctacttcaagagcaagatcaagaactgtgcgaaattctttgtatgccccactatgatattgacagtgcctcagtgcccagcttagaagagctgaaccagttcaggcaacatgtgacaactttgagggaaacaaaggcttctaggcgtgaggagtttgtcagtataaagagacagatcatactgtgtatggaagaattagaccacaccccagacacaagctttgaaagagatgtggtgtgtgaagacgaagatgccttttgtttgtctttggagaatattgcaacactacaaaagttgctacggcagctggaaatgcagaaatcacaaaatgaagcagtgtgtgaggggctgcgtactcaaatccgagagctctgggacaggttgcaaatacctgaagaagaaagagaagctgtggccaccattatgtctgggtcaaaggccaaggtccggaaagcgctgcaattagaagtggatcggttggaagaactgaaaatgcaaaacatgaagaaagtgattgaggcaattcgagtggagctggttcagtactgggaccagtgcttttatagccaggagcagagacaagcttttgcccctttctgtgctgaggactacacagaaagtctgctccagctccacgatgctgagattgtgcggttaaaaaactactatgaagttcacaaggaactctttgaaggtgtccagaagtgggaagaaacctggaggcttttcttagagtttgagagaaaagcttcagatccaaatcgatttacaaaccgaggaggaaatcttctaaaagaagaaaaacaacgagccaagctccagaaaatgctgcccaagctggaagaagagttgaaggcacgaattgaattgtgggaacaggaacattcaaaggcatttatggtgaatgggcagaaattcatggagtatgtggcagaacaatgggagatgcatcgattggagaaagagagagccaagcaggaaagacaactgaagaacaaaaaacagacagagacagagatgctgtatggcagcgctcctcgaacacctagcaagcggcgaggactggctcccaatacaccgggcaaagcacgtaagctgaacactaccaccatgtccaatgctacggccaatagtagcattcggcctatctttggagggacagtctaccactcccccgtgtctcgacttcctccttctggcagcaagccagtcgctgcttccacctgttcagggaagaaaacaccccgtactggcaggcatggagccaacaaggagaacctggagctcaacggcagcatcctgagtggtgggtaccctggctcggcccccctccagcgcaacttcagcattaattctgttgccactctattctcagctagctaatgctgatttcctcacctttgcctctttccatacattgagctactgaagcatagatgaagcactggaagcaagtttttccagaatgctcttcacttcctagtatcctactctatatttgctaacacctaactacactgccttttacttaatctgtgatttcttctctcaatattttactagcaagaggagaggatgttcctcacccttgaggggatattgagttaaacccctagcctgcctcccctcttaattgctgcagggatagagaatggaacagttggccaaggctgcagctagttttgatcactgaaactggcttcctactccagcatgtttttcaaattacgtggctggtggtgcttctacctttaaaagtgggtgtgtgtcactctggctgattgctggacagaggtccagctttctctttttcgcttgttcaaccaaggcccattttatctgaggcttaaatgtacctgcctatctgtgtggctagtcctaggtaggttcgtctggtttgggttgctatggctgatagactccaccaggcagcaccaaagccggtaaactaacctctgctaatatctgtctttctcaatagccattcatgctttatcttttgctgctctaccatgtgctccagcatgagatcaaatcaccagcaggttacaaggcctcagcccagggattggtagatatatgttctggcccattgttttataaagggctcaagagaccaaagcttgttgcctacttaccttgacaactctaaagtagctctgtgaagtagagtcatgcctcgcttaatgacagggatatgttctgagaatgtggggcaatttcattgtgcacatatcagagtgtacttaacagtcctagacagaacagcctacacacctaaactatatggtatggcgttttcctcctaggctacaaacctgggcagcatgttacaggaaagaatactgtaggcaattgtgggttttttttgattcaggctattcctgggatactgtaggcaattgtaacgcaatggtaagtatttgtgtatctaaacatagaaaaggtacagtaaaaatatggtataatcttatgggaccaccatagtgtatgtggcctgtcgttaactgaaacatcattatgcagtgcatgactgtatgaaggatttctcttctgtgaggtgtaacagaatggactggctgaggaaaaaggggtcacgggcatgcgtgcacatgcactctgtctgtgactaatagaatggtgctcagagttcctcaccttttactcctaacgcagcctattgcaggctagggatctcagagaaactaccttcaagggaccttttgctgacacttaaccaaacttagaagggtgggccatgtgtaagagaggcagtatggccactgatgttatttatttttcaacacgagaactttcaaaggcttccaaatctgatgctacttctggaatcctcaattcaaccaacatccagtcctgagaagccctgatcagtcaaccagctgtggcttcctgtgcctagactggacctaattatatgggggtgactttagtttttcttcagcttaggcgtgcttgaaaccttggccaggttccatgaccatgggcctaacttaaagatgtgaatgagtgttacagttgaaagcccatcataggtttagtggtcctaggagacttggttttgacttatatacatgaaaagtttatggcaagaagtgcaaattttagcatatggggcctgacttctctaccacataattctacttgctgaagcatgatcaaagcttgttttatttcaccactgtaggaaaatgattgactatgcccatccctgggggtaattttggcatgtatacctgtaactagtaattaacatcttttttgtttaggcatgttcaattaatgctgtagctatcatagctttgctcttacctgaagccttgtccccaccacacaggacagccttcctcctgaagagaatgtctttgtgtgtccgaagttgagatggcctgccctactgccaaagaggtgacaggaaggctgggagcagctttgttaaattgtgttcagttctgttacacagtgcattgccctttgttgggggtatgcatgtatgaacacacatgcttgtcggaacgctttctcggcgtttgtcccttggctctcatctcccccattcctgtgcctactttgcctgagttcttctacccccgcagttgccagccacattgggagtctgtttgttccaatgggttgagctgtctttgtcgtggagatctggaactttgcacatgtcactactggggaggtgttcctgctctagcttccacgatgaggcgccctctttacctatcctctcaatcactactcttcttgaagcactattatttattcttccgctgtctgcctgcagcagtactactgtcaacatagtgtaaatggttctcaaaagcttaccagtgtggacttggtgttagccacgctgtttactcatacagtacgtgtcctgtttttaaaatatacaattattcttaaaaataaattaaaatctgtatacttacatttcaaaaa

SEQ ID NO: 276334 - DNA, 2839 bp, Homo sapiens
aactatcggcttaggtcgaggccgggggtgaactcctggatatgatgattgctgaagaggaaagcctgaaggaaagactcatcaaaagcatatccgtctgtcagaaagagctgaacactctgtgcagcgagttacatgttgagccatttcaggaagaaggagagacgaccatcttgcaactagaaaaagatttgcgcacccaagtggaattgatgcgaaaacagaaaaaggagagaaaacaggaactgaagctacttcaagagcaagatcaagaactgtgcgaaattctttgtatgccccactatgatattgacagtgcctcagtgcccagcttagaagagctgaaccagttcaggcaacatgtgacaactttgagggaaacaaaggcttctaggcgtgaggagtttgtcagtataaagagacagatcatactgtgtatggaagaattagaccacaccccagacacaagctttgaaagagatgtggtgtgtgaagacgaagatgccttttgtttgtctttggagaatattgcaacactacaaaagttgctacggcagctggaaatgcagaaatcacaaaatgaagcagtgtgtgaggggctgcgtactcaaatccgagagctctgggacaggttgcaaatacctgaagaagaaagagaagctgtggccaccattatgtctgggtcaaaggccaaggtccggaaagcgctgcaattagaagtggatcggttggaagaactgaaaatgcaaaacatgaagaaagtgattgaggcaattcgagtggagctggttcagtactgggaccagtgcttttatagccaggagcagagacaagcttttgcccctttctgtgctgaggactacacagaaagtctgctccagctccacgatgctgagattgtgcggttaaaaaactactatgaagttcacaaggaactctttgaaggtgtccagaagtgggaagaaacctggaggcttttcttagagtttgagagaaaagcttcagatccaaatcgatttacaaaccgaggaggaaatcttctaaaagaagaaaaacaacgagccaagctccagaaaatgctgcccaagctggaagaagagttgaaggcacgaattgaattgtgggaacaggaacattcaaaggcatttatggtgaatgggcagaaattcatggagtatgtggcagaacaatgggagatgcatcgattggagaaagagagagccaagcaggaaagacaactgaagaacaaaaaacagacagagacagagatgctgtatggcagcgctcctcgaacacctagcaagcggcgaggactggctcccaatacaccgggcaaagcacgtaagctgaacactaccaccatgtccaatgctacggccaatagtagcattcggcctatctttggagggacagtctaccactcccccgtgtctcgacttcctccttctggcagcaagccagtcgctgcttccacctgttcagggaagaaaacaccccgtactggcaggcatggagccaacaaggagaacctggagctcaacggcagcatcctgagtggtgggtaccctggctcggcccccctccagcgcaacttcagcattaattctgttgccagcacctattctgagtttgcgaaggatccgtccctctctgacagttccactgttgggcttcagcgagaactttcaaaggcttccaaatctgatgctacttctggaatcctcaattcaaccaacatccagtcctgagaagccctgatcagtcaaccagctgtggcttcctgtgcctagactggacctaattatatgggggtgactttagtttttcttcagcttaggcgtgcttgaaaccttggccaggttccatgaccatgggcctaacttaaagatgtgaatgagtgttacagttgaaagcccatcataggtttagtggtcctaggagacttggttttgacttatatacatgaaaagtttatggcaagaagtgcaaattttagcatatggggcctgacttctctaccacataattctacttgctgaagcatgatcaaagcttgttttatttcaccactgtaggaaaatgattgactatgcccatccctgggggtaattttggcatgtatacctgtaactagtaattaacatcttttttgtttaggcatgttcaattaatgctgtagctatcatagctttgctcttacctgaagccttgtccccaccacacaggacagccttcctcctgaagagaatgtctttgtgtgtccgaagttgagatggcctgccctactgccaaagaggtgacaggaaggctgggagcagctttgttaaattgtgttcagttctgttacacagtgcattgccctttgttgggggtatgcatgtatgaacacacatgcttgtcggaacgctttctcggcgtttgtcccttggctctcatctcccccattcctgtgcctactttgcctgagttcttctacccccgcagttgccagccacattgggagtctgtttgttccaatgggttgagctgtctttgtcgtggagatctggaactttgcacatgtcactactggggaggtgttcctgctctagcttccacgatgaggcgccctctttacctatcctctcaatcactactcttcttgaagcactattatttattcttccgctgtctgcctgcagcagtactactgtcaacatagtgtaaatggttctcaaaagcttaccagtgtggacttggtgttagccacgctgtttactcatacagtacgtgtcctgtttttaaaatatacaattattcttaaaaataaattaaaatctgtatacttacatttcaaaaa

SEQ ID NO: 276335 - DNA, 2718 bp, Homo sapiens
aactatcggcttaggtcgaggccgggggtgaactcctggatatgatgattgctgaagaggaaagcctgaaggaaagactcatcaaaagcatatccgtctgtcagaaagagctgaacactctgtgcagcgagttacatgttgagccatttcaggaagaaggagagacgaccatcttgcaactagaaaaagatttgcgcacccaagtggaattgatgcgaaaacagaaaaaggagagaaaacaggaactgaagctacttcaagagcaagatcaagaactgtgcgaaattctttgtatgccccactatgatattgacagtgcctcagtgcccagcttagaagagctgaaccagttcaggcaacatgtgacaactttgagggaaacaaaggcttctaggcgtgaggagtttgtcagtataaagagacagatcatactgtgtatggaagaattagaccacaccccagacacaagctttgaaagagatgtggtgtgtgaagacgaagatgccttttgtttgtctttggagaatattgcaacactacaaaagttgctacggcagctggaaatgcagaaatcacaaaatgaagcagtgtgtgaggggctgcgtactcaaatccgagagctctgggacaggttgcaaatacctgaagaagaaagagaagctgtggccaccattatgtctgggtcaaaggccaaggtccggaaagcgctgcaattagaagtggatcggttggaagaactgaaaatgcaaaacatgaagaaagtgattgaggcaattcgagtggagctggttcagtactgggaccagtgcttttatagccaggagcagagacaagcttttgcccctttctgtgctgaggactacacagaaagtctgctccagctccacgatgctgagattgtgcggttaaaaaactactatgaagttcacaaggaactctttgaaggtgtccagaagtgggaagaaacctggaggcttttcttagagtttgagagaaaagcttcagatccaaatcgatttacaaaccgaggaggaaatcttctaaaagaagaaaaacaacgagccaagctccagaaaatgctgcccaagctggaagaagagttgaaggcacgaattgaattgtgggaacaggaacattcaaaggcatttatggtgaatgggcagaaattcatggagtatgtggcagaacaatgggagatgcatcgattggagaaagagagagccaagcaggaaagacaactgaagaacaaaaaacagacagagacagagatgctgtatggcagcgctcctcgaacacctagcaagcggcgaggactggctcccaatacaccgggcaaagcacgtaagctgaacactaccaccatgtccaatgctacggccaatagtagcattcggcctatctttggagggacagtctaccactcccccgtgtctcgacttcctccttctggcagcaagccagtcgctgcttccacctgttcagggaagaaaacaccccgtactggcaggcatggagccaacaaggagaacctggagctcaacggcagcatcctgagcgagaactttcaaaggcttccaaatctgatgctacttctggaatcctcaattcaaccaacatccagtcctgagaagccctgatcagtcaaccagctgtggcttcctgtgcctagactggacctaattatatgggggtgactttagtttttcttcagcttaggcgtgcttgaaaccttggccaggttccatgaccatgggcctaacttaaagatgtgaatgagtgttacagttgaaagcccatcataggtttagtggtcctaggagacttggttttgacttatatacatgaaaagtttatggcaagaagtgcaaattttagcatatggggcctgacttctctaccacataattctacttgctgaagcatgatcaaagcttgttttatttcaccactgtaggaaaatgattgactatgcccatccctgggggtaattttggcatgtatacctgtaactagtaattaacatcttttttgtttaggcatgttcaattaatgctgtagctatcatagctttgctcttacctgaagccttgtccccaccacacaggacagccttcctcctgaagagaatgtctttgtgtgtccgaagttgagatggcctgccctactgccaaagaggtgacaggaaggctgggagcagctttgttaaattgtgttcagttctgttacacagtgcattgccctttgttgggggtatgcatgtatgaacacacatgcttgtcggaacgctttctcggcgtttgtcccttggctctcatctcccccattcctgtgcctactttgcctgagttcttctacccccgcagttgccagccacattgggagtctgtttgttccaatgggttgagctgtctttgtcgtggagatctggaactttgcacatgtcactactggggaggtgttcctgctctagcttccacgatgaggcgccctctttacctatcctctcaatcactactcttcttgaagcactattatttattcttccgctgtctgcctgcagcagtactactgtcaacatagtgtaaatggttctcaaaagcttaccagtgtggacttggtgttagccacgctgtttactcatacagtacgtgtcctgtttttaaaatatacaattattcttaaaaataaattaaaatctgtatacttacatttcaaaaa

SEQ ID NO: 276336 - DNA, 4685 bp, Homo sapiens
aactatcggcttaggtcgaggccgggggtgaactcctggatatgatgattgctgaagaggaaagcctgaaggaaagactcatcaaaagcatatccgtctgtcagaaagagctgaacactctgtgcagcgagttacatgttgagccatttcaggaagaaggagagacgaccatcttgcaactagaaaaagatttgcgcacccaagtggaattgatgcgaaaacagaaaaaggagagaaaacaggaactgaagctacttcaagagcaagatcaagaactgtgcgaaattctttgtatgccccactatgatattgacagtgcctcagtgcccagcttagaagagctgaaccagttcaggcaacatgtgacaactttgagggaaacaaaggcttctaggcgtgaggagtttgtcagtataaagagacagatcatactgtgtatggaagaattagaccacaccccagacacaagctttgaaagagatgtggtgtgtgaagacgaagatgccttttgtttgtctttggagaatattgcaacactacaaaagttgctacggcaggtactgtcttctcaaattatgccctaggatctccgtagtatatagcagtttgaacaaaactgacagctgtttcttcagtcttaaataaggagacaatgtaaggtaagagaatgagggaagctaaggatagtaatatatgatatacaaccttgatttttgtttaacagttaaaaaacctttatatggctccaagaaaatgaaattatagatgaaataatattagtcatttgaattagactagtgtttaattaaaatttttttcagttctaaatttgaatgctaattcttggggtctgagatcccgacagccttacagctcgtgtttaggaggcatgaaaacatgctactttgaactctcatgaaagtgcctcctcctctactccagacatttctttgcgggaggctagagggctagcctctgtgctgctgctttgccgtgagtgacactggctttctatgctgtagctggaaatgcagaaatcacaaaatgaagcagtgtgtgaggggctgcgtactcaaatccgagagctctgggacaggttgcaaatacctgaagaagaaagagaagctgtggccaccattatgtctgggtcaaaggccaaggtccggaaagcgctgcaattagaagtggatcggttggaagaactgaaaatgcaaaacatgaagaaagtgattgaggcaattcgagtggagctggttcagtactgggaccagtgcttttatagccaggagcagagacaagcttttgcccctttctgtgctgaggactacacagaaagtctgctccagctccacgatgctgagattgtgcggttaaaaaactactatgaagttcacaaggaactctttgaaggtgtccagaagtgggaagaaacctggaggcttttcttagagtttgagagaaaagcttcagatccaaatcgatttacaaaccgaggaggaaatcttctaaaagaagaaaaacaacgagccaagctccagaaaatgctgcccaagctggaagaagagttgaaggcacgaattgaattgtgggaacaggaacattcaaaggcatttatggtgaatgggcagaaattcatggagtatgtggcagaacaatgggagatgcatcgattggagaaagagagagccaagcaggaaagacaactgaagaacaaaaaacagacagagacagagatgctgtatggcagcgctcctcgaacacctagcaagcggcgaggactggctcccaatacaccgggcaaagcacgtaagctgaacactaccaccatgtccaatgctacggccaatagtagcattcggcctatctttggagggacagtctaccactcccccgtgtctcgacttcctccttctggcagcaagccagtcgctgcttccacctgttcagggaagaaaacaccccgtactggcaggcatggagccaacaaggagaacctggagctcaacggcagcatcctgagtggtgggtaccctggctcggcccccctccagcgcaacttcagcattaattctgttgccactctattctcagctagctaatgctgatttcctcacctttgcctctttccatacattgagctactgaagcatagatgaagcactggaagcaagtttttccagaatgctcttcacttcctagtatcctactctatatttgctaacacctaactacactgccttttacttaatctgtgatttcttctctcaatattttactagcaagaggagaggatgttcctcacccttgaggggatattgagttaaacccctagcctgcctcccctcttaattgctgcagggatagagaatggaacagttggccaaggctgcagctagttttgatcactgaaactggcttcctactccagcatgtttttcaaattacgtggctggtggtgcttctacctttaaaagtgggtgtgtgtcactctggctgattgctggacagaggtccagctttctctttttcgcttgttcaaccaaggcccattttatctgaggcttaaatgtacctgcctatctgtgtggctagtcctaggtaggttcgtctggtttgggttgctatggctgatagactccaccaggcagcaccaaagccggtaaactaacctctgctaatatctgtctttctcaatagccattcatgctttatcttttgctgctctaccatgtgctccagcatgagatcaaatcaccagcaggttacaaggcctcagcccagggattggtagatatatgttctggcccattgttttataaagggctcaagagaccaaagcttgttgcctacttaccttgacaactctaaagtagctctgtgaagtagagtcatgcctcgcttaatgacagggatatgttctgagaatgtggggcaatttcattgtgcacatatcagagtgtacttaacagtcctagacagaacagcctacacacctaaactatatggtatggcgttttcctcctaggctacaaacctgggcagcatgttacaggaaagaatactgtaggcaattgtgggttttttttgattcaggctattcctgggatactgtaggcaattgtaacgcaatggtaagtatttgtgtatctaaacatagaaaaggtacagtaaaaatatggtataatcttatgggaccaccatagtgtatgtggcctgtcgttaactgaaacatcattatgcagtgcatgactgtatgaaggatttctcttctgtgaggtgtaacagaatggactggctgaggaaaaaggggtcacgggcatgcgtgcacatgcactctgtctgtgactaatagaatggtgctcagagttcctcaccttttactcctaacgcagcctattgcaggctagggatctcagagaaactaccttcaagggaccttttgctgacacttaaccaaacttagaagggtgggccatgtgtaagagaggcagtatggccactgatgttatttatttttcaacacgagaactttcaaaggcttccaaatctgatgctacttctggaatcctcaattcaaccaacatccagtcctgagaagccctgatcagtcaaccagctgtggcttcctgtgcctagactggacctaattatatgggggtgactttagtttttcttcagcttaggcgtgcttgaaaccttggccaggttccatgaccatgggcctaacttaaagatgtgaatgagtgttacagttgaaagcccatcataggtttagtggtcctaggagacttggttttgacttatatacatgaaaagtttatggcaagaagtgcaaattttagcatatggggcctgacttctctaccacataattctacttgctgaagcatgatcaaagcttgttttatttcaccactgtaggaaaatgattgactatgcccatccctgggggtaattttggcatgtatacctgtaactagtaattaacatcttttttgtttaggcatgttcaattaatgctgtagctatcatagctttgctcttacctgaagccttgtccccaccacacaggacagccttcctcctgaagagaatgtctttgtgtgtccgaagttgagatggcctgccctactgccaaagaggtgacaggaaggctgggagcagctttgttaaattgtgttcagttctgttacacagtgcattgccctttgttgggggtatgcatgtatgaacacacatgcttgtcggaacgctttctcggcgtttgtcccttggctctcatctcccccattcctgtgcctactttgcctgagttcttctacccccgcagttgccagccacattgggagtctgtttgttccaatgggttgagctgtctttgtcgtggagatctggaactttgcacatgtcactactggggaggtgttcctgctctagcttccacgatgaggcgccctctttacctatcctctcaatcactactcttcttgaagcactattatttattcttccgctgtctgcctgcagcagtactactgtcaacatagtgtaaatggttctcaaaagcttaccagtgtggacttggtgttagccacgctgtttactcatacagtacgtgtcctgtttttaaaatatacaattattcttaaaaataaattaaaatctgtatacttacatttcaaaaa

SEQ ID NO: 276337 - DNA, 2760 bp, Homo sapiens
aactatcggcttaggtcgaggccgggggtgaactcctggatatgatgattgctgaagaggaaagcctgaaggaaagactcatcaaaagcatatccgtctgtcagaaagagctgaacactctgtgcagcgagttacatgttgagccatttcaggaagaaggagagacgaccatcttgcaactagaaaaagatttgcgcacccaagtggaattgatgcgaaaacagaaaaaggagagaaaacaggaactgaagctacttcaagagcaagatcaagaactgtgcgaaattctttgtatgccccactatgatattgacagtgcctcagtgcccagcttagaagagctgaaccagttcaggcaacatgtgacaactttgagggaaacaaaggcttctaggcgtgaggagtttgtcagtataaagagacagatcatactgtgtatggaagaattagaccacaccccagacacaagctttgaaagagatgtggtgtgtgaagacgaagatgccttttgtttgtctttggagaatattgcaacactacaaaagttgctacggcagctggaaatgcagaaatcacaaaatgaagcagtgtgtgaggggctgcgtactcaaatccgagagctctgggacaggttgcaaatacctgaagaagaaagagaagctgtggccaccattatgtctgggtcaaaggccaaggtccggaaagcgctgcaattagaagtggatcggttggaagaactgaaaatgcaaaacatgaagaaagtgattgaggcaattcgagtggagctggttcagtactgggaccagtgcttttatagccaggagcagagacaagcttttgcccctttctgtgctgaggactacacagaaagtctgctccagctccacgatgctgagattgtgcggttaaaaaactactatgaagttcacaaggaactctttgaaggtgtccagaagtgggaagaaacctggaggcttttcttagagtttgagagaaaagcttcagatccaaatcgatttacaaaccgaggaggaaatcttctaaaagaagaaaaacaacgagccaagctccagaaaatgctgcccaagctggaagaagagttgaaggcacgaattgaattgtgggaacaggaacattcaaaggcatttatggtgaatgggcagaaattcatggagtatgtggcagaacaatgggagatgcatcgattggagaaagagagagccaagcaggaaagacaactgaagaacaaaaaacagacagagacagagatgctgtatggcagcgctcctcgaacacctagcaagcggcgaggactggctcccaatacaccgggcaaagcacgtaagctgaacactaccaccatgtccaatgctacggccaatagtagcattcggcctatctttggagggacagtctaccactcccccgtgtctcgacttcctccttctggcagcaagccagtcgctgcttccacctgttcagggaagaaaacaccccgtactggcaggcatggagccaacaaggagaacctggagctcaacggcagcatcctgagaaggatccgtccctctctgacagttccactgttgggcttcagcgagaactttcaaaggcttccaaatctgatgctacttctggaatcctcaattcaaccaacatccagtcctgagaagccctgatcagtcaaccagctgtggcttcctgtgcctagactggacctaattatatgggggtgactttagtttttcttcagcttaggcgtgcttgaaaccttggccaggttccatgaccatgggcctaacttaaagatgtgaatgagtgttacagttgaaagcccatcataggtttagtggtcctaggagacttggttttgacttatatacatgaaaagtttatggcaagaagtgcaaattttagcatatggggcctgacttctctaccacataattctacttgctgaagcatgatcaaagcttgttttatttcaccactgtaggaaaatgattgactatgcccatccctgggggtaattttggcatgtatacctgtaactagtaattaacatcttttttgtttaggcatgttcaattaatgctgtagctatcatagctttgctcttacctgaagccttgtccccaccacacaggacagccttcctcctgaagagaatgtctttgtgtgtccgaagttgagatggcctgccctactgccaaagaggtgacaggaaggctgggagcagctttgttaaattgtgttcagttctgttacacagtgcattgccctttgttgggggtatgcatgtatgaacacacatgcttgtcggaacgctttctcggcgtttgtcccttggctctcatctcccccattcctgtgcctactttgcctgagttcttctacccccgcagttgccagccacattgggagtctgtttgttccaatgggttgagctgtctttgtcgtggagatctggaactttgcacatgtcactactggggaggtgttcctgctctagcttccacgatgaggcgccctctttacctatcctctcaatcactactcttcttgaagcactattatttattcttccgctgtctgcctgcagcagtactactgtcaacatagtgtaaatggttctcaaaagcttaccagtgtggacttggtgttagccacgctgtttactcatacagtacgtgtcctgtttttaaaatatacaattattcttaaaaataaattaaaatctgtatacttacatttcaaaaa

SEQ ID NO: 276338 - DNA, 2784 bp, Homo sapiens
aactatcggcttaggtcgaggccgggggtgaactcctggatatgatgattgctgaagaggaaagcctgaaggaaagactcatcaaaagcatatccgtctgtcagaaagagctgaacactctgtgcagcgagttacatgttgagccatttcaggaagaaggagagacgaccatcttgcaactagaaaaagatttgcgcacccaagtggaattgatgcgaaaacagaaaaaggagagaaaacaggaactgaagctacttcaagagcaagatcaagaactgtgcgaaattctttgtatgccccactatgatattgacagtgcctcagtgcccagcttagaagagctgaaccagttcaggcaacatgtgacaactttgagggaaacaaaggcttctaggcgtgaggagtttgtcagtataaagagacagatcatactgtgtatggaagaattagaccacaccccagacacaagctttgaaagagatgtggtgtgtgaagacgaagatgccttttgtttgtctttggagaatattgcaacactacaaaagttgctacggcagctggaaatgcagaaatcacaaaatgaagcagtgtgtgaggggctgcgtactcaaatccgagagctctgggacaggttgcaaatacctgaagaagaaagagaagctgtggccaccattatgtctgggtcaaaggccaaggtccggaaagcgctgcaattagaagtggatcggttggaagaactgaaaatgcaaaacatgaagaaagtgattgaggcaattcgagtggagctggttcagtactgggaccagtgcttttatagccaggagcagagacaagcttttgcccctttctgtgctgaggactacacagaaagtctgctccagctccacgatgctgagattgtgcggttaaaaaactactatgaagttcacaaggaactctttgaaggtgtccagaagtgggaagaaacctggaggcttttcttagagtttgagagaaaagcttcagatccaaatcgatttacaaaccgaggaggaaatcttctaaaagaagaaaaacaacgagccaagctccagaaaatgctgcccaagctggaagaagagttgaaggcacgaattgaattgtgggaacaggaacattcaaaggcatttatggtgaatgggcagaaattcatggagtatgtggcagaacaatgggagatgcatcgattggagaaagagagagccaagcaggaaagacaactgaagaacaaaaaacagacagagacagagatgctgtatggcagcgctcctcgaacacctagcaagcggcgaggactggctcccaatacaccgggcaaagcacgtaagctgaacactaccaccatgtccaatgctacggccaatagtagcattcggcctatctttggagggacagtctaccactcccccgtgtctcgacttcctccttctggcagcaagccagtcgctgcttccacctgttcagggaagaaaacaccccgtactggcaggcatggagccaacaaggagaacctggagctcaacggcagcatcctgagtggtgggtaccctggctcggcccccctccagcgcaacttcagcattaattctgttgccagcacctattctgagtttgcgaaggatccgtccctctctgacagttccactgttgggcttcagcgagaactttcaaaggcttccaaatctgatgctacttctggaatcctcaattcaaccaacatccagtcctgagaagccctgatcagtcaaccagctgtggcttcctgtgcctagactggacctaattatatgggggtgactttagtttttcttcagcttaggcgtgcttgaaaccttggccaggttccatgaccatgggcctaacttaaagatgtgaatgagtgttacagttgaaagcccatcataggtttagtggtcctaggagacttggttttgacttatatacatgaaaagtttatggcaagaagtgcaaattttagcatatggggcctgacttctctaccacataattctacttgctgaagcatgatcaaagcttgttttatttcaccactgtaactagtaattaacatcttttttgtttaggcatgttcaattaatgctgtagctatcatagctttgctcttacctgaagccttgtccccaccacacaggacagccttcctcctgaagagaatgtctttgtgtgtccgaagttgagatggcctgccctactgccaaagaggtgacaggaaggctgggagcagctttgttaaattgtgttcagttctgttacacagtgcattgccctttgttgggggtatgcatgtatgaacacacatgcttgtcggaacgctttctcggcgtttgtcccttggctctcatctcccccattcctgtgcctactttgcctgagttcttctacccccgcagttgccagccacattgggagtctgtttgttccaatgggttgagctgtctttgtcgtggagatctggaactttgcacatgtcactactggggaggtgttcctgctctagcttccacgatgaggcgccctctttacctatcctctcaatcactactcttcttgaagcactattatttattcttccgctgtctgcctgcagcagtactactgtcaacatagtgtaaatggttctcaaaagcttaccagtgtggacttggtgttagccacgctgtttactcatacagtacgtgtcctgtttttaaaatatacaattattcttaaaaataaattaaaatctgtatacttacatttcaaaaa

SEQ ID NO: 276339 - DNA, 2290 bp, Homo sapiens
aactatcggcttaggtcgaggccgggggtgaactcctggatatgatgattgctgaagaggaaagcctgaaggaaagactcatcaaaagcatatccgtctgtcagaaagagctgaacactctgtgcagcgagttacatgttgagccatttcaggaagaaggagagacgaccatcttgcaactagaaaaagatttgcgcacccaagtggaattgatgcgaaaacagaaaaaggagagaaaacaggaactgaagctacttcaagagcaagatcaagaactgtgcgaaattctttgtatgccccactatgatattgacagtgcctcagtgcccagcttagaagagctgaaccagttcaggcaacatgtgacaactttgagggaaacaaaggcttctaggcgtgaggagtttgtcagtataaagagacagatcatactgtgtatggaagaattagaccacaccccagacacaagctttgaaagagatgtggtgtgtgaagacgaagatgccttttgtttgtctttggagaatattgcaacactacaaaagttgctacggcagctggaaatgcagaaatcacaaaatgaagcagtgtgtgaggggctgcgtactcaaatccgagagctctgggacaggttgcaaatacctgaagaagaaagagaagctgtggccaccattatgtctgggtcaaaggccaaggtccggaaagcgctgcaattagaagtggatcggttggaagaactgaaaatgcaaaacatgaagaaagtgattgaggcaattcgagtggagctggttcagtactgggaccagtgcttttatagccaggagcagagacaagcttttgcccctttctgtgctgaggactacacagaaagtctgctccagctccacgatgctgagattgtgcggttaaaaaactactatgaagttcacaaggaactctttgaaggtgtccagaagtgggaagaaacctggaggcttttcttagagtttgagagaaaagcttcagatccaaatcgatttacaaaccgaggaggaaatcttctaaaagaagaaaaacaacgagccaagctccagaaaatgctgcccaagctggaagaagagttgaaggcacgaattgaattgtgggaacaggaacattcaaaggcatttatggtgaatgggcagaaattcatggagtatgtggcagaacaatgggagatgcatcgattggagaaagagagagccaagcaggaaagacaactgaagaacaaaaaacagacagagacagagatgctgtatggcagcgctcctcgaacacctagcaagcggcgaggactggctcccaatacaccgggcaaagcacgtaagctgaacactaccaccatgtccaatgctacggccaatagtagcattcggcctatctttggagggacagtctaccactcccccgtgtctcgacttcctccttctggcagcaagccagtcgctgcttccacctgttcagggaagaaaacaccccgtactggcaggcatggagccaacaaggagaacctggagctcaacggcagcatcctgagtggtgggtaccctggctcggcccccctccagcgcaacttcagcattaattctgttgccagcacctattctgagtttgcgaaggatccgtccctctctgacagttccactgttgggcttcaggacagccttcctcctgaagagaatgtctttgtgtgtccgaagttgagatggcctgccctactgccaaagaggtgacaggaaggctgggagcagctttgttaaattgtgttcagttctgttacacagtgcattgccctttgttgggggtatgcatgtatgaacacacatgcttgtcggaacgctttctcggcgtttgtcccttggctctcatctcccccattcctgtgcctactttgcctgagttcttctacccccgcagttgccagccacattgggagtctgtttgttccaatgggttgagctgtctttgtcgtggagatctggaactttgcacatgtcactactggggaggtgttcctgctctagcttccacgatgaggcgccctctttacctatcctctcaatcactactcttcttgaagcactattatttattcttccgctgtctgcctgcagcagtactactgtcaacatagtgtaaatggttctcaaaagcttaccagtgtggacttggtgttagccacgctgtttactcatacagtacgtgtcctgtttttaaaatatacaattattcttaaaaataaattaaaatctgtatacttacatttcaaaaa

SEQ ID NO: 276340 - DNA, 2169 bp, Homo sapiens
aactatcggcttaggtcgaggccgggggtgaactcctggatatgatgattgctgaagaggaaagcctgaaggaaagactcatcaaaagcatatccgtctgtcagaaagagctgaacactctgtgcagcgagttacatgttgagccatttcaggaagaaggagagacgaccatcttgcaactagaaaaagatttgcgcacccaagtggaattgatgcgaaaacagaaaaaggagagaaaacaggaactgaagctacttcaagagcaagatcaagaactgtgcgaaattctttgtatgccccactatgatattgacagtgcctcagtgcccagcttagaagagctgaaccagttcaggcaacatgtgacaactttgagggaaacaaaggcttctaggcgtgaggagtttgtcagtataaagagacagatcatactgtgtatggaagaattagaccacaccccagacacaagctttgaaagagatgtggtgtgtgaagacgaagatgccttttgtttgtctttggagaatattgcaacactacaaaagttgctacggcagctggaaatgcagaaatcacaaaatgaagcagtgtgtgaggggctgcgtactcaaatccgagagctctgggacaggttgcaaatacctgaagaagaaagagaagctgtggccaccattatgtctgggtcaaaggccaaggtccggaaagcgctgcaattagaagtggatcggttggaagaactgaaaatgcaaaacatgaagaaagtgattgaggcaattcgagtggagctggttcagtactgggaccagtgcttttatagccaggagcagagacaagcttttgcccctttctgtgctgaggactacacagaaagtctgctccagctccacgatgctgagattgtgcggttaaaaaactactatgaagttcacaaggaactctttgaaggtgtccagaagtgggaagaaacctggaggcttttcttagagtttgagagaaaagcttcagatccaaatcgatttacaaaccgaggaggaaatcttctaaaagaagaaaaacaacgagccaagctccagaaaatgctgcccaagctggaagaagagttgaaggcacgaattgaattgtgggaacaggaacattcaaaggcatttatggtgaatgggcagaaattcatggagtatgtggcagaacaatgggagatgcatcgattggagaaagagagagccaagcaggaaagacaactgaagaacaaaaaacagacagagacagagatgctgtatggcagcgctcctcgaacacctagcaagcggcgaggactggctcccaatacaccgggcaaagcacgtaagctgaacactaccaccatgtccaatgctacggccaatagtagcattcggcctatctttggagggacagtctaccactcccccgtgtctcgacttcctccttctggcagcaagccagtcgctgcttccacctgttcagggaagaaaacaccccgtactggcaggcatggagccaacaaggagaacctggagctcaacggcagcatcctgaggacagccttcctcctgaagagaatgtctttgtgtgtccgaagttgagatggcctgccctactgccaaagaggtgacaggaaggctgggagcagctttgttaaattgtgttcagttctgttacacagtgcattgccctttgttgggggtatgcatgtatgaacacacatgcttgtcggaacgctttctcggcgtttgtcccttggctctcatctcccccattcctgtgcctactttgcctgagttcttctacccccgcagttgccagccacattgggagtctgtttgttccaatgggttgagctgtctttgtcgtggagatctggaactttgcacatgtcactactggggaggtgttcctgctctagcttccacgatgaggcgccctctttacctatcctctcaatcactactcttcttgaagcactattatttattcttccgctgtctgcctgcagcagtactactgtcaacatagtgtaaatggttctcaaaagcttaccagtgtggacttggtgttagccacgctgtttactcatacagtacgtgtcctgtttttaaaatatacaattattcttaaaaataaattaaaatctgtatacttacatttcaaaaa

SEQ ID NO: 276341 - DNA, 1276 bp, Homo sapiens
tcgtacatggtcttctgttcatggtcttctcgtaatggtcggaagaaaacaccccgtactggcaggcatggagccaacaaggagaacctggagctcaacggcagcatcctgagcgagaactttcaaaggcttccaaatctgatgctacttctggaatcctcaattcaaccaacatccagtcctgagaagccctgatcagtcaaccagctgtggcttcctgtgcctagactggacctaattatatgggggtgactttagtttttcttcagcttaggcgtgcttgaaaccttggccaggttccatgaccatgggcctaacttaaagatgtgaatgagtgttacagttgaaagcccatcataggtttagtggtcctaggagacttggttttgacttatatacatgaaaagtttatggcaagaagtgcaaattttagcatatggggcctgacttctctaccacataattctacttgctgaagcatgatcaaagcttgttttatttcaccactgtaggaaaatgattgactatgcccatccctgggggtaattttggcatgtatacctgtaactagtaattaacatcttttttgtttaggcatgttcaattaatgctgtagctatcatagctttgctcttacctgaagccttgtccccaccacacaggacagccttcctcctgaagagaatgtctttgtgtgtccgaagttgagatggcctgccctactgccaaagaggtgacaggaaggctgggagcagctttgttaaattgtgttcagttctgttacacagtgcattgccctttgttgggggtatgcatgtatgaacacacatgcttgtcggaacgctttctcggcgtttgtcccttggctctcatctcccccattcctgtgcctactttgcctgagttcttctacccccgcagttgccagccacattgggagtctgtttgttccaatgggttgagctgtctttgtcgtggagatctggaactttgcacatgtcactactggggaggtgttcctgctctagcttccacgatgaggcgccctctttacctatcctctcaatcactactcttcttgaagcactattatttattcttccgctgtctgcctgcagcagtactactgtcaacatagtgtaaatggttctcaaaagcttaccagtgtggacttggtgttagccacgctgtttactcatacagtacgtgtcctgtttttaaaatatacaattattcttaaaaataaattaaaatctgtatacttacatttcaaaaa

SEQ ID NO: 276342 - DNA, 4248 bp, Homo sapiens
aactatcggcttaggtcgaggccgggggtgaactcctggatatgatgattgctgaagaggaaagcctgaaggaaagactcatcaaaagcatatccgtctgtcagaaagagctgaacactctgtgcagcgagttacatgttgagccatttcaggaagaaggagagacgaccatcttgcaactagaaaaagatttgcgcacccaagtggaattgatgcgaaaacagaaaaaggagagaaaacaggaactgaagctacttcaagagcaagatcaagaactgtgcgaaattctttgtatgccccactatgatattgacagtgcctcagtgcccagcttagaagagctgaaccagttcaggcaacatgtgacaactttgagggaaacaaaggcttctaggcgtgaggagtttgtcagtataaagagacagatcatactgtgtatggaagaattagaccacaccccagacacaagctttgaaagagatgtggtgtgtgaagacgaagatgccttttgtttgtctttggagaatattgcaacactacaaaagttgctacggcagctggaaatgcagaaatcacaaaatgaagcagtgtgtgaggggctgcgtactcaaatccgagagctctgggacaggttgcaaatacctgaagaagaaagagaagctgtggccaccattatgtctgggtcaaaggccaaggtccggaaagcgctgcaattagaagtggatcggttggaagaactgaaaatgcaaaacatgaagaaagtgattgaggcaattcgagtggagctggttcagtactgggaccagtgcttttatagccaggagcagagacaagcttttgcccctttctgtgctgaggactacacagaaagtctgctccagctccacgatgctgagattgtgcggttaaaaaactactatgaagttcacaaggaactctttgaaggtgtccagaagtgggaagaaacctggaggcttttcttagagtttgagagaaaagcttcagatccaaatcgatttacaaaccgaggaggaaatcttctaaaagaagaaaaacaacgagccaagctccagaaaatgctgcccaagctggaagaagagttgaaggcacgaattgaattgtgggaacaggaacattcaaaggcatttatggtgaatgggcagaaattcatggagtatgtggcagaacaatgggagatgcatcgattggagaaagagagagccaagcaggaaagacaactgaagaacaaaaaacagacagagacagagatgctgtatggcagcgctcctcgaacacctagcaagcggcgaggactggctcccaatacaccgggcaaagcacgtaagctgaacactaccaccatgtccaatgctacggccaatagtagcattcggcctatctttggagggacagtctaccactcccccgtgtctcgacttcctccttctggcagcaagccagtcgctgcttccacctgttcagggaagaaaacaccccgtactggcaggcatggagccaacaaggagaacctggagctcaacggcagcatcctgagtggtgggtaccctggctcggcccccctccagcgcaacttcagcattaattctgttgccactctattctcagctagctaatgctgatttcctcacctttgcctctttccatacattgagctactgaagcatagatgaagcactggaagcaagtttttccagaatgctcttcacttcctagtatcctactctatatttgctaacacctaactacactgccttttacttaatctgtgatttcttctctcaatattttactagcaagaggagaggatgttcctcacccttgaggggatattgagttaaacccctagcctgcctcccctcttaattgctgcagggatagagaatggaacagttggccaaggctgcagctagttttgatcactgaaactggcttcctactccagcatgtttttcaaattacgtggctggtggtgcttctacctttaaaagtgggtgtgtgtcactctggctgattgctggacagaggtccagctttctctttttcgcttgttcaaccaaggcccattttatctgaggcttaaatgtacctgcctatctgtgtggctagtcctaggtaggttcgtctggtttgggttgctatggctgatagactccaccaggcagcaccaaagccggtaaactaacctctgctaatatctgtctttctcaatagccattcatgctttatcttttgctgctctaccatgtgctccagcatgagatcaaatcaccagcaggttacaaggcctcagcccagggattggtagatatatgttctggcccattgttttataaagggctcaagagaccaaagcttgttgcctacttaccttgacaactctaaagtagctctgtgaagtagagtcatgcctcgcttaatgacagggatatgttctgagaatgtggggcaatttcattgtgcacatatcagagtgtacttaacagtcctagacagaacagcctacacacctaaactatatggtatggcgttttcctcctaggctacaaacctgggcagcatgttacaggaaagaatactgtaggcaattgtgggttttttttgattcaggctattcctgggatactgtaggcaattgtaacgcaatggtaagtatttgtgtatctaaacatagaaaaggtacagtaaaaatatggtataatcttatgggaccaccatagtgtatgtggcctgtcgttaactgaaacatcattatgcagtgcatgactgtatgaaggatttctcttctgtgaggtgtaacagaatggactggctgaggaaaaaggggtcacgggcatgcgtgcacatgcactctgtctgtgactaatagaatggtgctcagagttcctcaccttttactcctaacgcagcctattgcaggctagggatctcagagaaactaccttcaagggaccttttgctgacacttaaccaaacttagaagggtgggccatgtgtaagagaggcagtatggccactgatgttatttatttttcaacacgagaactttcaaaggcttccaaatctgatgctacttctggaatcctcaattcaaccaacatccagtcctgagaagccctgatcagtcaaccagctgtggcttcctgtgcctagactggacctaattatatgggggtgactttagtttttcttcagcttaggcgtgcttgaaaccttggccaggttccatgaccatgggcctaacttaaagatgtgaatgagtgttacagttgaaagcccatcataggtttagtggtcctaggagacttggttttgacttatatacatgaaaagtttatggcaagaagtgcaaattttagcatatggggcctgacttctctaccacataattctacttgctgaagcatgatcaaagcttgttttatttcaccactgtaggaaaatgattgactatgcccatccctgggggtaattttggcatgtatacctgtaactagtaattaacatcttttttgtttaggcatgttcaattaatgctgtagctatcatagctttgctcttacctgaagccttgtccccaccacacaggacagccttcctcctgaagagaatgtctttgtgtgtccgaagttgagatggcctgccctactgccaaagaggtgacaggaaggctgggagcagctttgttaaattgtgttcagttctgttacacagtgcattgccctttgttgggggtatgcatgtatgaacacacatgcttgtcggaacgctttctcggcgtttgtcccttggctctcatctcccccattcctgtgcctactttgcctgagttcttctacccccgcagttgccagccacattgggagtctgtttgttccaatgggttgagctgtctttgtcgtggagatctggaactttgcacatgtcactactggggaggtgttcctgctctagcttccacgatgaggcgccctctttacctatcctctcaatcactactcttcttgaagcactattatttattcttccgctgtctgcctgcagcagtactactgtcaacatagtgtaaatggttctcaaaagcttaccagtgtggacttggtgttagccacgctgtttactcatacagtacgtgtcctgtttttaaaatatacaattattcttaaaaataaattaaaatctgtatacttacatttcaaaaaaaaaaaaccacaaaaaagggcggccgct

SEQ ID NO: 276343 - DNA, 4221 bp, Homo sapiens
aactatcggcttaggtcgaggccgggggtgaactcctggatatgatgattgctgaagaggaaagcctgaaggaaagactcatcaaaagcatatccgtctgtcagaaagagctgaacactctgtgcagcgagttacatgttgagccatttcaggaagaaggagagacgaccatcttgcaactagaaaaagatttgcgcacccaagtggaattgatgcgaaaacagaaaaaggagagaaaacaggaactgaagctacttcaagagcaagatcaagaactgtgcgaaattctttgtatgccccactatgatattgacagtgcctcagtgcccagcttagaagagctgaaccagttcaggcaacatgtgacaactttgagggaaacaaaggcttctaggcgtgaggagtttgtcagtataaagagacagatcatactgtgtatggaagaattagaccacaccccagacacaagctttgaaagagatgtggtgtgtgaagacgaagatgccttttgtttgtctttggagaatattgcaacactacaaaagttgctacggcagctggaaatgcagaaatcacaaaatgaagcagtgtgtgaggggctgcgtactcaaatccgagagctctgggacaggttgcaaatacctgaagaagaaagagaagctgtggccaccattatgtctgggtcaaaggccaaggtccggaaagcgctgcaattagaagtggatcggttggaagaactgaaaatgcaaaacatgaagaaagtgattgaggcaattcgagtggagctggttcagtactgggaccagtgcttttatagccaggagcagagacaagcttttgcccctttctgtgctgaggactacacagaaagtctgctccagctccacgatgctgagattgtgcggttaaaaaactactatgaagttcacaaggaactctttgaaggtgtccagaagtgggaagaaacctggaggcttttcttagagtttgagagaaaagcttcagatccaaatcgatttacaaaccgaggaggaaatcttctaaaagaagaaaaacaacgagccaagctccagaaaatgctgcccaagctggaagaagagttgaaggcacgaattgaattgtgggaacaggaacattcaaaggcatttatggtgaatgggcagaaattcatggagtatgtggcagaacaatgggagatgcatcgattggagaaagagagagccaagcaggaaagacaactgaagaacaaaaaacagacagagacagagatgctgtatggcagcgctcctcgaacacctagcaagcggcgaggactggctcccaatacaccgggcaaagcacgtaagctgaacactaccaccatgtccaatgctacggccaatagtagcattcggcctatctttggagggacagtctaccactcccccgtgtctcgacttcctccttctggcagcaagccagtcgctgcttccacctgttcagggaagaaaacaccccgtactggcaggcatggagccaacaaggagaacctggagctcaacggcagcatcctgagtggtgggtaccctggctcggcccccctccagcgcaacttcagcattaattctgttgccactctattctcagctagctaatgctgatttcctcacctttgcctctttccatacattgagctactgaagcatagatgaagcactggaagcaagtttttccagaatgctcttcacttcctagtatcctactctatatttgctaacacctaactacactgccttttacttaatctgtgatttcttctctcaatattttactagcaagaggagaggatgttcctcacccttgaggggatattgagttaaacccctagcctgcctcccctcttaattgctgcagggatagagaatggaacagttggccaaggctgcagctagttttgatcactgaaactggcttcctactccagcatgtttttcaaattacgtggctggtggtgcttctacctttaaaagtgggtgtgtgtcactctggctgattgctggacagaggtccagctttctctttttcgcttgttcaaccaaggcccattttatctgaggcttaaatgtacctgcctatctgtgtggctagtcctaggtaggttcgtctggtttgggttgctatggctgatagactccaccaggcagcaccaaagccggtaaactaacctctgctaatatctgtctttctcaatagccattcatgctttatcttttgctgctctaccatgtgctccagcatgagatcaaatcaccagcaggttacaaggcctcagcccagggattggtagatatatgttctggcccattgttttataaagggctcaagagaccaaagcttgttgcctacttaccttgacaactctaaagtagctctgtgaagtagagtcatgcctcgcttaatgacagggatatgttctgagaatgtggggcaatttcattgtgcacatatcagagtgtacttaacagtcctagacagaacagcctacacacctaaactatatggtatggcgttttcctcctaggctacaaacctgggcagcatgttacaggaaagaatactgtaggcaattgtgggttttttttgattcaggctattcctgggatactgtaggcaattgtaacgcaatggtaagtatttgtgtatctaaacatagaaaaggtacagtaaaaatatggtataatcttatgggaccaccatagtgtatgtggcctgtcgttaactgaaacatcattatgcagtgcatgactgtatgaaggatttctcttctgtgaggtgtaacagaatggactggctgaggaaaaaggggtcacgggcatgcgtgcacatgcactctgtctgtgactaatagaatggtgctcagagttcctcaccttttactcctaacgcagcctattgcaggctagggatctcagagaaactaccttcaagggaccttttgctgacacttaaccaaacttagaagggtgggccatgtgtaagagaggcagtatggccactgatgttatttatttttcaacacgagaactttcaaaggcttccaaatctgatgctacttctggaatcctcaattcaaccaacatccagtcctgagaagccctgatcagtcaaccagctgtggcttcctgtgcctagactggacctaattatatgggggtgactttagtttttcttcagcttaggcgtgcttgaaaccttggccaggttccatgaccatgggcctaacttaaagatgtgaatgagtgttacagttgaaagcccatcataggtttagtggtcctaggagacttggttttgacttatatacatgaaaagtttatggcaagaagtgcaaattttagcatatggggcctgacttctctaccacataattctacttgctgaagcatgatcaaagcttgttttatttcaccactgtaggaaaatgattgactatgcccatccctgggggtaattttggcatgtatacctgtaactagtaattaacatcttttttgtttaggcatgttcaattaatgctgtagctatcatagctttgctcttacctgaagccttgtccccaccacacaggacagccttcctcctgaagagaatgtctttgtgtgtccgaagttgagatggcctgccctactgccaaagaggtgacaggaaggctgggagcagctttgttaaattgtgttcagttctgttacacagtgcattgccctttgttgggggtatgcatgtatgaacacacatgcttgtcggaacgctttctcggcgtttgtcccttggctctcatctcccccattcctgtgcctactttgcctgagttcttctacccccgcagttgccagccacattgggagtctgtttgttccaatgggttgagctgtctttgtcgtggagatctggaactttgcacatgtcactactggggaggtgttcctgctctagcttccacgatgaggcgccctctttacctatcctctcaatcactactcttcttgaagcactattatttattcttccgctgtctgcctgcagcagtactactgtcaacatagtgtaaatggttctcaaaagcttaccagtgtggacttggtgttagccacgctgtttactcatacagtacgggcccggcttaaatttccattttcttacataataacctgttcctctcttctcaaaaaaaacccgggcttt

SEQ ID NO: 276344 - DNA, 2012 bp, Homo sapiens
aactatcggcttaggtcgaggccgggggtgaactcctggatatgatgattgctgaagaggaaagcctgaaggaaagactcatcaaaagcatatccgtctgtcagaaagagctgaacactctgtgcagcgagttacatgttgagccatttcaggaagaaggagagacgaccatcttgcaactagaaaaagatttgcgcacccaagtggaattgatgcgaaaacagaaaaaggagagaaaacaggaactgaagctacttcaagagcaagatcaagaactgtgcgaaattctttgtatgccccactatgatattgacagtgcctcagtgcccagcttagaagagctgaaccagttcaggcaacatgtgacaactttgagggaaacaaaggcttctaggcgtgaggagtttgtcagtataaagagacagatcatactgtgtatggaagaattagaccacaccccagacacaagctttgaaagagatgtggtgtgtgaagacgaagatgccttttgtttgtctttggagaatattgcaacactacaaaagttgctacggcagctggaaatgcagaaatcacaaaatgaagcagtgtgtgaggggctgcgtactcaaatccgagagctctgggacaggttgcaaatacctgaagaagaaagagaagctgtggccaccattatgtctgggtcaaaggccaaggtccggaaagcgctgcaattagaagtggatcggttggaagaactgaaaatgcaaaacatgaagaaagtgattgaggcaattcgagtggagctggttcagtactgggaccagtgcttttatagccaggagcagagacaagcttttgcccctttctgtgctgaggactacacagaaagtctgctccagctccacgatgctgagattgtgcggttaaaaaactactatgaagttcacaaggaactctttgaaggtgtccagaagtgggaagaaacctggaggcttttcttagagtttgagagaaaagcttcagatccaaatcgatttacaaaccgaggaggaaatcttctaaaagaagaaaaacaacgagccaagctccagaaaatgctgcccaagctggaagaagagttgaaggcacgaattgaattgtgggaacaggaacattcaaaggcatttatggtgaatgggcagaaattcatggagtatgtggcagaacaatgggagatgcatcgattggagaaagagagagccaagcaggaaagacaactgaagaacaaaaaacagacagagacagagatgctgtatggcagcgctcctcgaacacctagcaagcggcgaggactggctcccaatacaccgggcaaagcacgtaagctgaacactaccaccatgtccaatgctacggccaatagtagcattcggcctatctttggagggacagtctaccactcccccgtgtctcgacttcctccttctggcagcaagccagtcgctgcttccacctgttcagggaagaaaacaccccgtactggcaggcatggagccaacaaggagaacctggagctcaacggcagcatcctgagtggtgggtaccctggctcggcccccctccagcgcaacttcagcattaattctgttgccactctattctcagctagctaatgctgatttcctcacctttgcctctttccatacattgagctactgaagcatagatgaagcactggaagcaagtttttccagaatgctcttcacttcctagtatcctactctatatttgctaacacctaactacactgccttttacttaatctgtgatttctttctcaatcactactcttcttgaagcactattatttattcttccgctgtctgcctgcagcagtactactgtcaacatagtgtaaatggttctcaaaagcttaccagtgtggacttggtgttagccacgctgtttactcatacagtacgtgtcctgtttttaaaatatacaattattcttaaaaataaattaaaatctgtatacttacatttcaaaaa

SEQ ID NO: 276345 - DNA, 1816 bp, Homo sapiens
aactatcggcttaggtcgaggccgggggtgaactcctggatatgatgattgctgaagaggaaagcctgaaggaaagactcatcaaaagcatatccgtctgtcagaaagagctgaacactctgtgcagcgagttacatgttgagccatttcaggaagaaggagagacgaccatcttgcaactagaaaaagatttgcgcacccaagtggaattgatgcgaaaacagaaaaaggagagaaaacaggaactgaagctacttcaagagcaagatcaagaactgtgcgaaattctttgtatgccccactatgatattgacagtgcctcagtgcccagcttagaagagctgaaccagttcaggcaacatgtgacaactttgagggaaacaaaggcttctaggcgtgaggagtttgtcagtataaagagacagatcatactgtgtatggaagaattagaccacaccccagacacaagctttgaaagagatgtggtgtgtgaagacgaagatgccttttgtttgtctttggagaatattgcaacactacaaaagttgctacggcagctggaaatgcagaaatcacaaaatgaagcagtgtgtgaggggctgcgtactcaaatccgagagctctgggacaggttgcaaatacctgaagaagaaagagaagctgtggccaccattatgtctgggtcaaaggccaaggtccggaaagcgctgcaattagaagtggatcggttggaagaactgaaaatgcaaaacatgaagaaagtgattgaggcaattcgagtggagctggttcagtactgggaccagtgcttttatagccaggagcagagacaagcttttgcccctttctgtgctgaggactacacagaaagtctgctccagctccacgatgctgagattgtgcggttaaaaaactactatgaagttcacaaggaactctttgaaggtgtccagaagtgggaagaaacctggaggcttttcttagagtttgagagaaaagcttcagatccaaatcgatttacaaaccgaggaggaaatcttctaaaagaagaaaaacaacgagccaagctccagaaaatgctgcccaagctggaagaagagttgaaggcacgaattgaattgtgggaacaggaacattcaaaggcatttatggtgaatgggcagaaattcatggagtatgtggcagaacaatgggagatgcatcgattggagaaagagagagccaagcaggaaagacaactgaagaacaaaaaacagacagagacagagatgctgtatggcagcgctcctcgaacacctagcaagcggcgaggactggctcccaatacaccgggcaaagcacgtaagctgaacactaccaccatgtccaatgctacggccaatagtagcattcggcctatctttggagggacagtctaccactcccccgtgtctcgacttcctccttctggcagcaagccagtcgctgcttccacctgttcagggaagaaaacaccccgtactggcaggcatggagccaacaaggagaacctggagctcaacggcagcatcctgagcgagaactttcaaaggcttccaaatctgatgctacttctggaatctctcaatcactactcttcttgaagcactattatttattcttccgctgtctgcctgcagcagtactactgtcaacatagtgtaaatggttctcaaaagcttaccagtgtggacttggtgttagccacgctgtttactcatacagtacgtgtcctgtttttaaaatatacaattattcttaaaaataaattaaaatctgtatacttacatttcaaaaa

SEQ ID NO: 276346 - DNA, 988 bp, Homo sapiens
aactatcggcttaggtcgaggccgggggtgaactcctggatatgatgattgctgaagaggaaagcctgaaggaaagactcatcaaaagcatatccgtctgtcagaaagagctgaacactctgtgcagcgagttacatgttgagccatttcaggaagaaggagagacgaccatcttgcaactagaaaaagatttgcgcacccaagtggaattgatgcgaaaacagaaaaaggagagaaaacaggaactgaagctacttcaagagcaagatcaagaactgtgcgaaattctttgtatgccccactatgatattgacagtgcctcagtgcccagcttagaagagctgaaccagttcaggcaacatgtgacaactttgagggaaacaaaggcttctaggcgtgaggagtttgtcagtataaagagacagatcatactgtgtatggaagaattagaccacaccccagacacaagctttgaaagagatgtggtgtgtgaagacgaagatgccttttgtttgtctttggagaatattgcaacactacaaaagttgctacggcagctggaaatgcagaaatcacaaaatgaagcagtgtgtgaggggctgcgtactcaaatccgagagctctgggacaggttgcaaatacctgaagaagaaagagaagctgtggccaccattatgtctgggtcaaaggccaaggtccggaaagcgctgcaattagaagtggatcggttggaagaactgaaaatgcaaaacatgaagaaagtgattgaggcaattcgagtggagctggttcagtactgggaccagtgcttttatagccaggagcagagacaagcttttgcccctttctgtgctgaggactacacagaaagtctgctccagctccacgatgctgagattgtgcggttaaaaaactactatgaagttcacaaggaactctttgaaggtgtccagaagtgggaagaaacctggaggcttttcttagagtt

SEQ ID NO: 276347 - DNA, 293 bp, Homo sapiens
aggaacattcaaaggcatttatggtgaatgggcagaaattcatggagtatgtggcagaacaatgggagatgcatcgattggagaaagagagagccaagcaggaaagagtaagtgtgaacgtgaacgcaaattgggaaaagacgaagaaagtaatctgagcagcccatagtctctgccggggaccagggtttgtggaacagggagccggggaccggggcttgtggaacgggaagccggggaccggggcttgtggaacggggagccggggaccggggcttgtggaacggggagcc

SEQ ID NO: 276348 - DNA, 496 bp, Homo sapiens
aaatgtatttttcacagagaaaagcttcagatccaaatcgatttacaaaccgaggaggaaatcttctaaaagaagaaaaacaacgagccaagctccagaaaatgctgcccaagctggaagaagagttgaaggcacgaattgaattgtgggaacaggaacattcaaaggcatttatggtgaatgggcagaaattcatggagtatgtggcagaacaatgggagatgcatcgattggagaaagagagagccaagcaggaaagacaactgaagaacaaaaaacagacagagacagagatgctgtatggcagcgctcctcgaacacctagcaagcggcgaggactggctcccaatacaccgggcaaagcacgtaaggtaaacacaaggcttagggaaacactgatttcaagggagtgggtgagggtagtcccagccacctctttgaagggggccagcccctccacacctgtgggtatttctcatcaggtgggacaagagac

SEQ ID NO: 276349 - DNA, 2797 bp, Homo sapiens
aactatcggcttaggtcgaggccgggggtgaactcctggatatgatgattgctgaagaggaaagcctgaaggaaagactcatcaaaagcatatccgtctgtcagaaagagctgaacactctgtgcagcgagttacatgttgagccatttcaggaagaaggagagacgaccatcttgcaactagaaaaagatttgcgcacccaagtggaattgatgcgaaaacagaaaaaggagagaaaacaggaactgaagctacttcaagagcaagatcaagaactgtgcgaaattctttgtatgccccactatgatattgacagtgcctcagtgcccagcttagaagagctgaaccagttcaggcaacatgtgacaactttgagggaaacaaaggcttctaggcgtgaggagtttgtcagtataaagagacagatcatactgtgtatggaagaattagaccacaccccagacacaagctttgaaagagatgtggtgtgtgaagacgaagatgccttttgtttgtctttggagaatattgcaacactacaaaagttgctacggcagctggaaatgcagaaatcacaaaatgaagcagtgtgtgaggggctgcgtactcaaatccgagagctctgggacaggttgcaaatacctgaagaagaaagagaagctgtggccaccattatgtctgggtcaaaggccaaggtccggaaagcgctgcaattagaagtggatcggttggaagaactgaaaatgcaaaacatgaagaaagtgattgaggcaattcgagtggagctggttcagtactgggaccagtgcttttatagccaggagcagagacaagcttttgcccctttctgtgctgaggactacacagaaagtctgctccagctccacgatgctgagattgtgcggttaaaaaactactatgaagttcacaaggaactctttgaaggtgtccagaagtgggaagaaacctggaggcttttcttagagtttgagagaaaagcttcagatccaaatcgatttacaaaccgaggaggaaatcttctaaaagaagaaaaacaacgagccaagctccagaaaatgctgcccaagctggaagaagagttgaaggcacgaattgaattgtgggaacaggaacattcaaaggcatttatggtgaatgggcagaaattcatggagtatgtggcagaacaatgggagatgcatcgattggagaaagagagagccaagcaggaaagacaactgaagaacaaaaaacagacagagacagagatgctgtatggcagcgctcctcgaacacctagcaagcggcgaggactggctcccaatacaccgggcaaagcacgtaagctgaacactaccaccatgtccaatgctacggccaatagtagcattcggcctatctttggagggacagtctaccactcccccgtgtctcgacttcctccttctggcagcaagccagtcgctgcttccacctgttcagggaagaaaacaccccgtactggcaggcatggagccaacaaggagaacctggagctcaacggcagcatcctgagtggtgggtaccctggctcggcccccctccagcgcaacttcagcattaattctgttgccagcacctattctgagtttgcgcgagaactttcaaaggcttccaaatctgatgctacttctggaatcctcaattcaaccaacatccagtcctgagaagccctgatcagtcaaccagctgtggcttcctgtgcctagactggacctaattatatgggggtgactttagtttttcttcagcttaggcgtgcttgaaaccttggccaggttccatgaccatgggcctaacttaaagatgtgaatgagtgttacagttgaaagcccatcataggtttagtggtcctaggagacttggttttgacttatatacatgaaaagtttatggcaagaagtgcaaattttagcatatggggcctgacttctctaccacataattctacttgctgaagcatgatcaaagcttgttttatttcaccactgtaggaaaatgattgactatgcccatccctgggggtaattttggcatgtatacctgtaactagtaattaacatcttttttgtttaggcatgttcaattaatgctgtagctatcatagctttgctcttacctgaagccttgtccccaccacacaggacagccttcctcctgaagagaatgtctttgtgtgtccgaagttgagatggcctgccctactgccaaagaggtgacaggaaggctgggagcagctttgttaaattgtgttcagttctgttacacagtgcattgccctttgttgggggtatgcatgtatgaacacacatgcttgtcggaacgctttctcggcgtttgtcccttggctctcatctcccccattcctgtgcctactttgcctgagttcttctacccccgcagttgccagccacattgggagtctgtttgttccaatgggttgagctgtctttgtcgtggagatctggaactttgcacatgtcactactggggaggtgttcctgctctagcttccacgatgaggcgccctctttacctatcctctcaatcactactcttcttgaagcactattatttattcttccgctgtctgcctgcagcagtactactgtcaacatagtgtaaatggttctcaaaagcttaccagtgtggacttggtgttagccacgctgtttactcatacagtacgtgtcctgtttttaaaatatacaattattcttaaaaataaattaaaatctgtatacttacatttcaaaaa

SEQ ID NO: 276350 - DNA, 4148 bp, Homo sapiens
aactatcggcttaggtcgaggccgggggtgaactcctggatatgatgattgctgaagaggaaagcctgaaggaaagactcatcaaaagcatatccgtctgtcagaaagagctgaacactctgtgcagcgagttacatgttgagccatttcaggaagaaggagagacgaccatcttgcaactagaaaaagatttgcgcacccaagtggaattgatgcgaaaacagaaaaaggagagaaaacaggaactgaagctacttcaagagcaagatcaagaactgtgcgaaattctttgtatgccccactatgatattgacagtgcctcagtgcccagcttagaagagctgaaccagttcaggcaacatgtgacaactttgagggaaacaaaggcttctaggcgtgaggagtttgtcagtataaagagacagatcatactgtgtatggaagaattagaccacaccccagacacaagctttgaaagagatgtggtgtgtgaagacgaagatgccttttgtttgtctttggagaatattgcaacactacaaaagttgctacggcagctggaaatgcagaaatcacaaaatgaagcagtgtgtgaggggctgcgtactcaaatccgagagctctgggacaggttgcaaatacctgaagaagaaagagaagctgtggccaccattatgtctgggtcaaaggccaaggtccggaaagcgctgcaattagaagtggatcggttggaagaactgaaaatgcaaaacatgaagaaagtgattgaggcaattcgagtggagctggttcagtactgggaccagtgcttttatagccaggagcagagacaagcttttgcccctttctgtgctgaggactacacagaaagtctgctccagctccacgatgctgagattgtgcggttaaaaaactactatgaagttcacaaggaactctttgaaggtgtccagaagtgggaagaaacctggaggcttttcttagagtttgagagaaaagcttcagatccaaatcgatttacaaaccgaggaggaaatcttctaaaagaagaaaaacaacgagccaagctccagaaaatgctgcccaagctggaagaagagttgaaggcacgaattgaattgtgggaacaggaacattcaaaggcatttatggtgaatgggcagaaattcatggagtatgtggcagaacaatgggagatgcatcgattggagaaagagagagccaagcaggaaagacaactgaagaacaaaaaacagacagagacagagatgctgtatggcagcgctcctcgaacacctagcaagcggcgaggactggctcccaatacaccgggcaaagcacgtaagctgaacactaccaccatgtccaatgctacggccaatagtagcattcggcctatctttggagggacagtctaccactcccccgtgtctcgacttcctccttctggcagcaagccagtcgctgcttccacctgttcaggtggtgggtaccctggctcggcccccctccagcgcaacttcagcattaattctgttgccactctattctcagctagctaatgctgatttcctcacctttgcctctttccatacattgagctactgaagcatagatgaagcactggaagcaagtttttccagaatgctcttcacttcctagtatcctactctatatttgctaacacctaactacactgccttttacttaatctgtgatttcttctctcaatattttactagcaagaggagaggatgttcctcacccttgaggggatattgagttaaacccctagcctgcctcccctcttaattgctgcagggatagagaatggaacagttggccaaggctgcagctagttttgatcactgaaactggcttcctactccagcatgtttttcaaattacgtggctggtggtgcttctacctttaaaagtgggtgtgtgtcactctggctgattgctggacagaggtccagctttctctttttcgcttgttcaaccaaggcccattttatctgaggcttaaatgtacctgcctatctgtgtggctagtcctaggtaggttcgtctggtttgggttgctatggctgatagactccaccaggcagcaccaaagccggtaaactaacctctgctaatatctgtctttctcaatagccattcatgctttatcttttgctgctctaccatgtgctccagcatgagatcaaatcaccagcaggttacaaggcctcagcccagggattggtagatatatgttctggcccattgttttataaagggctcaagagaccaaagcttgttgcctacttaccttgacaactctaaagtagctctgtgaagtagagtcatgcctcgcttaatgacagggatatgttctgagaatgtggggcaatttcattgtgcacatatcagagtgtacttaacagtcctagacagaacagcctacacacctaaactatatggtatggcgttttcctcctaggctacaaacctgggcagcatgttacaggaaagaatactgtaggcaattgtgggttttttttgattcaggctattcctgggatactgtaggcaattgtaacgcaatggtaagtatttgtgtatctaaacatagaaaaggtacagtaaaaatatggtataatcttatgggaccaccatagtgtatgtggcctgtcgttaactgaaacatcattatgcagtgcatgactgtatgaaggatttctcttctgtgaggtgtaacagaatggactggctgaggaaaaaggggtcacgggcatgcgtgcacatgcactctgtctgtgactaatagaatggtgctcagagttcctcaccttttactcctaacgcagcctattgcaggctagggatctcagagaaactaccttcaagggaccttttgctgacacttaaccaaacttagaagggtgggccatgtgtaagagaggcagtatggccactgatgttatttatttttcaacacgagaactttcaaaggcttccaaatctgatgctacttctggaatcctcaattcaaccaacatccagtcctgagaagccctgatcagtcaaccagctgtggcttcctgtgcctagactggacctaattatatgggggtgactttagtttttcttcagcttaggcgtgcttgaaaccttggccaggttccatgaccatgggcctaacttaaagatgtgaatgagtgttacagttgaaagcccatcataggtttagtggtcctaggagacttggttttgacttatatacatgaaaagtttatggcaagaagtgcaaattttagcatatggggcctgacttctctaccacataattctacttgctgaagcatgatcaaagcttgttttatttcaccactgtaggaaaatgattgactatgcccatccctgggggtaattttggcatgtatacctgtaactagtaattaacatcttttttgtttaggcatgttcaattaatgctgtagctatcatagctttgctcttacctgaagccttgtccccaccacacaggacagccttcctcctgaagagaatgtctttgtgtgtccgaagttgagatggcctgccctactgccaaagaggtgacaggaaggctgggagcagctttgttaaattgtgttcagttctgttacacagtgcattgccctttgttgggggtatgcatgtatgaacacacatgcttgtcggaacgctttctcggcgtttgtcccttggctctcatctcccccattcctgtgcctactttgcctgagttcttctacccccgcagttgccagccacattgggagtctgtttgttccaatgggttgagctgtctttgtcgtggagatctggaactttgcacatgtcactactggggaggtgttcctgctctagcttccacgatgaggcgccctctttacctatcctctcaatcactactcttcttgaagcactattatttattcttccgctgtctgcctgcagcagtactactgtcaacatagtgtaaatggttctcaaaagcttaccagtgtggacttggtgttagccacgctgtttactcatacagtacgtgtcctgtttttaaaatatacaattattcttaaaaataaattaaaatctgtatacttacatttcaaaaa

SEQ ID NO: 276351 - DNA, 4555 bp, Homo sapiens
aactatcggcttaggtcgaggccgggggtgaactcctggatatgatgattgctgaagaggaaagcctgaaggaaagactcatcaaaagcatatccgtctgtcagaaagagctgaacactctgtgcagcgagttacatgttgagccatttcaggaagaaggagagacgaccatcttgcaactagaaaaagatttgcgcacccaagtggaattgatgcgaaaacagaaaaaggagagaaaacaggaactgaagctacttcaagagcaagatcaagaactgtgcgaaattctttgtatgccccactatgatattgacagtgcctcagtgcccagcttagaagagctgaaccagttcaggcaacatgtgacaactttgagggaaacaaaggcttctaggcgtgaggagtttgtcagtataaagagacagatcatactgtgtatggaagaattagaccacaccccagacacaagctttgaaagagatgtggtgtgtgaagacgaagatgccttttgtttgtctttggagaatattgcaacactacaaaagttgctacggcagctggaaatgcagaaatcacaaaatgaagcagtgtgtgaggggctgcgtactcaaatccgagagctctgggacaggttgcaaatacctgaagaagaaagagaagctgtggccaccattatgtctgggtcaaaggccaaggtccggaaagcgctgcaattagaagtggatcggttggaagaactgaaaatgcaaaacatgaagaaagtgattgaggcaattcgagtggagctggttcagtactgggaccagtgcttttatagccaggagcagagacaagcttttgcccctttctgtgctgaggactacacagaaagtctgctccagctccacgatgctgagattgtgcggttaaaaaactactatgaagttcacaaggaactctttgaaggtgtccagaagtgggaagaaacctggaggcttttcttagagtttgagagaaaagcttcagatccaaatcgatttacaaaccgaggaggaaatcttctaaaagaagaaaaacaacgagccaagctccagaaaatgctgcccaagctggaagaagagttgaaggcacgaattgaattgtgggaacaggaacattcaaaggcatttatggtgaatgggcagaaattcatggagtatgtggcagaacaatgggagatgcatcgattggagaaagagagagccaagcaggaaagacaactgaagaacaaaaaacagacagagacagagatgctgtatggcagcgctcctcgaacacctagcaagcggcgaggactggctcccaatacaccgggcaaagcacgtaagctgaacactaccaccatgtccaatgctacggccaatagtagcattcggcctatctttggagggacagtctaccactcccccgtgtctcgacttcctccttctggcagcaagccagtcgctgcttccacctgttcagggaagaaaacaccccgtactggcaggcatggagccaacaaggagaacctggagctcaacggcagcatcctgagtggtgggtaccctggctcggcccccctccagcgcaacttcagcattaattctgttgccactctattctcagctagctaatgctgatttcctcacctttgcctctttccatacattgagctactgaagcatagatgaagcactggaagcaagtttttccagaatgctcttcacttcctagtatcctactctatatttgctaacacctaactacactgccttttacttaatctgtgatttcttctctcaatattttactagcaagaggagaggatgttcctcacccttgaggggatattgagttaaacccctagcctgcctcccctcttaattgctgcagggatagagaatggaacagttggccaaggctgcagctagttttgatcactgaaactggcttcctactccagcatgtttttcaaattacgtggctggtggtgcttctacctttaaaagtgggtgtgtgtcactctggctgattgctggacagaggtccagctttctctttttcgcttgttcaaccaaggcccattttatctgaggcttaaatgtacctgcctatctgtgtggctagtcctaggtaggttcgtctggtttgggttgctatggctgatagactccaccaggcagcaccaaagccggtaaactaacctctgctaatatctgtctttctcaatagccattcatgctttatcttttgctgctctaccatgtgctccagcatgagatcaaatcaccagcaggttacaaggcctcagcccagggattggtagatatatgttctggcccattgttttataaagggctcaagagaccaaagcttgttgcctacttaccttgacaactctaaagtagctctgtgaagtagagtcatgcctcgcttaatgacagggatatgttctgagaatgtggggcaatttcattgtgcacatatcagagtgtacttaacagtcctagacagaacagcctacacacctaaactatatggtatggcgttttcctcctaggctacaaacctgggcagcatgttacaggaaagaatactgtaggcaattgtgggttttttttgattcaggctattcctgggatactgtaggcaattgtaacgcaatggtaagtatttgtgtatctaaacatagaaaaggtacagtaaaaatatggtataatcttatgggaccaccatagtgtatgtggcctgtcgttaactgaaacatcattatgcagtgcatgactgtatgaaggatttctcttctgtgaggtgtaacagaatggactggctgaggaaaaaggggtcacgggcatgcgtgcacatgcactctgtctgtgactaatagaatggtgctcagagttcctcaccttttactcctaacgcagcctattgcaggctagggatctcagagaaactaccttcaagggaccttttgctgacacttaaccaaacttagaagggtgggccatgtgtaagagaggcagtatggccactgatgttatttatttttcaacacgagaactttcaaaggcttccaaatctgatgctacttctggaatcctcaattcaaccaacatccagtcctgagaagccctgatcagtcaaccagctgtggcttcctgtgcctagactggacctaattatatgggggtgactttagtttttcttcagcttaggcgtgcttgaaaccttggccaggttccatgaccatgggcctaacttaaagatgtgaatgagtgttacagttgaaagcccatcataggtttagtggtcctaggagacttggttttgacttatatacatgaaaagtttatggcaagaagtgcaaattttagcatatggggcctgacttctctaccacataattctacttgctgaagcatgatcaaagcttgttttatttcaccactgtaggaaaatgattgactatgcccatccctgggggtaattttggcatgtatacctgtaactagtaattaacatcttttttgtttaggcatgttcaattaatgctgtagctatcatagctttgctcttacctgaagccttgtccccaccacacaggacagccttcctcctgaagagaatgtctttgtgtgtccgaagttgagatggcctgccctactgccaaagaggtgacaggaaggctgggagcagctttgttaaattgtgttcagttctgttacacagtgcattgccctttgttgggggtatgcatgtatgaacacacatgcttgtcggaacgctttctcggcgtttgtcccttggctctcatctcccccattcctgtgcctactttgcctgagttcttctacccccgcagttgccagccacattgggagtctgtttgttccaatgggttgagctgtctttgtcgtggagatctggaactttgcacatgtcactactggggaggtgttcctgctctagcttccacgatgaggcgccctctttacctatcctctcaatcactactcttcttgaagcactattatttattcttccgctgtctgcctgcagcagtactactgtcaacatagtgtaaatggttctcaaaagcttaccagtgtggacttggtgttagccacgctgtttactcatacagtacgtgtcctgtttttaaaatatacaattattcttaaaaataaattaaaatctgtatacttacatttcaaaaaaaaaaaaaaacgaaaatgtaaaaaaaaaaagggggggggggtgataaaatactccctcgggggcaccaaaggtaacgcgtgaccgcggtttttttgtacaagggggggcccaaataggggggcgggaataaaaacgaaaggacagggagggggtaacaaacggcggtgggggaaaaatggtacgtgtggacttggggaagggaccctacttgtgggcgggcgcattgcggaccacaccaaaagggattagcgcctagggacataacatctacgtgtgttggcacacgcgatttcgtggtaagtggtcgggtgatgatgtggcggtagcactttcg

SEQ ID NO: 276352 - DNA, 4201 bp, Homo sapiens
  misc_feature (4169)..(4169): n is a, c, g, or t
aactatcggcttaggtcgaggccgggggtgaactcctggatatgatgattgctgaagaggaaagcctgaaggaaagactcatcaaaagcatatccgtctgtcagaaagagctgaacactctgtgcagcgagttacatgttgagccatttcaggaagaaggagagacgaccatcttgcaactagaaaaagatttgcgcacccaagtggaattgatgcgaaaacagaaaaaggagagaaaacaggaactgaagctacttcaagagcaagatcaagaactgtgcgaaattctttgtatgccccactatgatattgacagtgcctcagtgcccagcttagaagagctgaaccagttcaggcaacatgtgacaactttgagggaaacaaaggcttctaggcgtgaggagtttgtcagtataaagagacagatcatactgtgtatggaagaattagaccacaccccagacacaagctttgaaagagatgtggtgtgtgaagacgaagatgccttttgtttgtctttggagaatattgcaacactacaaaagttgctacggcagctggaaatgcagaaatcacaaaatgaagcagtgtgtgaggggctgcgtactcaaatccgagagctctgggacaggttgcaaatacctgaagaagaaagagaagctgtggccaccattatgtctgggtcaaaggccaaggtccggaaagcgctgcaattagaagtggatcggttggaagaactgaaaatgcaaaacatgaagaaagtgattgaggcaattcgagtggagctggttcagtactgggaccagtgcttttatagccaggagcagagacaagcttttgcccctttctgtgctgaggactacacagaaagtctgctccagctccacgatgctgagattgtgcggttaaaaaactactatgaagttcacaaggaactctttgaaggtgtccagaagtgggaagaaacctggaggcttttcttagagtttgagagaaaagcttcagatccaaatcgatttacaaaccgaggaggaaatcttctaaaagaagaaaaacaacgagccaagctccagaaaatgctgcccaagctggaagaagagttgaaggcacgaattgaattgtgggaacaggaacattcaaaggcatttatggtgaatgggcagaaattcatggagtatgtggcagaacaatgggagatgcatcgattggagaaagagagagccaagcaggaaagacaactgaagaacaaaaaacagacagagacagagatgctgtatggcagcgctcctcgaacacctagcaagcggcgaggactggctcccaatacaccgggcaaagcacgtaagctgaacactaccaccatgtccaatgctacggccaatagtagcattcggcctatctttggagggacagtctaccactcccccgtgtctcgacttcctccttctggcagcaagccagtcgctgcttccacctgttcagggaagaaaacaccccgtactggcaggcatggagccaacaaggagaacctggagctcaacggcagcatcctgagtggtgggtaccctggctcggcccccctccagcgcaacttcagcattaattctgttgccactctattctcagctagctaatgctgatttcctcacctttgcctctttccatacattgagctactgaagcatagatgaagcactggaagcaagtttttccagaatgctcttcacttcctagtatcctactctatatttgctaacacctaactacactgccttttacttaatctgtgatttcttctctcaatattttactagcaagaggagaggatgttcctcacccttgaggggatattgagttaaacccctagcctgcctcccctcttaattgctgcagggatagagaatggaacagttggccaaggctgcagctagttttgatcactgaaactggcttcctactccagcatgtttttcaaattacgtggctggtggtgcttctacctttaaaagtgggtgtgtgtcactctggctgattgctggacagaggtccagctttctctttttcgcttgttcaaccaaggcccattttatctgaggcttaaatgtacctgcctatctgtgtggctagtcctaggtaggttcgtctggtttgggttgctatggctgatagactccaccaggcagcaccaaagccggtaaactaacctctgctaatatctgtctttctcaatagccattcatgctttatcttttgctgctctaccatgtgctccagcatgagatcaaatcaccagcaggttacaaggcctcagcccagggattggtagatatatgttctggcccattgttttataaagggctcaagagaccaaagcttgttgcctacttaccttgacaactctaaagtagctctgtgaagtagagtcatgcctcgcttaatgacagggatatgttctgagaatgtggggcaatttcattgtgcacatatcagagtgtacttaacagtcctagacagaacagcctacacacctaaactatatggtatggcgttttcctcctaggctacaaacctgggcagcatgttacaggaaagaatactgtaggcaattgtgggttttttttgattcaggctattcctgggatactgtaggcaattgtaacgcaatggtaagtatttgtgtatctaaacatagaaaaggtacagtaaaaatatggtataatcttatgggaccaccatagtgtatgtggcctgtcgttaactgaaacatcattatgcagtgcatgactgtatgaaggatttctcttctgtgaggtgtaacagaatggactggctgaggaaaaaggggtcacgggcatgcgtgcacatgcactctgtctgtgactaatagaatggtgctcagagttcctcaccttttactcctaacgcagcctattgcaggctagggatctcagagaaactaccttcaagggaccttttgctgacacttaaccaaacttagaagggtgggccatgtgtaagagaggcagtatggccactgatgttatttatttttcaacacgagaactttcaaaggcttccaaatctgatgctacttctggaatcctcaattcaaccaacatccagtcctgagaagccctgatcagtcaaccagctgtggcttcctgtgcctagactggacctaattatatgggggtgactttagtttttcttcagcttaggcgtgcttgaaaccttggccaggttccatgaccatgggcctaacttaaagatgtgaatgagtgttacagttgaaagcccatcataggtttagtggtcctaggagacttggttttgacttatatacatgaaaagtttatggcaagaagtgcaaattttagcatatggggcctgacttctctaccacataattctacttgctgaagcatgatcaaagcttgttttatttcaccactgtaggaaaatgattgactatgcccatccctgggggtaattttggcatgtatacctgtaactagtaattaacatcttttttgtttaggcatgttcaattaatgctgtagctatcatagctttgctcttacctgaagccttgtccccaccacacaggacagccttcctcctgaagagaatgtctttgtgtgtccgaagttgagatggcctgccctactgccaaagaggtgacaggaaggctgggagcagctttgttaaattgtgttcagttctgttacacagtgcattgccctttgttgggggtatgcatgtatgaacacacatgcttgtcggaacgctttctcggcgtttgtcccttggctctcatctcccccattcctgtgcctactttgcctgagttcttctacccccgcagttgccagccacattgggagtctgtttgttccaatgggttgagctgtctttgtcgtggagatctggaactttgcacatgtcactactggggaggtgttcctgctctagcttccacgatgaggcgccctctttacctatcctctcaatcactactcttcttgaagcactattatttattcttccgctgtctgcctgcagcagtactactgtcaacatagtgtaaatggttctcaaaagcttaccagtgtggacttggtgttagccactgttatcaacattacggcggtataaaaaaacatataccngaagaatcatactctaacctcttttttttttc

SEQ ID NO: 276353 - DNA, 1824 bp, Homo sapiens
aactatcggcttaggtcgaggccgggggtgaactcctggatatgatgattgctgaagaggaaagcctgaaggaaagactcatcaaaagcatatccgtctgtcagaaagagctgaacactctgtgcagcgagttacatgttgagccatttcaggaagaaggagagacgaccatcttgcaactagaaaaagatttgcgcacccaagtggaattgatgcgaaaacagaaaaaggagagaaaacaggaactgaagctacttcaagagcaagatcaagaactgtgcgaaattctttgtatgccccactatgatattgacagtgcctcagtgcccagcttagaagagctgaaccagttcaggcaacatgtgacaactttgagggaaacaaaggcttctaggcgtgaggagtttgtcagtataaagagacagatcatactgtgtatggaagaattagaccacaccccagacacaagctttgaaagagatgtggtgtgtgaagacgaagatgccttttgtttgtctttggagaatattgcaacactacaaaagttgctacggcagctggaaatgcagaaatcacaaaatgaagcagtgtgtgaggggctgcgtactcaaatccgagagctctgggacaggttgcaaatacctgaagaagaaagagaagctgtggccaccattatgtctgggtcaaaggccaaggtccggaaagcgctgcaattagaagtggatcggttggaagaactgaaaatgcaaaacatgaagaaagtgattgaggcaattcgagtggagctggttcagtactgggaccagtgcttttatagccaggagcagagacaagcttttgcccctttctgtgctgaggactacacagaaagtctgctccagctccacgatgctgagattgtgcggttaaaaaactactatgaagttcacaaggaactctttgaaggtgtccagaagtgggaagaaacctggaggcttttcttagagtttgagagaaaagcttcagatccaaatcgatttacaaaccgaggaggaaatcttctaaaagaagaaaaacaacgagccaagctccagaaaatgctgcccaagctggaagaagagttgaaggcacgaattgaattgtgggaacaggaacattcaaaggcatttatggtgaatgggcagaaattcatggagtatgtggcagaacaatgggagatgcatcgattggagaaagagagagccaagcaggaaagacaactgaagaacaaaaaacagacagagacagagatgctgtatggcagcgctcctcgaacacctagcaagcggcgaggactggctcccaatacaccgggcaaagcacgtaagctgaacactaccaccatgtccaatgctacggccaatagtagcattcggcctatctttggagggacagtctaccactccccccattcctgtgcctactttgcctgagttcttctacccccgcagttgccagccacattgggagtctgtttgttccaatgggttgagctgtctttgtcgtggagatctggaactttgcacatgtcactactggggaggtgttcctgctctagcttccacgatgaggcgccctctttacctatcctctcaatcactactcttcttgaagcactattatttattcttccgctgtctgcctgcagcagtactactgtcaacatagtgtaaatggttctcaaaagcttaccagtgtggacttggtgttagccacgctgtttactcatacagtacgtgtcctgtttttaaaatatacaattattcttaaaaataaattaaaatctgtatacttacatttcaaaaa

SEQ ID NO: 276354 - DNA, 995 bp, Homo sapiens
cagtactctcacggtttaaggtagcgaggctgggtggaactcctggatatgatgattgctgaagaggaaagcctgaaggaaagactcatcaaaagcatatccgtctgtcagaaagagctgaacactctgtgcagcgagttacatgttgagccatttcaggaagaaggagagacgaccatcttgcaactagaaaaagatttgcgcacccaagtggaattgatgcgaaaacagaaaaaggagagaaaacaggaactgaagctacttcaagagcaagatcaagaactgtgcgaaattctttgtatgccccactatgatattgacagtgcctcagtgcccagcttagaagagctgaaccagttcaggcaacatgtgacaactttgagggaaacaaaggcttctaggcgtgaggagtttgtcagtataaagagacagatcatactgtgtatggaagaattagaccacaccccagacacaagctttgaaagagatgtggtgtgtgaagacgaagatgccttttgtttgtctttggagaatattgcaacactacaaaagttgctacggcagctggaaatgcagaaatcacaaaatgaagcagtgtgtgaggggctgcgtactcaaatccgagagctctgggacaggttgcaaatacctgaagaagaaagagaagctgtggccaccattatgtctgggtcaaaggccaaggtccggaaagcgctgcaattagaagtggatcggttggaagaactgaaaatgcaaaacatgaagaaagtgattgaggcaattcgagtggagctggttcagtactgggaccagtgcttttatagccaggagcagagacaagcttttgcccctttctgtgctgaggactacacagaaagtctgctccagctccacgatgctgagattgtgcggttaaaaaactactatgaagttcacaaggaactctttgaaggtgtccagaagtgggaagaaacctggaggcttttcttagagtt

SEQ ID NO: 276355 - DNA, 158 bp, Homo sapiens
tttctttctcctcagttttttgtaaaagtttcagaaaaaatggtgttaattcttcttcagatatttggtagaattcactggcaaagccatcgagtctaggatctactctttctttctttctttctttctctctctctctcccccctctcctccctccc

SEQ ID NO: 276356 - DNA, 393 bp, Homo sapiens
tctcttgcctcagcttccccagtagctgggactacaagtgcacaccaccacacccagccaatttttgtgtttttagtagagacagggttttgccatgttggccaggctggtctcgaattcctgacctaaagtgacccacccaccttggcctcccaaagtgctgggattacaggcgtgagccaccacacccagctgcggaaggagttttgagatgggcagctgaggtggggagtcctcagaataagtacatgagtaccgtgaggctgcagaatctcctttctccctggaatcctttccctgtcagcagtatttctgatatggagcaaaacagcctctttcagaattggttcctgagcttaccccaatgacagtgtctttcctggaaccatttca

SEQ ID NO: 276357 - DNA, 864 bp, Homo sapiens
ccatgtgctgatgagaataatgtatcttctgtagtttttggacaaaatgtcctgtaaatgtctgttaggtccatttggtctaatgtccagtttaaatcctgtttctttattgattttctgtctagatgatctgtctaactcttaaagtagagtgttgaagtcccccactattattgcattggagtctatttttctctttagatctagctatatttgctttgtaaatctgggtgcaccagtgtttggtgcatacttatttagaattgttatttcttcttgttggattgatctctttgccattatttagtgacttttttatttcatttttttactgtttttctcttaaggtttgttttatctgatttaagtatagtttttcctgcttgctttgtcttgctttgcatctttgtcttccatttgtgtgaaatactttttccttctttttacttgagtctatatgtgttttgcaggtaaagtatgtttcttgtaggaagcatataattggatcatgcttctttatccatttagccagtctacatatttttaagtggagaatttaatcatttacattcagagttatggctgatatgtaaggctttgttcttatcatattgttaatttttttctggttgttttgtatattcttagttcctttcctttttttctattgtcttcgtggtttggtgattatgtataatggtaccatttgagttatttctctttctcatttgtgtgtttgctttactgttgaatttatacttttatgtgttttcatgatggcaaatgttgtcctttcagcttcaaattcccctgagcatttcctgtagaccagcctagtggtgatgaatactctcagcatttgct

SEQ ID NO: 276358 - DNA, 426 bp, Homo sapiens
ctctgtcacccaggctagagtgccacccaggctggagtacagtggtgtgattatggttcactgcagccttgaattcccaggctcaagtgatcctcctgccacagcctcccgagtagctgggactacaggtatgacccaccatgcctggctaattttttttttaattatttgtatttttagtagagacagggtttcatcatgttggccaggctgctcttgaactcctaacctcaggtgatccacccgcctcggcctcccaaagtgctgtgattataggcttgagccaccacgcctggcctgttagtgagttacttctctgtcttgcctccctttactgtgagttgcctgatggcagaacctgtgtttttattttggtatttcatgagctagctgtttggtcaaatgaataagtgaatgaagcatttc

SEQ ID NO: 276359 - DNA, 267 bp, Homo sapiens
gtgattctcctgccttggcctcccaagtagctaggactacaagcacatgccaccacacccagttaatttttaattttttgttgtagagaggtgagtcttgctatgttgcccaggctggtcatgaattcctggcttcgagggatcctcttgtctcagcctcactccactgtttataactctcagtgccttcccatctcagagctgatgccaagacatcccagtgcatatctggccatccctcgcactctttacctttccaccctccta

SEQ ID NO: 276360 - DNA, 759 bp, Homo sapiens
atggttaaaactattattattgtcatcattatttaaccaacttggctttatgtgctaaaaaaaaaaaaatatatttagatcaagttacacaagcatgcttctcatcttcccaaagcttacaacataaaatgagcaataactatatgggcaattgcacaaaaaaagcaatatgctgacaagataacatatccattcaaatctgtttatgctgaaattttagtgagcgtgagcttgggtttattagtctgacccactgattaaatagcattatttgagtcataaactacaaaatcagaaaaccgctaagagatgatgagattaaaacattcaccaaacaagaaatatgtcaaggaagagtcaaaaactttggtaccagagaggctttatgctgctagatacactttttttaaatcaaaataccaacttaattgttaatggaatttttaattatctattacaatccgaactggctaaaacacatagttccttataagctcaaaccaaacatttaattaaacctaccaagcataagtggcatattttttatcctgtcccgtaagcagaagtgtcagaaaaggccttttactctttgttaattgaaaaataaataggtttccaggagaacagagtcatctctttagaacaattcatccaccatgcaattgtacaatttatatctattctaggtaccaacccttgccattgcttagtctgataattaggagtagaaactagaaataaataaaagcattattttta

SEQ ID NO: 276361 - DNA, 1646 bp, Homo sapiens
accctgctgcccctctgactctgaacgcaccacagggcgtcagactggagccccatgggggactgaacttggccccagaagagctataggttgctgtgaccgctgccacaaccatttgggtatcactgcccaaatcaggggccacaagcatttctgcctcttccaggcctgcgagtgtcacaattgtgccctcttctcatgagtatggtgtctgagatgcggaggggccagacctcctctaaatgggactaatcttagccctgctatcctttgcttcagagaacgcctcagggtcttgcctgctgtgagtgccttgaagagggagcagcgggcacgatcaaagagacacctggctcaaggaccaataaggagtatggctgcccctcccaaagctcccatccgtgtcaggaatttgaccatcagagcaggagccctcactgggaaggagaacaacatgctgcagcccgagacccacatcttcacagcccccgaggaggggagctcccaaggggctctgctgcttggccaggccccagaacctttgtctctgccctgtactccagtgaccttggagcagcaactggtttctccttctggggatccccacagggcccctgccctgcccagcatatgctcaactctgatcctccagccctgtgccacccttgaccctcttctactgcagccacaggtccccaaagtctctgaccaggctttggtttctgcccactcagagtggcagcggaagctggaggccgctgaggctctgctgactctgagaaactctgcccaggcccctcctgactccatctccctgcaccagccttgcaacccaccagctcctgctggagataaaggattccagcctcccagcccctctctccgccccaggccagccagctccatctcgctgcctattggacatctgggatgcatctccctcttgagctaggaacccagaggaggaggcctcaatagagcactgcctatttggtatccagtttctgaatgtgcaaaatggttaacgtccaaaacgcttaacgtctttttttaaagccttcaggtgttttataagctttttattatatggggcaactccttggctgagggtggatattcttgtacctctgtcccttactcttttggatgctggggcctttttctgtctcataaagacaggattgtgcaatctaagttgatcagtctctcagtggggttctgtgtgagttcatatgccagagtttttattcgtcttgtgattgctgacatacctgtgcactcatgtgtatacccctgcatgtggaaacatgaagatgttttcactttgtgtctaggtttatgtacgtgaacaaataataaaccgtgtggtcttcacacacaaccacacacctccagggggcccggtaccaatcgccggaagtctattacatcctggcgcgttacacgttgacggaaccgtcgtccaactacctgagcatcccttgcgcgtgtatcacaaggcccgagcccccaaggcccacggaagaatacgacctggaccgcagtgaccctacaggggcccacacagagggatgcaacacacagcggcctccaatatccgcgggcgtgcggagcacgaccaccacacacagcgcccccccgccccc

SEQ ID NO: 276362 - DNA, 1607 bp, Homo sapiens
cctgctcctcctcctcctcctcctcctcctcctcctcctccttctcctcctcctcccggtctgagggcggcggtctccgactcaagaccctggggctccgggtcttcttagcagccgccgcagcagccgcggcgacgtcactgtcctctcggcctggcacacagcgctccggccgccgaatgcccgtggacgcgcatctcttcccagagttcctgcttcctgggccagccaaagccgcagagaacgcctcagggtcttgcctgctgtgagtgccttgaagagggagcagcgggcacgatcaaagagacacctggctcaaggaccaataaggagtatggctgcccctcccaaagctcccatccgtgtcaggaatttgaccatcagagcaggagccctcactgggaaggagaacaacatgctgcagcccgagacccacatcttcacagcccccgaggaggggagctcccaaggggctctgctgcttggccaggccccagaacctttgtctctgccctgtactccagtgaccttggagcagcaactggtttctccttctggggatccccacagggcccctgccctgcccagcatatgctcaactctgatcctccagccctgtgccacccttgaccctcttctactgcagccacaggtccccaaagtctctgaccaggctttggtttctgcccactcagagtggcagcggaagctggaggccgctgaggctctgctgactctgagaaactctgcccaggcccctcctgactccatctccctgcaccagccttgcaacccaccagctcctgctggagataaaggattccagcctcccagcccctctctccgccccaggccagccagctccatctcgctgcctattggacatctgggatgcatctccctcttgagctaggaacccagaggaggaggcctcaatagagcactgcctatttggtatccagtttctgaatgtgcaaaatggttaacgtccaaaacgcttaacgtctttttttaaagccttcaggtgttttataagctttttattatatggggcaactccttggctgagggtggatattcttgtacctctgtcccttactcttttggatgctggggcctttttctgtctcataaagacaggattgtgcaatctaagttgatcagtctctcagtggggttctgtgtgagttcatatgccagagtttttattcgtcttgtgattgctgacatacctgtgcactcatgtgtatacccctgcatgtggaaacatgaagatgttttcactttgtgtctaggtttatgtacgtgaacaaataataaaccgtgtggtcttcacacacaaccacacacctccagggggcccggtaccaatcgccggaagtctattacatcctggcgcgttacacgttgacggaaccgtcgtccaactacctgagcatcccttgcgcgtgtatcacaaggcccgagcccccaaggcccacggaagaatacgacctggaccgcagtgaccctacaggggcccacacagagggatgcaacacacagcggcctccaatatccgcgggcgtgcggagcacgaccaccacacacagcgcccccccgccccc

SEQ ID NO: 276363 - DNA, 1320 bp, Homo sapiens
ccctcagctctcccggaatccctttcgggaggactccttgctccagccccctgagccctggcctttggccaatgaggcagggctcatgggattgcttttgattcggaggtccgggagggagtggatgattgggcttcctgaggaagtgagaacgcctcagggtcttgcctgctgtgagtgccttgaagagggagcagcgggcacgatcaaagagacacctggctcaaggaccaataaggagtatggctgcccctcccaaagctcccatccgtgtcaggaatttgaccatcagagcaggagccctcactgggaaggagaacaacatgctgcagcccgagacccacatcttcacagcccccgaggaggtccccaaagtctctgaccaggctttggtttctgcccactcagagtggcagcggaagctggaggccgctgaggctctgctgactctgagaaactctgcccaggcccctcctgactccatctccctgcaccagccttgcaacccaccagctcctgctggagataaaggattccagcctcccagcccctctctccgccccaggccagccagctccatctcgctgcctattggacatctgggatgcatctccctcttgagctaggaacccagaggaggaggcctcaatagagcactgcctatttggtatccagtttctgaatgtgcaaaatggttaacgtccaaaacgcttaacgtctttttttaaagccttcaggtgttttataagctttttattatatggggcaactccttggctgagggtggatattcttgtacctctgtcccttactcttttggatgctggggcctttttctgtctcataaagacaggattgtgcaatctaagttgatcagtctctcagtggggttctgtgtgagttcatatgccagagtttttattcgtcttgtgattgctgacatacctgtgcactcatgtgtatacccctgcatgtggaaacatgaagatgttttcactttgtgtctaggtttatgtacgtgaacaaataataaaccgtgtggtcttcacacacaaccacacacctccagggggcccggtaccaatcgccggaagtctattacatcctggcgcgttacacgttgacggaaccgtcgtccaactacctgagcatcccttgcgcgtgtatcacaaggcccgagcccccaaggcccacggaagaatacgacctggaccgcagtgaccctacaggggcccacacagagggatgcaacacacagcggcctccaatatccgcgggcgtgcggagcacgaccaccacacacagcgcccccccgccccc

SEQ ID NO: 276364 - DNA, 363 bp, Homo sapiens
tgtctactggtagtatgtgtccgccagcggatttaatcccctggcctctcctttccttgtttctagatgctcaactctgatcctccagccctgtgccacccttgaccctcttctactgcagccacaggtcctgggaaagtagtggggtccagaaccctgggaggggcggagtttagtggatgggaagagcagaaggccttggtgggggtgggggaggaggttgagggaacagggggctgaaggggcacttgtcgtattgggaagaggtgtagtttcccagtgcctattctctcatgcactttcctttccaggtccccaaagtctctgaccaggctttggtttctgcccactcagagtggcagc

SEQ ID NO: 276365 - DNA, 473 bp, Homo sapiens
cctgctcctcctcctcctcctcctcctcctcctcctcctccttctcctcctcctcccggtctgagggcggcggtctccgactcaagaccctggggctccgggtcttcttagcagccgccgcagcagccgcggcgacgtcactgtcctctcggcctggcacacagcgctccggccgccgaatgcccgtggacgcgcatctcttcccagagttcctgcttcctgggccagccaaagccgcaggtgagaacgtccgcggtagaggtgacacccagggcctgcgggtctcagaggcccggtggcctgctcctctcctccttgcccaagaaacccccacgggggcgcctgcagcggggacaccaagtgctccccggagccctgggagcacttcttctgaggcatggagcccctgctcaggtgcttctgaaagttcctttgtggaccccagaaacccctaggcaactgtctgccccgcc

SEQ ID NO: 276366 - DNA, 1497 bp, Homo sapiens
atgtttttctaggtagaaaacttaacatcattttaataaatcgcttagcttaaaacagtacaatgggaaaatatggcttaatgttaaacaaaacaaatgaaaatcaaattaacattacttccccactctcatttcttccccccccaattaaaagaacccaagtacttatttcttaccatctgtcccagtaatccgccacacattttctgcttcctttaagcttctgatgtctccattagcaattacaggtatagacatattttccttaattattttaatggaatcatagtgcactggctgatgtctttcttcagcagttcttccatggactgtaatccatgaaactcctgttgcttcagccttttgacaaagatctacagttcttttaaggtcatcatggatcctacaatttcaaaattacatttatctgttcacagcacacaaatcttaatgctaacattaactgactaaaatggtatttcatctaccaaatcttcagggagcagttcctacacaagacctcaaatttagctatttcactattgacaacaaaggacaaaaaacaagttttatcttagacctagtgcttctatgttttggctttgataaatgaaagacccatgaaagtactgtcacagatgaatttaaaccttaatatttgctgtgcatgcccccatcccccagtgggagaatataatactttatcttgaaatatgttttcaggctgggcaccgtggctcactcctgtaatcccagcacattgagaggctgaggcaggagaatcgcttgaacccacaaggcagaagttgcagtgagccaagatcctgccactacactccagcctggatgacagtgagactccgcctcaaacaaacaaaaaaagactcttagaattcttgactcactaattacacacttatgtgtctaaaggaactaggacaaagctattcattactgtggtaacacagtaatgacttttctcatgatatcaagataaagcaaatggtagttttgatcctcagggtacaaagactggaagaagacagcgttattaatatatggagaacttgactggtttgagagggattcagcagtagaggactcggagatgagtaagggtacaggcaacagagtaggaaggacttgagttgatttttatttccagcttctactgaggacagctcttaagttcaccgttttgacaactctggcagcttgctacaaattgccagttccccgtacaatccatagttgactcaggtgaaaagctgttccataaagatagaactgttaattgttagaaccgtgtcctccaacagataaataacatgattttaaaaggtagatcttgcactttgggaggcaggcagatggcttgaacccaggagtttgagaccagcctgggcaacatggcacaaccctatctctacaaaaaatacaaaaattaactgggtgtggtggcatgtgcctgtaatcccagccattcaggaagctgag

SEQ ID NO: 276367 - DNA, 812 bp, Homo sapiens
tttacagagaaaaaccagagggcgggcagacagattttatgtgagagaaaagttggatgctcacgctccatggagcatcctcgcgtttcccggggaaaagcggatcccggagaagcagcctaatctctcagcccttgtggagaagggaatatcagaagcaggacgaaagccaggtcaagtctctttcattaggctccccaaagggacaagtactcacctcccagagacctggcccagcgggtcctcatggcagcaccaccctctcccggtgcccacgaccattcgtctcccacccggtgttctccaggattcccaaagacgcccgtttagatccacagagctggaagacagctgttcctggatcacaccagaatggagaagcaagctcctcccactagcagaaagcctttgctttctgtgcctggattcggaagattagttaagcactggaagaggaggggggaaacaacaactcgtttttgctttttagaaagaaaaaaacacattaatgagcccaagaaatacacgcaactctgcaactctgtagatttccacctgttcccatcctccacagtctcccatcccaccagcaacacacgtgagatatctgatgccttcccatcaataactctcacttagtatgggtaagcaaaaaatttccaaccagggatggaagttgtggagagatagagtgggaaagctcaaggagcattgatagggatcattaattaaaaatctaccaaacatctctttctctccctaatgtgcgagttacaataacatcactcaaagcagtttgcagccacagcttg

SEQ ID NO: 276368 - DNA, 675 bp, Homo sapiens
attgagcttaagacctctcctgcttgcccagctgtaacaagacccccctcctgtgtctcttccccagtattcctgctgggatagtatcagaaaaggtgaagccctagtcaggagcctagattttcattcccactgggcagtaatgatgtgtcccttccatccccccaccccaaacagtaacaagttccctctcatggtgtcaatggaggctatctgggaagcactaaggaggcacctctacccttcccagccaagatatgtgtgcagaagcctagcagggagctgggacttggactcccacctgatggcaacaaggtggtgctcccacatctctcactgcacggagtcagacgaggcctgcaaaaacaaatttaaataagatctagagtctcagcataatactaaaacatttcaggatacaattgaaaaccatccatcctaccaagaaccaggaaaactaaatgagaaaagagaatagatactaaaaccaaaaagacacagatgttggaattacttgacaaggactttaatgcagctatctttaaagtgattcaatttgctattgaattatgaaaaaatagaattctcaacaaagaaatagaagatgtaaagaaccagatggagatttttaaactgaaaatacaatagccaaaattttaaaaagtcaactgaaca

SEQ ID NO: 276369 - DNA, 2911 bp, Homo sapiens
  misc_feature (1)..(1): n is a, c, g, or t
  misc_feature (4)..(4): n is a, c, g, or t
  misc_feature (6)..(8): n is a, c, g, or t
  misc_feature (535)..(535): n is a, c, g, or t
ngcncnnngggcgtttcctccaaggctgcccaccagaaggacctgcccgagagggtagagggcatagggtcaagatcaagataaggcagctccagcccctggaaggccagagacttgccagtgtcccactagcgggctcttcgcaagaatccccccgggcccgccgcagccaggcggcggccggcagagggcgctgctcgggcatggcggaggagcggccgggggcctggttcggcttcggtttctgcggcttcgggcaggagctgggctccggacgcgggcgccaggtgcacagccccagtccgctgcgggcgggcgtcgacatctgccgcgtgagcgcgagctggagctacaccgctttcgtgacccgtgagcactccccgccccgtccccacttattccagccgcgctccccagtcgcctccccgcaccgctgtggccagtccagtttgtctcccccgttcaggccgacagacccacattctgggttggtccccaattcgaccccttcccaggaacaccccgctccccccanccccgccgcctccattctggccaccctgctccaatccgccccgcaggtggaggccgcttggagctgtcgggctcagccagcggcgcggcgggccgctgcaaggacgcgtgggcctcggaggggctcctcgcggtgctgcgcgccgggccggggccggaggcgttactgcaggtctgggcggccgaatcggcgctgcgtggggagccattgtgggcccagaatgtggtgcccgaggccgaaggggaagacgatccggccggtgaggcccaggctgggaggctacccctgctgccctgcgcccgtgcctacgtgagcccgcgggcgcccttctaccggcctctggctccggagctgcgggcacgccagctggagctgggcgccgagcacgcgttgctgctggacgctgctggccaggtgttctcctggggcgggggcaggcatggacagctgggccatgggaccctggaggcagagctggagccacggctgttggaggcgttgcagggcctagtcatggctgaggtggccgcggggggctggcattctgtgtgtgtgagtgagactggggatatttatatctggggctggaatgaatcagggcagctggccctgcccaccaggaacctggcagaggatggagagactgtcgcaagggaagccacagaactgaatgaagatggttctcaggtgaagagaacgggtggggctgaggatggagcccctgcccccttcatagctgtccagcccttcccggcattactggatctccccatgggctcagatgcagtcaaggccagctgtggatcccggcacacagctgtggtgacacgaacaggggagctctacacctggggctggggtaaatatggacagctgggccacgaggacaccaccagcttggatcggcctcgccgtgtggaatactttgtagataagcaactccaagtaaaggctgtcacctgtgggccgtggaacacctacgtgtatgctgtggagaaagggaagagctgacatgtgtacgtatatgtatatgcaacacctgtgagacccccattcaggtcaaggaaaaccattgcctgcaccccaagggccccatatttgcccctccccatcacagtcctgcccttcaccctcaagcacggtcctaaacttgtctgcactttagaaacacctggagagcattgaaaactctgctgcctaaggtcagcatcaatcaaaacaatgaaatcaatgaaacaatgaaaccagagcttctaggtgtgtggcctggatagtggtagattcaaagctccacccacctcatcccaggtacatttgatgtgcagctgagattggggcacattccaggtcatcgtcttctgtcagtcatttccctgctttcgtttgaattttaccattcttgtatgcagccttatacgacatagttgtgtttgcttttgagtgttagataaatggaatcctgtgtatgtgcttttgtgtcgtttttgtcactcagcattgtataatccatccttgttgggtcctggagttcatttttaatgctatatggtgttctgttgtatgaataatacctcaagtgatacagccttgttgatggtcatttttattgtttctgattttggtcattccacataattctttgtgcagtcttctgcacatgtgcacaagttcctttgcagaacattgagttgaattgctaagtcaggagatacctttaattttactagataactgttgcccccagcagggtggggtctactgtggctaaaatgtcaggtagatgcacactggttttaattggcatttccctggatactgatgaggttgagtagcttttcatttgttttggatggctgggcatggtggctcacacctgtagtcccagcactttgggaggctaagcagggagattgcttgaggcgaagagttcatatgtttattggccacttggagtttttctgttgtcaagtgcctgttcaagttttctggccttttaaaatgttctgtattttccttagtgatttttcttttggatatttcagatacaagtcttttgagagttagtattcagagtatcttctgctacaatgtagtttgtttcagtctctcttggtattaccaattttaatacttaggtgatgcttactccatgccaggtaaggctcaaagtgctttacaagtatcaacttattttgataaaataagcttatcagtagttttctttatagttaaattctatttgtgcatgtgtgtgtctgtggtttagcaaatgtttcccacccatggggtcttttttattgtggtaaaatatactgaacataaaatttatgttcaataaaaaacaaaaattgtttttaaccattttaaaaaaaaagt

SEQ ID NO: 276370 - DNA, 1512 bp, Homo sapiens
aatgtggctggcaactgcgggggtagaagaactcaggcaaagtaggcacaggaatgggggagatgagagccaagggacaaacgccgagaaagcgttccgacaagcatgtgtgttcatacatgcatacccccaacaaagggcaatgcactgtgtaacagaactgaacacaatttaacaaagctgctcccagccttcctgtcacctctttggcagtagggcaggccatctcaacttcggacacacaaagacattctcttcaggaggaaggctgtcctgtgtggtggggacaaggcttcagttgcaagatggttgtctctccttcttcctgaataagacaacgtaccactgttataagattccaagtgaattccttcagaggaagagaaggacaacataagaaggcgtggatgacagactttcagttaaactaacaaagaaagaacactgcagcaccatctatgcctacctttttctcagcgtttataaaaaaaaattcatattccctacaaagcaaaactatggtataacaggacaactaagactgccctggcaccagagaaactacaatctagatgtgctctgcttccagtcggccgagaagcctgcagcaaatcacctaaacacttaaggtctttgtgtgccatccacacccaactgcaactagagactttcattagcccctttctgtctcagagctttcggtggttctacaagtcaccagcctggatctctaacaatgtgtctctccaaagctgttaatacattcacatccaaaatatctccagccacgaaatcctagtttagaggttgcccgtccttgttgaagaaacatttctacacaaatacctgttgcctataccagatggccataccaatacccaaatactgacaaacgtttaaaagaatttacggtactcccttcactttagaaatgttaacagttcaagtccaacagaacttaaaggaaaaaaagagaaatgttaacagtaagtaaggcatttatttaacataatctcaactaaagtccaactaaagagcttccccaggcaaacactccttttgcacttcattttgaagacaaaagaatgcacaagttaaaatcctaatattaccattttattaaaaataacttttaagatccaatctgtggccaatattcgatctggatgcaaaaccctggcttccagacaggccagccaggggcactgctctgaaggtcattacttaagtatcccagtctcctcagtctgacagacctacccctgcccagccaatctccacataacagctagttgttcataataaatcccatcagatccccgcttaactactccccttcaaaggctccactgccctcaggaaatagttcaaccaccttctgtagaaaggccttctaaaacctctctccgagtctgtctgctaatctctcccacttgacactccccaggtctctggccagctgaacttcccgggcatttcctgaacaatgcccctcaataaaccacatgcaac

SEQ ID NO: 276371 - DNA, 479 bp, Homo sapiens
cggcttgggccccgcccaccaccccagcacgttcgaggagggctaagcccagcgtgaggctcgttggctcgacagaggcacgtgacgggtcctgagccaatccgtggaaggtaaaagctgcttcctgttgggacacgagtccggcgcgtgtcgggttttgagctgccgcggtcccgggactgaggtgggtggcggggtccgcccgtcttgggcgtcactcctcgccaaacctttagctcaagtcttaatgactgtcctctctgtggttctaatccgagctccagcctcacgggttcctacaggggcgggaccacctggcccaacctctgccttggtccaacgcccccggtttcctccagggccttggtccaacgcccctcggaggtttcagcccatttcacagaccgggccgcagggccccggcgtaggcctcgcgaccggagaggccctcaaggggagttgaacagggctgcggccgc

SEQ ID NO: 276372 - DNA, 864 bp, Homo sapiens
ctcagagctttcggtggttctacaagtcaccagcctggatctctaacaatgtgtctctccaaagtggaatgaatcagggcagctggccctgcccaccaggaacctggcagaggatggagagactgtcgcaagggaagccacgaaatcctagtttagaggttgcccgtccttgttgaagaaacatttctacacaaatacctgttgcctataccagatggccataccaatacccaaatactgacaaacgtttaaaagaatttacggtactcccttcactttagaaatgttaacagttcaagtccaacagaacttaaaggaaaaaaagagaaatgttaacagtaagtaaggcatttatttaacataatctcaactaaagtccaactaaagagcttccccaggcaaacactccttttgcacttcattttgaagacaaaagaatgcacaagttaaaatcctaatattaccattttattaaaaataacttttaagatccaatctgtggccaatattcgatctggatgcaaaaccctggcttccagacaggccagccaggggcactgctctgaaggtcattacttaagtatcccagtctcctcagtctgacagacctacccctgcccagccaatctccacataacagctagttgttcataataaatcccatcagatccccgcttaactactccccttcaaaggctccactgccctcaggaaatagttcaaccaccttctgtagaaaggccttctaaaacctctctccgagtctgtctgctaatctctcccacttgacactccccaggtctctggccagctgaacttcccgggcatttcctgaacaatgcccctcaataaaccacatgcaac

SEQ ID NO: 276373 - DNA, 327 bp, Homo sapiens
  misc_feature (1)..(1): n is a, c, g, or t
  misc_feature (4)..(4): n is a, c, g, or t
  misc_feature (6)..(8): n is a, c, g, or t
ngcncnnngggcgtttcctccaaggctgcccaccagaaggacctgcccgagagggtagagggcatagggtcaagatcaaggtcagaggcccccttgggttgggagaggacacggaaggggttaggagcccaggaactgggtctcaggagagacccaggatctgacttaagaggcctgaaaatgcccatgcaattctgcttcacccgggtgcagcggctcacgcctgtaatcccaacgctttgggaggccgaggcgggcggatcactcgagcccaggaatttgagaccagcctgggcagcatagcgagacccctgtctctattatatt

SEQ ID NO: 276374 - DNA, 2803 bp, Homo sapiens
cggcttgggccccgcccaccaccccagcacgttcgaggagggctaagcccagcgtgaggctcgttggctcgacagaggcacgtgacgggtcctgagccaatccgtggaaggtaaaagctgcttcctgttgggacacgagtccggcgcgtgtcgggttttgagctgccgcggtcccgggactgagataaggcagctccagcccctggaaggccagagacttgccagtgtcccactagcgggctcttcgcaagaatccccccgggcccgccgcagccaggcggcggccggcagagggcgctgctcgggcatggcggaggagcggccgggggcctggttcggcttcggtttctgcggcttcgggcaggagctgggctccggacgcgggcgccaggtgcacagccccagtccgctgcgggcgggcgtcgacatctgccgcgtgagcgcgagctggagctacaccgctttcgtgacccgtggaggccgcttggagctgtcgggctcagccagcggcgcggcgggccgctgcaaggacgcgtgggcctcggaggggctcctcgcggtgctgcgcgccgggccggggccggaggcgttactgcaggtctgggcggccgaatcggcgctgcgtggggagccattgtgggcccagaatgtggtgcccgaggccgaaggggaagacgatccggccggtgaggcccaggctgggaggctacccctgctgccctgcgcccgtgcctacgtgagcccgcgggcgcccttctaccggcctctggctccggagctgcgggcacgccagctggagctgggcgccgagcacgcgttgctgctggacgctgctggccaggtgttctcctggggcgggggcaggcatggacagctgggccatgggaccctggaggcagagctggagccacggctgttggaggcgttgcagggcctagtcatggctgaggtggccgcggggggctggcattctgtgtgtgtgagtgagactggggatatttatatctggggctggaatgaatcagggcagctggccctgcccaccaggaacctggcagaggatggagagactgtcgcaagggaagccacagaactgaatgaagatggttctcaggtgaagagaacgggtggggctgaggatggagcccctgcccccttcatagctgtccagcccttcccggcattactggatctccccatgggctcagatgcagtcaaggccagctgtggatcccggcacacagctgtggtgacacgaacaggggagctctacacctggggctggggtaaatatggacagctgggccacgaggacaccaccagcttggatcggcctcgccgtgtggaatactttgtagataagcaactccaagtaaaggctgtcacctgtgggccgtggaacacctacgtgtatgctgtggagaaagggaagagctgacatgtgtacgtatatgtatatgcaacacctgtgagacccccattcaggtcaaggaaaaccattgcctgcaccccaagggccccatatttgcccctccccatcacagtcctgcccttcaccctcaagcacggtcctaaacttgtctgcactttagaaacacctggagagcattgaaaactctgctgcctaaggtcagcatcaatcaaaacaatgaaatcaatgaaacaatgaaaccagagcttctaggtgtgtggcctggatagtggtagattcaaagctccacccacctcatcccaggtacatttgatgtgcagctgagattggggcacattccaggtcatcgtcttctgtcagtcatttccctgctttcgtttgaattttaccattcttgtatgcagccttatacgacatagttgtgtttgcttttgagtgttagataaatggaatcctgtgtatgtgcttttgtgtcgtttttgtcactcagcattgtataatccatccttgttgggtcctggagttcatttttaatgctatatggtgttctgttgtatgaataatacctcaagtgatacagccttgttgatggtcatttttattgtttctgattttggtcattccacataattctttgtgcagtcttctgcacatgtgcacaagttcctttgcagaacattgagttgaattgctaagtcaggagatacctttaattttactagataactgttgcccccagcagggtggggtctactgtggctaaaatgtcaggtagatgcacactggttttaattggcatttccctggatactgatgaggttgagtagcttttcatttgttttggatggctgggcatggtggctcacacctgtagtcccagcactttgggaggctaagcagggagattgcttgaggcgaagagttcatatgtttattggccacttggagtttttctgttgtcaagtgcctgttcaagttttctggccttttaaaatgttctgtattttccttagtgatttttcttttggatatttcagatacaagtcttttgagagttagtattcagagtatcttctgctacaatgtagtttgtttcagtctctcttggtattaccaattttaatacttaggtgatgcttactccatgccaggtaaggctcaaagtgctttacaagtatcaacttattttgataaaataagcttatcagtagttttctttatagttaaattctatttgtgcatgtgtgtgtctgtggtttagcaaatgtttcccacccatggggtcttttttattgtggtaaaatatactgaacataaaatttatgttcaataaaaaacaaaaattgtttttaaccattttaaaaaaaaagt

SEQ ID NO: 276375 - DNA, 3366 bp, Homo sapiens
cggcttgggccccgcccaccaccccagcacgttcgaggagggctaagcccagcgtgaggctcgttggctcgacagaggcacgtgacgggtcctgagccaatccgtggaaggtaaaagctgcttcctgttgggacacgagtccggcgcgtgtcgggttttgagctgccgcggtcccgggactgagataaggcagctccagcccctggaaggccagagacttgccagtgtcccactagcgggctcttcgcaagaatccccccgggcccgccgcagccaggcggcggccggcagagggcgctgctcgggcatggcggaggagcggccgggggcctggttcggcttcggtttctgcggcttcgggcaggagctgggctccggacgcgggcgccaggtgcacagccccagtccgctgcgggcgggcgtcgacatctgccgcgtgagcgcgagctggagctacaccgctttcgtgacccgtggaggccgcttggagctgtcgggctcagccagcggcgcggcgggccgctgcaaggacgcgtgggcctcggaggggctcctcgcggtgctgcgcgccgggccggggccggaggcgttactgcaggtctgggcggccgaatcggcgctgcgtggggagccattgtgggcccagaatgtggtgcccgaggccgaaggggaagacgatccggccggtgaggcccaggctgggaggctacccctgctgccctgcgcccgtgcctacgtgagcccgcgggcgcccttctaccggcctctggctccggagctgcgggcacgccagctggagctgggcgccgagcacgcgttgctgctggacgctgctggccaggtgttctcctggggcgggggcaggcatggacagctgggccatgggaccctggaggcagagctggagccacggctgttggaggcgttgcagggcctagtcatggctgaggtggccgcggggggctggcattctgtgtgtgtgagtgagactggggatatttatatctggggctggaatgaatcagggcagctggccctgcccaccaggaacctggcagaggatggagagactgtcgcaagggaagccacagaactgaatgaagatggttctcaggtgaagagaacgggtggggctgaggatggagcccctgcccccttcatagctgtccagcccttcccggcattactggatctccccatgggctcagatgcagtcaaggccagctgtggatcccggcacacagctgtggtgacacgaacaggggagctctacacctggggctggggtaagtaaaaggattgtttttgtgaccctgaaaccaaggagaagaaagacctgggagtacagggcaggtgacaaagccaacaagactggaggaagcaggggcctcggccaggtcactgggaggaacaggactgctccctccctggggttggaacagacataggcgcgctcagtccgaggccagacaggggagacatggagaggatatcggtaccacccgcctacctctctgaaagactgtcttaagggagtatccaaccagcacttacaaagcagctttttgtggatgtgacactgggtggagaaaaagattcgatggaagtgtgtgctctgaacatcttagcttggatagcagggaagtctggaggagcgtcttgcctggagtggctggtcgccactagcctcttggggatccccaaggttgcctggctctgggtctcttggattcacagagcagtggggcataatcccagcacttcatttgatagtctgggccccttcctggagggaaagcagcagcaagacccagtggagacgatggcaaaggggctgatttcactttaggtaaatatggacagctgggccacgaggacaccaccagcttggatcggcctcgccgtgtggaatactttgtagataagcaactccaagtaaaggctgtcacctgtgggccgtggaacacctacgtgtatgctgtggagaaagggaagagctgacatgtgtacgtatatgtatatgcaacacctgtgagacccccattcaggtcaaggaaaaccattgcctgcaccccaagggccccatatttgcccctccccatcacagtcctgcccttcaccctcaagcacggtcctaaacttgtctgcactttagaaacacctggagagcattgaaaactctgctgcctaaggtcagcatcaatcaaaacaatgaaatcaatgaaacaatgaaaccagagcttctaggtgtgtggcctggatagtggtagattcaaagctccacccacctcatcccaggtacatttgatgtgcagctgagattggggcacattccaggtcatcgtcttctgtcagtcatttccctgctttcgtttgaattttaccattcttgtatgcagccttatacgacatagttgtgtttgcttttgagtgttagataaatggaatcctgtgtatgtgcttttgtgtcgtttttgtcactcagcattgtataatccatccttgttgggtcctggagttcatttttaatgctatatggtgttctgttgtatgaataatacctcaagtgatacagccttgttgatggtcatttttattgtttctgattttggtcattccacataattctttgtgcagtcttctgcacatgtgcacaagttcctttgcagaacattgagttgaattgctaagtcaggagatacctttaattttactagataactgttgcccccagcagggtggggtctactgtggctaaaatgtcaggtagatgcacactggttttaattggcatttccctggatactgatgaggttgagtagcttttcatttgttttggatggctgggcatggtggctcacacctgtagtcccagcactttgggaggctaagcagggagattgcttgaggcgaagagttcatatgtttattggccacttggagtttttctgttgtcaagtgcctgttcaagttttctggccttttaaaatgttctgtattttccttagtgatttttcttttggatatttcagatacaagtcttttgagagttagtattcagagtatcttctgctacaatgtagtttgtttcagtctctcttggtattaccaattttaatacttaggtgatgcttactccatgccaggtaaggctcaaagtgctttacaagtatcaacttattttgataaaataagcttatcagtagttttctttatagttaaattctatttgtgcatgtgtgtgtctgtggtttagcaaatgtttcccacccatggggtcttttttattgtggtaaaatatactgaacataaaatttatgttcaataaaaaacaaaaattgtttttaaccattttaaaaaaaaagt

SEQ ID NO: 276376 - DNA, 2887 bp, Homo sapiens
cggcttgggccccgcccaccaccccagcacgttcgaggagggctaagcccagcgtgaggctcgttggctcgacagaggcacgtgacgggtcctgagccaatccgtggaaggtaaaagctgcttcctgttgggacacgagtccggcgcgtgtcgggttttgagctgccgcggtcccgggactgagctccttgggagcagacagctgtcctcactggcagaggaggagcgctcagtaaatgctcgctggacgaataaatggctagataagataaggcagctccagcccctggaaggccagagacttgccagtgtcccactagcgggctcttcgcaagaatccccccgggcccgccgcagccaggcggcggccggcagagggcgctgctcgggcatggcggaggagcggccgggggcctggttcggcttcggtttctgcggcttcgggcaggagctgggctccggacgcgggcgccaggtgcacagccccagtccgctgcgggcgggcgtcgacatctgccgcgtgagcgcgagctggagctacaccgctttcgtgacccgtggaggccgcttggagctgtcgggctcagccagcggcgcggcgggccgctgcaaggacgcgtgggcctcggaggggctcctcgcggtgctgcgcgccgggccggggccggaggcgttactgcaggtctgggcggccgaatcggcgctgcgtggggagccattgtgggcccagaatgtggtgcccgaggccgaaggggaagacgatccggccggtgaggcccaggctgggaggctacccctgctgccctgcgcccgtgcctacgtgagcccgcgggcgcccttctaccggcctctggctccggagctgcgggcacgccagctggagctgggcgccgagcacgcgttgctgctggacgctgctggccaggtgttctcctggggcgggggcaggcatggacagctgggccatgggaccctggaggcagagctggagccacggctgttggaggcgttgcagggcctagtcatggctgaggtggccgcggggggctggcattctgtgtgtgtgagtgagactggggatatttatatctggggctggaatgaatcagggcagctggccctgcccaccaggaacctggcagaggatggagagactgtcgcaagggaagccacagaactgaatgaagatggttctcaggtgaagagaacgggtggggctgaggatggagcccctgcccccttcatagctgtccagcccttcccggcattactggatctccccatgggctcagatgcagtcaaggccagctgtggatcccggcacacagctgtggtgacacgaacaggggagctctacacctggggctggggtaaatatggacagctgggccacgaggacaccaccagcttggatcggcctcgccgtgtggaatactttgtagataagcaactccaagtaaaggctgtcacctgtgggccgtggaacacctacgtgtatgctgtggagaaagggaagagctgacatgtgtacgtatatgtatatgcaacacctgtgagacccccattcaggtcaaggaaaaccattgcctgcaccccaagggccccatatttgcccctccccatcacagtcctgcccttcaccctcaagcacggtcctaaacttgtctgcactttagaaacacctggagagcattgaaaactctgctgcctaaggtcagcatcaatcaaaacaatgaaatcaatgaaacaatgaaaccagagcttctaggtgtgtggcctggatagtggtagattcaaagctccacccacctcatcccaggtacatttgatgtgcagctgagattggggcacattccaggtcatcgtcttctgtcagtcatttccctgctttcgtttgaattttaccattcttgtatgcagccttatacgacatagttgtgtttgcttttgagtgttagataaatggaatcctgtgtatgtgcttttgtgtcgtttttgtcactcagcattgtataatccatccttgttgggtcctggagttcatttttaatgctatatggtgttctgttgtatgaataatacctcaagtgatacagccttgttgatggtcatttttattgtttctgattttggtcattccacataattctttgtgcagtcttctgcacatgtgcacaagttcctttgcagaacattgagttgaattgctaagtcaggagatacctttaattttactagataactgttgcccccagcagggtggggtctactgtggctaaaatgtcaggtagatgcacactggttttaattggcatttccctggatactgatgaggttgagtagcttttcatttgttttggatggctgggcatggtggctcacacctgtagtcccagcactttgggaggctaagcagggagattgcttgaggcgaagagttcatatgtttattggccacttggagtttttctgttgtcaagtgcctgttcaagttttctggccttttaaaatgttctgtattttccttagtgatttttcttttggatatttcagatacaagtcttttgagagttagtattcagagtatcttctgctacaatgtagtttgtttcagtctctcttggtattaccaattttaatacttaggtgatgcttactccatgccaggtaaggctcaaagtgctttacaagtatcaacttattttgataaaataagcttatcagtagttttctttatagttaaattctatttgtgcatgtgtgtgtctgtggtttagcaaatgtttcccacccatggggtcttttttattgtggtaaaatatactgaacataaaatttatgttcaataaaaaacaaaaattgtttttaaccattttaaaaaaaaagt

SEQ ID NO: 276377 - DNA, 3099 bp, Homo sapiens
  misc_feature (723)..(723): n is a, c, g, or t
cggcttgggccccgcccaccaccccagcacgttcgaggagggctaagcccagcgtgaggctcgttggctcgacagaggcacgtgacgggtcctgagccaatccgtggaaggtaaaagctgcttcctgttgggacacgagtccggcgcgtgtcgggttttgagctgccgcggtcccgggactgagctccttgggagcagacagctgtcctcactggcagaggaggagcgctcagtatatgctcgctggacgaataaatggctagataagataaggcagctccagcccctggaaggccagagacttgccagtgtcccactagcgggctcttcgcaagaatccccccgggcccgccgcagccaggcggcggccggcagagggcgctgctcgggcatggcggaggagcggccgggggcctggttcggcttcggtttctgcggcttcgggcaggagctgggctccggacgcgggcgccaggtgcacagccccagtccgctgcgggcgggcgtcgacatctgccgcgtgagcgcgagctggagctacaccgctttcgtgacccgtgagcactccccgccccgtccccacttattccagccgcgctccccagtcgcctccccgcaccgctgtggccagtccagtttgtctcccccgttcaggccgacagacccacattctgggttggtccccaattcgaccccttcccaggaacaccccgctccccccanccccgccgcctccattctggccaccctgctccaatccgccccgcaggtggaggccgcttggagctgtcgggctcagccagcggcgcggcgggccgctgcaaggacgcgtgggcctcggaggggctcctcgcggtgctgcgcgccgggccggggccggaggcgttactgcaggtctgggcggccgaatcggcgctgcgtggggagccattgtgggcccagaatgtggtgcccgaggccgaaggggaagacgatccggccggtgaggcccaggctgggaggctacccctgctgccctgcgcccgtgcctacgtgagcccgcgggcgcccttctaccggcctctggctccggagctgcgggcacgccagctggagctgggcgccgagcacgcgttgctgctggacgctgctggccaggtgttctcctggggcgggggcaggcatggacagctgggccatgggaccctggaggcagagctggagccacggctgttggaggcgttgcagggcctagtcatggctgaggtggccgcggggggctggcattctgtgtgtgtgagtgagactggggatatttatatctggggctggaatgaatcagggcagctggccctgcccaccaggaacctggcagaggatggagagactgtcgcaagggaagccacagaactgaatgaagatggttctcaggtgaagagaacgggtggggctgaggatggagcccctgcccccttcatagctgtccagcccttcccggcattactggatctccccatgggctcagatgcagtcaaggccagctgtggatcccggcacacagctgtggtgacacgaacaggggagctctacacctggggctggggtaaatatggacagctgggccacgaggacaccaccagcttggatcggcctcgccgtgtggaatactttgtagataagcaactccaagtaaaggctgtcacctgtgggccgtggaacacctacgtgtatgctgtggagaaagggaagagctgacatgtgtacgtatatgtatatgcaacacctgtgagacccccattcaggtcaaggaaaaccattgcctgcaccccaagggccccatatttgcccctccccatcacagtcctgcccttcaccctcaagcacggtcctaaacttgtctgcactttagaaacacctggagagcattgaaaactctgctgcctaaggtcagcatcaatcaaaacaatgaaatcaatgaaacaatgaaaccagagcttctaggtgtgtggcctggatagtggtagattcaaagctccacccacctcatcccaggtacatttgatgtgcagctgagattggggcacattccaggtcatcgtcttctgtcagtcatttccctgctttcgtttgaattttaccattcttgtatgcagccttatacgacatagttgtgtttgcttttgagtgttagataaatggaatcctgtgtatgtgcttttgtgtcgtttttgtcactcagcattgtataatccatccttgttgggtcctggagttcatttttaatgctatatggtgttctgttgtatgaataatacctcaagtgatacagccttgttgatggtcatttttattgtttctgattttggtcattccacataattctttgtgcagtcttctgcacatgtgcacaagttcctttgcagaacattgagttgaattgctaagtcaggagatacctttaattttactagataactgttgcccccagcagggtggggtctactgtggctaaaatgtcaggtagatgcacactggttttaattggcatttccctggatactgatgaggttgagtagcttttcatttgttttggatggctgggcatggtggctcacacctgtagtcccagcactttgggaggctaagcagggagattgcttgaggcgaagagttcatatgtttattggccacttggagtttttctgttgtcaagtgcctgttcaagttttctggccttttaaaatgttctgtattttccttagtgatttttcttttggatatttcagatacaagtcttttgagagttagtattcagagtatcttctgctacaatgtagtttgtttcagtctctcttggtattaccaattttaatacttaggtgatgcttactccatgccaggtaaggctcaaagtgctttacaagtatcaacttattttgataaaataagcttatcagtagttttctttatagttaaattctatttgtgcatgtgtgtgtctgtggtttagcaaatgtttcccacccatggggtcttttttattgtggtaaaatatactgaacataaaatttatgttcaataaaaaacaaaaattgtttttaaccattttaaaaaaaaagt

SEQ ID NO: 276378 - DNA, 3015 bp, Homo sapiens
  misc_feature (639)..(639): n is a, c, g, or t
cggcttgggccccgcccaccaccccagcacgttcgaggagggctaagcccagcgtgaggctcgttggctcgacagaggcacgtgacgggtcctgagccaatccgtggaaggtaaaagctgcttcctgttgggacacgagtccggcgcgtgtcgggttttgagctgccgcggtcccgggactgagataaggcagctccagcccctggaaggccagagacttgccagtgtcccactagcgggctcttcgcaagaatccccccgggcccgccgcagccaggcggcggccggcagagggcgctgctcgggcatggcggaggagcggccgggggcctggttcggcttcggtttctgcggcttcgggcaggagctgggctccggacgcgggcgccaggtgcacagccccagtccgctgcgggcgggcgtcgacatctgccgcgtgagcgcgagctggagctacaccgctttcgtgacccgtgagcactccccgccccgtccccacttattccagccgcgctccccagtcgcctccccgcaccgctgtggccagtccagtttgtctcccccgttcaggccgacagacccacattctgggttggtccccaattcgaccccttcccaggaacaccccgctccccccanccccgccgcctccattctggccaccctgctccaatccgccccgcaggtggaggccgcttggagctgtcgggctcagccagcggcgcggcgggccgctgcaaggacgcgtgggcctcggaggggctcctcgcggtgctgcgcgccgggccggggccggaggcgttactgcaggtctgggcggccgaatcggcgctgcgtggggagccattgtgggcccagaatgtggtgcccgaggccgaaggggaagacgatccggccggtgaggcccaggctgggaggctacccctgctgccctgcgcccgtgcctacgtgagcccgcgggcgcccttctaccggcctctggctccggagctgcgggcacgccagctggagctgggcgccgagcacgcgttgctgctggacgctgctggccaggtgttctcctggggcgggggcaggcatggacagctgggccatgggaccctggaggcagagctggagccacggctgttggaggcgttgcagggcctagtcatggctgaggtggccgcggggggctggcattctgtgtgtgtgagtgagactggggatatttatatctggggctggaatgaatcagggcagctggccctgcccaccaggaacctggcagaggatggagagactgtcgcaagggaagccacagaactgaatgaagatggttctcaggtgaagagaacgggtggggctgaggatggagcccctgcccccttcatagctgtccagcccttcccggcattactggatctccccatgggctcagatgcagtcaaggccagctgtggatcccggcacacagctgtggtgacacgaacaggggagctctacacctggggctggggtaaatatggacagctgggccacgaggacaccaccagcttggatcggcctcgccgtgtggaatactttgtagataagcaactccaagtaaaggctgtcacctgtgggccgtggaacacctacgtgtatgctgtggagaaagggaagagctgacatgtgtacgtatatgtatatgcaacacctgtgagacccccattcaggtcaaggaaaaccattgcctgcaccccaagggccccatatttgcccctccccatcacagtcctgcccttcaccctcaagcacggtcctaaacttgtctgcactttagaaacacctggagagcattgaaaactctgctgcctaaggtcagcatcaatcaaaacaatgaaatcaatgaaacaatgaaaccagagcttctaggtgtgtggcctggatagtggtagattcaaagctccacccacctcatcccaggtacatttgatgtgcagctgagattggggcacattccaggtcatcgtcttctgtcagtcatttccctgctttcgtttgaattttaccattcttgtatgcagccttatacgacatagttgtgtttgcttttgagtgttagataaatggaatcctgtgtatgtgcttttgtgtcgtttttgtcactcagcattgtataatccatccttgttgggtcctggagttcatttttaatgctatatggtgttctgttgtatgaataatacctcaagtgatacagccttgttgatggtcatttttattgtttctgattttggtcattccacataattctttgtgcagtcttctgcacatgtgcacaagttcctttgcagaacattgagttgaattgctaagtcaggagatacctttaattttactagataactgttgcccccagcagggtggggtctactgtggctaaaatgtcaggtagatgcacactggttttaattggcatttccctggatactgatgaggttgagtagcttttcatttgttttggatggctgggcatggtggctcacacctgtagtcccagcactttgggaggctaagcagggagattgcttgaggcgaagagttcatatgtttattggccacttggagtttttctgttgtcaagtgcctgttcaagttttctggccttttaaaatgttctgtattttccttagtgatttttcttttggatatttcagatacaagtcttttgagagttagtattcagagtatcttctgctacaatgtagtttgtttcagtctctcttggtattaccaattttaatacttaggtgatgcttactccatgccaggtaaggctcaaagtgctttacaagtatcaacttattttgataaaataagcttatcagtagttttctttatagttaaattctatttgtgcatgtgtgtgtctgtggtttagcaaatgtttcccacccatggggtcttttttattgtggtaaaatatactgaacataaaatttatgttcaataaaaaacaaaaattgtttttaaccattttaaaaaaaaagt

SEQ ID NO: 276379 - DNA, 2142 bp, Homo sapiens
ctgatctagaggatcccaaagctcgcactcttgaacaggggagctctacacctggggctggggtaagtaaaaggattgtttttgtgaccctgaaaccaaggagaagaaagacctgggagtacagggcaggtgacaaagccaacaagactggaggaagcaggggcctcggccaggtcactgggaggaacaggactgctccctccctggggttggaacagacataggcgcgctcagtccgaggccagacaggggagacatggagaggatatcggtaccacccgcctacctctctgaaagactgtcttaagggagtatccaaccagcacttacaaagcagctttttgtggatgtgacactgggtggagaaaaagattcgatggaagtgtgtgctctgaacatcttagcttggatagcagggaagtctggaggagcgtcttgcctggagtggctggtcgccactagcctcttggggatccccaaggttgcctggctctgggtctcttggattcacagagcagtggggcataatcccagcacttcatttgatagtctgggccccttcctggagggaaagcagcagcaagacccagtggagacgatggcaaaggggctgatttcactttaggtaaatatggacagctgggccacgaggacaccaccagcttggatcggcctcgccgtgtggaatactttgtagataagcaactccaagtaaaggctgtcacctgtgggccgtggaacacctacgtgtatgctgtggagaaagggaagagctgacatgtgtacgtatatgtatatgcaacacctgtgagacccccattcaggtcaaggaaaaccattgcctgcaccccaagggccccatatttgcccctccccatcacagtcctgcccttcaccctcaagcacggtcctaaacttgtctgcactttagaaacacctggagagcattgaaaactctgctgcctaaggtcagcatcaatcaaaacaatgaaatcaatgaaacaatgaaaccagagcttctaggtgtgtggcctggatagtggtagattcaaagctccacccacctcatcccaggtacatttgatgtgcagctgagattggggcacattccaggtcatcgtcttctgtcagtcatttccctgctttcgtttgaattttaccattcttgtatgcagccttatacgacatagttgtgtttgcttttgagtgttagataaatggaatcctgtgtatgtgcttttgtgtcgtttttgtcactcagcattgtataatccatccttgttgggtcctggagttcatttttaatgctatatggtgttctgttgtatgaataatacctcaagtgatacagccttgttgatggtcatttttattgtttctgattttggtcattccacataattctttgtgcagtcttctgcacatgtgcacaagttcctttgcagaacattgagttgaattgctaagtcaggagatacctttaattttactagataactgttgcccccagcagggtggggtctactgtggctaaaatgtcaggtagatgcacactggttttaattggcatttccctggatactgatgaggttgagtagcttttcatttgttttggatggctgggcatggtggctcacacctgtagtcccagcactttgggaggctaagcagggagattgcttgaggcgaagagttcatatgtttattggccacttggagtttttctgttgtcaagtgcctgttcaagttttctggccttttaaaatgttctgtattttccttagtgatttttcttttggatatttcagatacaagtcttttgagagttagtattcagagtatcttctgctacaatgtagtttgtttcagtctctcttggtattaccaattttaatacttaggtgatgcttactccatgccaggtaaggctcaaagtgctttacaagtatcaacttattttgataaaataagcttatcagtagttttctttatagttaaattctatttgtgcatgtgtgtgtctgtggtttagcaaatgtttcccacccatggggtcttttttattgtggtaaaatatactgaacataaaatttatgttcaataaaaaacaaaaattgtttttaaccattttaaaaaaaaagt

SEQ ID NO: 276380 - DNA, 1893 bp, Homo sapiens
cggcttgggccccgcccaccaccccagcacgttcgaggagggctaagcccagcgtgaggctcgttggctcgacagaggcacgtgacgggtcctgagccaatccgtggaaggtaaaagctgcttcctgttgggacacgagtccggcgcgtgtcgggttttgagctgccgcggtcccgggactgagataaggcagctccagcccctggaaggccagagacttgccagtgtcccactagcgggctcttcgcaagaatccccccgggcccgccgcagccaggcggcggccggcagagggcgctgctcgggcatggcggaggagcggccgggggcctggttcggcttcggtttctgcggcttcgggcaggagctgggctccggacgcgggcgccaggtgcacagccccagtccgctgcgggcgggcgtcgacatctgccgcgtgagcgcgagctggagctacaccgctttcgtgacccgtggaggccgcttggagctgtcgggctcagccagcggcgcggcgggccgctgcaaggacgcgtgggcctcggaggggctcctcgcggtgctgcgcgccgggccggggccggaggcgttactgcaggtctgggcggccgaatcggcgctgcgtggggagccattgtgggcccagaatgtggtgcccgaggccgaaggggaagacgatccggccggtgaggcccaggctgggaggctacccctgctgccctgcgcccgtgcctacgtgagcccgcgggcgcccttctaccggcctctggctccggagctgcgggcacgccagctggagctgggcgccgagcacgcgttgctgctggacgctgctggccaggtgttctcctggggcgggggcaggcatggacagctgggccatgggaccctggaggcagagctggagccacggctgttggaggcgttgcagggcctagtcatggctgaggtggccgcggggggctggcattctgtgtgtgtgagtgagactggggatatttatatctggggctggaatgaatcagggcagctggccctgcccaccaggaacctggcagaggatggagagactgtcgcaagggaagccacagaactgaatgaagatggttctcaggtgaagagaacgggtggggctgaggatggagcccctgcccccttcatagctgtccagcccttcccggcattactggatctccccatgggctcagatgcagtcaaggccagctgtggatcccggcacacagctgtggtgacacgaacaggggagctctacacctggggctggggtaaatatggacagctgggccacgaggacaccaccagcttggatcggcctcgccgtgtggaatactttgtagataagcaactccaagtaaaggctgtcacctgtgggccgtggaacacctacgtgtatgctgtggagaaagggaagagctgacatgtgtacgtatatgtatatgcaacacctgtgagacccccattcaggtcaaggaaaaccattgcctgcaccccaagggccccatatttgcccctccccatcacagtcctgcccttcaccctcaagcacggtcctaaacttgtctgcactttagaaacacctggagagcattgaaaactctgctgcctaaggtcagcatcaatcaaaacaatgaaatcaatgaaacaatgaaaccagagcttctaggtgtgtggcctggatagtggtagattcaaagctccacccacctcatcccaggtacatttgatgtgcagctgagattggggcacattccaggtcatcgtcttctgtcagtcatttccctgctttcgtttgaattttaccattcttgtatgcagccttatacgacatagttgtgtttgcttttgagtgttagataaatggaatcctgtgta

SEQ ID NO: 276381 - DNA, 1812 bp, Homo sapiens
cggcttgggccccgcccaccaccccagcacgttcgaggagggctaagcccagcgtgaggctcgttggctcgacagaggcacgtgacgggtcctgagccaatccgtggaaggtaaaagctgcttcctgttgggacacgagtccggcgcgtgtcgggttttgagctgccgcggtcccgggactgagataaggcagctccagcccctggaaggccagagacttgccagtgtcccactagcgggctcttcgcaagaatccccccgggcccgccgcagccaggcggcggccggcagagggcgctgctcgggcatggcggaggagcggccgggggcctggttcggcttcggtttctgcggcttcgggcaggagctgggctccggacgcgggcgccaggtgcacagccccagtccgctgcgggcgggcgtcgacatctgccgcgtgagcgcgagctggagctacaccgctttcgtgacccgtggaggccgcttggagctgtcgggctcagccagcggcgcggcgggccgctgcaaggacgcgtgggcctcggaggggctcctcgcggtgctgcgcgccgggccggggccggaggcgttactgcaggtctgggcggccgaatcggcgctgcgtggggagccattgtgggcccagaatgtggtgcccgaggccgaaggggaagacgatccggccggtgaggcccaggctgggaggctacccctgctgccctgcgcccgtgcctacgtgagcccgcgggcgcccttctaccggcctctggctccggagctgcgggcacgccagctggagctgggcgccgagcacgcgttgctgctggacgctgctggccaggtgttctcctggggcgggggcaggcatggacagctgggccatgggaccctggaggcagagctggagccacggctgttggaggcgttgcagggcctagtcatggctgaggtggccgcggggggctggcattctgtgtgtgtgagtgagactggggatatttatatctggggctggaatgaatcagggcagctggccctgcccaccaggaacctggcagaggatggagagactgtcgcaagggaagccacgaaatcctagtttagaggttgcccgtccttgttgaagaaacatttctacacaaatacctgttgcctataccagatggccataccaatacccaaatactgacaaacgtttaaaagaatttacggtactcccttcactttagaaatgttaacagttcaagtccaacagaacttaaaggaaaaaaagagaaatgttaacagtaagtaaggcatttatttaacataatctcaactaaagtccaactaaagagcttccccaggcaaacactccttttgcacttcattttgaagacaaaagaatgcacaagttaaaatcctaatattaccattttattaaaaataacttttaagatccaatctgtggccaatattcgatctggatgcaaaaccctggcttccagacaggccagccaggggcactgctctgaaggtcattacttaagtatcccagtctcctcagtctgacagacctacccctgcccagccaatctccacataacagctagttgttcataataaatcccatcagatccccgcttaactactccccttcaaaggctccactgccctcaggaaatagttcaaccaccttctgtagaaaggccttctaaaacctctctccgagtctgtctgctaatctctcccacttgacactccccaggtctctggccagctgaacttcccgggcatttcctgaacaatgcccctcaataaaccacatgcaac

SEQ ID NO: 276382 - DNA, 2443 bp, Homo sapiens
tttttttttttaggagttagacatttatttttaacaattaaccactgaattcattttcagaaataggcctgaattgcttgttaatttcattacaggaagtaactctaaaagccaattccacttccaaactataattaccatcatctgaatttaacagggaaagacatcttccaagacttcttttgggtggatgcttagttttagaatagccaactttaccctaacccatgtacaagacagttctccaggtggccttggactgacccagttctcccttcttccttgcttgtagttcttaagaataactgtagaatgcactgggaatgcaatatcctgatatggaggaactgcctgaaacaggttggccttgttgttgtccctcctagggaatgtaacatcttgatttagggaactgtttgagacagcgaggttgtgttcctctttcccctggaaggaggatgtactttaaagctttgcccaatgagttatgtggctcctatggtatataacccaaggcaggctgtggtgcaagtggggcacgtacaatcaagactccatcagccccgccctgggcagctttcttgagccctgggggactggctcacaatggagccagggcctcttttgtcccttgcttcctgtctgtaagtaataaatctgcttcatgtaatgtattgggtgtgagtgtgttctgtcacaatggaatcagacaggttggtaaccagtgtacactgaacctgcttggcaccatgtagccctgggaaaggagaaaggcggtcacagcttgccctatatggtgatgccagcacactgtgcactgtactgtgcaacagaaaaaggtgcactgaggaggatcggctgcttcttcccattgttgcttctttagtaaatcccctatgagtttttagtcgctttctaatctacaagttaaaggatatctcattaatttttacagatatatacatatactgtaacaataggaagtctttcaccaaccactaatactgtaaagaaagcattgtatcgatctagtattatttaatgaagacggacagcaattttaatacaatcttcttttccaagacctttgacagaccttaggcccattttccacctttatgtctaggaaagtataagtaaaacacttttgagggcataaaaaacacaagcttcttgttaaggtgtatcagtagccagggaaatctgctgtgcccctttgagggtcatctaactaaggcatggagaaagaaactgcctcaagtcagtttctatcacctctgcagggaagctggccatgcaaaccaggacatggttcaaagtgaaaaagagtgtggttaataatcatgccagaacaccaggtataagatgtaagggcaagtcaggcattctgtacattgcttctcccttcagtttggaaaactcactgcagtagggttttgacttatcgtttcacaagacagctaggaaggccaggcacagtggctcacacctgtaatcccagcactttgggaggccaagacgggtggatcacgaggtcagatcgagaccatcctggttaacacggtgaaaccctgtctctacttaaaatacaaaaaatagccgggtgtggtggcgggcgcctgtagtcccagctactcaggaggctgaggcaggagaatggcgtgaacccgggaggcggagcttgcagtgagccgagatcgcgccactgcactccagcccgggtgacagcgcgactctgtctcaaaaaaataaaaaaaataaaaaaaaataaaaaacaagacagctaggaggaaagcctgtatgctttggaaaatgcatatcttgtgtgtttacccttttaaaggtaactatactttgaaacaggtgaactgcagaaagttaacaaagacttctttttttaccatgtttacctttctaagaattctatgcatttcctagggcatacatgcaaaagccttcacatttccccctttttaaaagagatatttctcaaacttatacgtatacagttcagtagtgttaagtacaatcacacttgttttgcaacagatctctagaattcttgcaacacaagctctgtacccactaaatacaaattcaccctctccccttcccccaaccgttgcttggcaaccacctttctactttctattgtatgattttgactactttgcatacttcacatggaggaatcatatagcatttgttcttttgttggctggcttatttcacttggcataatgccttcaaggttcatccacattgtacatttgacaggatttccttctttttaaaggctgaataatattccattgactgtatataccacatttcctttatctattcatctgttgatggacatttgggatgcttccagaacctcttggctattgtgaataatgctgctatgaacatgggtgtacaaatatctctttgagatccc

SEQ ID NO: 276383 - DNA, 253 bp, Homo sapiens
attgcattgtccctgcaactgtcgtctattgtagctgactgctgaagaggaaatgaaaccaaatagaaggttgtttgtaagcaatctctctgctcttcttaaaaataaattagggatatcaggatcggctcatggctagaatgaggacatagagagacatgcagaaattctgtttttatattgaggtgaagaagtgggtagggagggctttaaggattatctaatccaaccttctcattttgcagcagtggaa

SEQ ID NO: 276384 - DNA, 317 bp, Homo sapiens
cctagaaaagaaaacgcagagcacatcaaattaagttttctcttaatgattctttttctcctttttttatggcagggtttcactctgttgcccgggctgtagtgtagtcttggctcactgcaacctctgcccccaccccaggctggagtgcagtggcatgatcacagctcactgcaacctctgcctcctggactcaagctgtcctcccacctcagcctcccaagcagctgggattatgggtgcccatgaccacacccagctaagtttttaaatttttttagagattgaatctttctttttctcagcctggtctcaaa

SEQ ID NO: 276385 - DNA, 281 bp, Homo sapiens
gaaaagtctgtatactttataattgcaattatatgacattctggaaaaggcaaaactcaccagtggtaaaaaatatcattaggtgccaaggttcagggaaacacaagggattaattagggttgtgaaattattggatacatggcattatgcatttgtccaaatccacagcacttacagcacaaagaacaagtcttaatgtacgcaaactttaaaaaaactcatttagaaggttgatggatctgaggatggaatgcaggaggtgaaaaaataatataactgt

SEQ ID NO: 276386 - DNA, 388 bp, Homo sapiens
aggaatcctgcccctttcatccaccactgtgttcctggcttctactgccatgcccacatatcctggcggagattcgaagttgctttgttgaatgagtaaaggggggaattaacaaacttccctggcccctgtgtttatgaaataagaaaatgtggccgggcacggtggctgacgcctgtaatcccagcactttggggggctgagacaggtggatcacgaggtcaggagatcgagaccatcctggctaatacggtgaaaccccgtctttactaaaaatacaaataaattagccgggcgtggtggcaggcgactgtagtcccagctactcgggaggctgaggcaggagaatggcgtgaacctgggaggaggagcttgcagtgagccgcga

SEQ ID NO: 276387 - DNA, 417 bp, Homo sapiens
gatagttttttgtttataagtatgaacagtaaaatagtaagaagctaaagttttctgtggtgtgaacaccacttctaaactacattttgatgtcaaatttttagaggcagtagattaaataaaagtagatggatacagtattatagatctgatcatcacattaggtctataaacctgagagaacagctgctgtcctagttttcaagcaaataaaggtaacaatgggacattattggagctaaaaaagatatagcctatcaactcaaataagccccttggtatagaattagcaccatgattcctatactcatttaacaaacacttattgagctcttactgtgtgccagaacctgagattaaagtaatgaaaatgatagtccatcagtctggccaacatggtgaaaccttgtctctact

SEQ ID NO: 276388 - DNA, 502 bp, Homo sapiens
tcacttcttctgtgggacgctgccctatcccccagttctgctcactccagtgtattccgtatctaggctcctcagcagccaactcccaccttcctgactctagctggtgtccactgagggacacactccaagtcagttcccaggtcctcaaataccagctgaatgtctaacttctgggtgtgacattccagcccctagaagcctggcctctgctgctcccctgtccttccatgggtccactcctccttgcgccgggggggatgaccctcacctcaccttccggtcgcagctctagctgcctcctccctgaagccctctctgactgccctgccgattccgggccctcgggagcttccgcgagcagggccgtggcgcaatgcatctctgtgcccggcaccaagaaccggcccgggttatagggggcgccaataaatctttctggaacggagcccccgctctgtccgggtccccgcatgaagcctcagtttccagcgaccgcgct

SEQ ID NO: 276389 - DNA, 414 bp, Homo sapiens
acagtcttttttttcctccttagcatatatccagatagttatagatatttcatatatatgaaaatatatagattatctatacacacctgtatgtataaatacatacacatacattttatgcatttaccatttctatattctagtgttgtaagaacactcatttgtcacttctaatgaggcatgcatggccttcagggtaaaaagagaccatttaaatggagctgttcttaggtgacatgttttttctactattactgtaatatggatggatatcagtgagaatcagagaatatttttccttattggttttaatccttttctatcacatttttaaaataactataatttaggtcttagccaataggtaggccttttattttttctgaagcagatgattctggaaagaaataatcg

SEQ ID NO: 276390 - DNA, 161 bp, Homo sapiens
gaacaatccatttgaaaatggagagttagggctaggtacggtggctcatctgtaaacccaggccttagggaggtcaaatggaatcgcatgagcccaggagcttaagaccagcttgggtaacatagtgagacccctgtttttactaaataaataaataaagc

SEQ ID NO: 276391 - DNA, 340 bp, Homo sapiens
aggatctctctgttgctcaggctagagtgcagtggcaagatctcggctcactgcaacctccgcctccgtggcacaagcagtcctcccacctcagcctcctcagtagctgggactacaggagtatgccaccacacctggctagttttttgtatatttttttgtaggtacaggttttctgcttgttgcttaggctggtcttgaactccaggactcaagcgatcccccttcttcggcctcccaaagtgttgggatgacaggcgtgagccaccatgcgtggcccatttttattttttaacttgtcgttttgaaaaaatttcagacttaataaagttgcaaaagt

SEQ ID NO: 276392 - DNA, 497 bp, Homo sapiens
ctgcctcagcctcctgagttgctaggactacaggcacatcccaccatgcctggctaatttttaaaatatttttggaacccccatctcttgaaaaaaagaaaaaagtggataaagtaattctaataaggggttgggaggtttagatgaggtaatatgttaagcactctggtgtctaacgcacagtgggtcaattaagtgttattattatgattgtgattatttctagaaaataaggactataattgggtcctggtaattgtctttttttttttttaatcattttaaagtttttctggaaagagaaagcctctgacatgggctgaaggtgctctctcttctgagtcctaggaattgtacaaataggtactccttggaatctgtgattttcattgtttattattattctagaaaccctaatctgctctaacagtgttgggctcatagtagacagcacatatgtatattaagtgagcaaataaatgaatgtaaatgtgttc

SEQ ID NO: 276393 - DNA, 798 bp, Homo sapiens
acccgagaacggcttccggcgggagctgtgcagctccttatcatggggacaattcatctctttcgaaaaccacaaagatccttttttggcaagttgttacgggaatttagacttgtagcagctgaccgaaggtcctggaagatactgctctttggtgtaataaacttgatatgtactggcttcctgcttatgtggtgcagttctactaatagtatagctttaactgcctatacttacctgaccatttttgatctttttagtttaatgacatgtttaataagttactgggtaacattgaggaaacctagccctgtctattcatttgggtttgaaagattagaagtcctggctgtatttgcctccacagtcttggcacagttgggagctctctttatattaaaagaaagtgcagaacgctttttggaacagcccgagatacacacgggaagattattagttggtacttttgtggctctttgtttcaacctgttcacgatgctttctattcggaataaaccttttgcttatgtctcagaagctgctagtacgagctggcttcaagagcatgttgcagatcttagtcgaagcttgtgtggaattattccgggacttagcagtatcttccttccccgaatgaatccatttgttttgattgatcttgctggagcatttgctctttgtattacatatatgctcattgaaattaataattattttgccgtagacactgcctctgctatagctattgccttgatgacatttggcactatgtatcccatgagtgtgtacagtgggaaa

SEQ ID NO: 276394 - DNA, 749 bp, Homo sapiens
acccgagaacggcttccggcgggagctgtgcagctccttatcatggggacaattcatctctttcgaaaaccacaaagatccttttttggcaagttgttacgggaatttagacttgtagcagctgaccgaaggtcctggaagatactgctctttggtgtaataaacttgatatgtactggcttcctgcttatgtggtgcagttctactaatagtatagctttaactgcctatacttacctgaccatttttgatctttttagtttaatgacatgtttaataagttactgggtaacattgaggaaacctagccctgtctattcatttgggtttgaaagattagaagtcctggctgtatttgcctccacagtcttggcacagttgggagctctctttatattaaaagaaagtgcagaacgctttttggaacagcccgagatacacacgggaagattattagttggtacttttgtggctctttgtttcaacctgttcacgatgctttctattcggaataaaccttttgcttatgtctcagaagcttgtgtggaattattccgggacttagcagtatcttccttccccgaatgaatccatttgttttgattgatcttgctggagcatttgctctttgtattacatatatgctcattgaaattaataattattttgccgtagacactgcctctgctatagctattgccttgatgacatttggcactatgtatcccatgagtgtgtacagtgggaaa

SEQ ID NO: 276395 - DNA, 1209 bp, Homo sapiens
gcttatcttcactaacagtaagagaaatgcaaattaaaattactctgagatgctgttttgcctgtcacgttgggaaagcttaagaaatttgagtatacctgtgtcgcaaagtgttgggattacaggtgtgagccaccacgcctgacctacaatattttccttgtctcaaaaagagaccactcgccttagctattactctccagtcattccgttctcccactcattccattctcttctccagccctaggcaaccactgatcagttttttctcgcgatagatttacctactctggacatgtcatataagtggaatcatacaatatacagtcctttatgactgtcttcttagcacaatgcttttctgttttgttgtagcatatatcaatagttactctttcttttttttttgagttagggtcttactctgtcacctaggctggagtgcagtggcgtgatcttggctcaagtgattcttttgcctcagcctcccaagtagctgggattacaggcatgtaccaccaggcacggctaattttttgtatttttattagagacggggtttcaccattttggctgggctggtctcaaactcctgacctcaagtggtccacccacctcggcctaccaaagtgctgggataacaggcgtgagctaccgtgcctgagcaatagtttaatgacatgtttaataagttactgggtaacattgaggaaacctagccctgtctattcatttgggtttgaaagattagaagtcctggctgtatttgcctccacagtcttggcacagttgggagctctctttatattaaaagaaagtgcagaacgctttttggaacagcccgagatacacacgggaagattattagttggtacttttgtggctctttgtttcaacctgttcacgatgctttctattcggaataaaccttttgcttatgtctcagaagctgctagtacgagctggcttcaagagcatgttgcagatcttagtcgaagcttgtgtggaattattccgggacttagcagtatcttccttccccgaatgaatccatttgttttgattgatcttgctggagcatttgctctttgtattacatatatgctcattgaaattaataattattttgccgtagacactgcctctgctatagctattgccttgatgacatttggcactatgtatcccatgagtgtgtacagtgggaaa

SEQ ID NO: 276396 - DNA, 918 bp, Homo sapiens
acccgagaacggcttccggcgggagctgtgcagctccttatcatggggacaattcatctctttcgaaaaccacaaagatccttttttggcaagttgttacgggaatttagacttgtagcagctgaccgaaggtcctggaagatactgctctttggtgtaataaacttgatatgtactggcttcctgcttatgtggtgcagttctactaatagtatagctttaactgcctatacttacctgaccatttttgatctttttagagacggggtttcaccattttggctgggctggtctcaaactcctgacctcaagtggtccacccacctcggcctaccaaagtgctgggataacaggcgtgagctaccgtgcctgagcaatagtttaatgacatgtttaataagttactgggtaacattgaggaaacctagccctgtctattcatttgggtttgaaagattagaagtcctggctgtatttgcctccacagtcttggcacagttgggagctctctttatattaaaagaaagtgcagaacgctttttggaacagcccgagatacacacgggaagattattagttggtacttttgtggctctttgtttcaacctgttcacgatgctttctattcggaataaaccttttgcttatgtctcagaagctgctagtacgagctggcttcaagagcatgttgcagatcttagtcgaagcttgtgtggaattattccgggacttagcagtatcttccttccccgaatgaatccatttgttttgattgatcttgctggagcatttgctctttgtattacatatatgctcattgaaattaataattattttgccgtagacactgcctctgctatagctattgccttgatgacatttggcactatgtatcccatgagtgtgtacagtgggaaa

SEQ ID NO: 276397 - DNA, 384 bp, Homo sapiens
tcccttgagtgtcactgtacattgtatatagttgaactggctttgaattagtggcataagggcataaaagaggaaacatttatagatttgaggagtagcatgttcttttgtaatgttattcagtcactgccaatttatttttaaaattaaagaactcaaatatttcaggtagtggtttttttttcttctatatagataatttaagtattttcttcttaaagctgctagtacgagctggcttcaagagcatgttgcagatcttagtcgaaggtaagatgttatggagtttcatgatatgcataatttacaggaatacacaagaaatgcatctatcatgggaacttaaattatccgttgctgaggttcctacgtgaatcacacagg

SEQ ID NO: 276398 - DNA, 734 bp, Homo sapiens
ggacttagcagtatcttccttccccgaatgaatccatttgttttgattgatcttgctggagcatttgctctttgtattacatatatgctcattgaaattaagtgagtattttttattgttgtcaagtatgttttgatttctggggacttacttttaagggcatcagcaggatggatagtggtcaagcttctagcagtttcgcttatgtcctgtgtaacttagatcacatcttttccttaggtgtcttcatctgaaaaattaaggggattgggttcaataagtatttcttaccacaatgtataatgcagactggaaaacaatttaaattccctactgctgacctgatgagtgaaacagaaaagagaacagtaagaaagagatctgagccaccactgctattgccgagagagggaggagaagaggacgtaggcgtgaaacaattttttaaaaataaagccttttaggaaataggctttacagctgctttaagcttaacatgttatggcatatgattctttggctacccaccttttaaatattagtctttactagaatttgtccttattgttcttgctgttttatgtattttccttaaaaatcacatgcaagtatttgtttttgtttgctacttctgtgggattcctagatttttatttctagcccacatctctattgaattccaaaaggcgtatcttcctgacttctataggtgtctactttaactgaacctattt

SEQ ID NO: 276399 - DNA, 489 bp, Homo sapiens
ctaactctgtagcccatgttggagtacagtggcatgatcatagctcattgcagccttcaacacctgggctcaagtggctctcctgcctcagcctcctgagttgctaggactacaggcacatcccaccatgcctggctaatttttaaaatatttttggagtcaggggtctcaccatattgcccaggctggtttgaactggtttcaagcgatcctcccacaccccgagtagctgaaattacaggtgtggagccaccgtgcccagctgttattgtcttttttcataaaggccattctatggtatgcagtggtatttcattgtggttttaagttattttccttatgactaattgagcacctttgcctatgttgattaaccattcagatcacctcttttttaaaatgcttgtaaaaatcttttaaccatttcctgtttttctgtattaatctgtaacagttctttatatataagtatcttctccttcttagttg

SEQ ID NO: 276400 - DNA, 683 bp, Homo sapiens
aggactataattgggtcctggtaattgtctttttttttttttaatcattttaaagtttttctggaaagagaaagcctctgacatgggctgaaggtgctctctcttctgagtcctaggaattgtacaaataggtactccttggaatctgtgattttcattgtttattattattctagaaaccctaatctgctctaacagtgttgggctcatagtagacagcacatatgtatattaagtgagcaaataaatgaatgtaaatgtgttctagagagactggtttgtgaattgaaagaattgtgatgatctaattaatgttttggtttcaggtttgaaagattagaagtcctggctgtatttgcctccacagtcttggcacagttgggagctctctttatattaaaagaaaggtacatttgtataggatattattctaaatccccccatgacacctttgggaacatgaaagaaacccgtcagacacatttgctttcaagggtatgaaaacttagatgagcagggctggagttttgatagtacactttctttatgtttcagactttttcttctgtttcattttttttacttccttccttaatgctactaaattgaatcagaagtggttgtgaatgaaacagagattcagtcaggcatgtttgatgcttattacaaacccattgaaatag

SEQ ID NO: 276401 - DNA, 1209 bp, Homo sapiens
cataccccacacagtctccaggcgggaagaggacttccttcttcgtgatcaatatttgcgtagcactttgcaagtgttttcgggttcatcattgcatacaaccagaggaggaaaagaaaagcaactggatccccttccgccacctccaggtctcctaaaggaagaagtccttgggaacccatactgtgtgatccagggtccttcactggcctctccctcaggtcatccagttgtcaatttgttgctttggcttagtttcaccattagcagtactcttcttggacacaacctccagagtaaaagcaaatgccggatgcggtggctcacacctgtaatcccagcactttgggaggcggaggtgggtggattgcctgagctcaggagttccagaccagcctggacaacatggtggactttccagaaaatatgtagctacccagctacacctgcactggggtcaggatgatccccagggggctcagaacaccagatcaacagtgaagccacagttgccgagctccacatcatacgttatggctgtgattcctgtgatagcttgagtgaggccgctcagaggcctcagggcctgactgtcctgggcatcctaattgaggtgaaatgctgagccttggtgtaggaatcttggttggctctctctgacttctgctggccattttcttcatggctagaaggcttcagaacaagaggctggaaaatcagaagagcgtggtcatcacctcagcatgagccaccactgaggcataaactccctcttagataccttggatatggatgccttcccctcgtgcctccagaggtgctttcccctcatgtctcaccacccctcagggaacctctaaaatggggtgcagggactggccggaattactgtaggagtagtaggcgcttctcctctggacatcccctgcagagaggtatggacccaggctctcattcaaggaagaacagcagagccttcagcccctcaaaacatgtaggaggagatcagggcatccctgtgttgttagtgcagaggacaaactgtgtttagttttaggggaagtttgggatgtaccccaaagtcctccaccatctcacctttatgtccctttccctagatatattgcaggatctccccttaggagaaagagttgctgttggggttatatatttttgctcaacatatttggaaactaaagtttctggagg

SEQ ID NO: 276402 - DNA, 406 bp, Homo sapiens
ctccttttacagagaaattgtaattttgttgttgaattatacatttttaagtcaagacttgaagtatagttactacatcatcatatataaaatgttttctttgggtatggctgctgcagcccttagaaaccaacgtcatcactgagagtgtcacagactttaacagtccagccttctgttccgccagggcacttgaggatctgttctatttgctgctttaaaataacagccctcccttattctgaggagaggcaaggatccatcggcctggactatttatcagtggtttctgaagacaggagaatgtttattttgtgagaacatttgtcctaccttaatttgcaagggacttaaaaagtagccaccatgaaacacaatagtaaatatttgattcttgtgaaacagg

SEQ ID NO: 276403 - DNA, 511 bp, Homo sapiens
ccagattgagaaggtatggtggataaagcgatgctgccttgggaaaatatccaaatgtaactcaaagaaccacaagaccctataactctcaatttgaagatggcgtgataattttataccctgaacctgttctctgcttgggacacagaacaaggatagatacaccattcggagcctgttttctgaccacaggagaatgaaccaacacattgaaaacaaacagatcaccagaaaatttctactctttaaaaaatagtcagcatacttccaaataatccacatcaaaatagaattaacaaaaaataatataagttagttggtctacaatcaaaaacaatattcccatggttatagacaggaggagccctcttccatccgccgctgcctctatgaaattccagcatcatttttctggttttcatttggaaacaaagccactgaagagtattttgaagagtctgaaatccataaaacagagagcaaataaactgaaaatagaaccggaaaactt

SEQ ID NO: 276404 - DNA, 805 bp, Homo sapiens
tcttctgtttctctttgaagtgcacatagtggccctaaaggcataggatattctaaagatgtaccttgtccatctgagttatcggaagtcaagccgttaggactgtgctcttctgagctctgcctgtaaagccctgcagacaacctcctctcggcatgctgcagtctctcatagccagcttggttgcaaaggaactccatctgctttgccatcaccttttcaggctgctactgaaagtggactcacagagggctgtgttccagtggacatgttattcattccgtctaagcagaaggattccaacctcacttactaactagctgaagaaacgtttccctagagatttcattccaaatggtaggttccttaaggcacacctaagctagcaggcgatctttttctccatgtccatctcatatattctaggaattaaagttcaaaatctgttttttaatgtttaacataccctgtaaggaggaacactatttaaggacaacagattatcttgattacttctatgcaatgtgtatactgctattttttttttaaatcaaataagtaactatcctttaagggggaacaacctactacataaataagagctttccaggtagaaaaatcagacaagtcaatgaattataacttcattccacccaagccttcatgtatagatcaggaaaacacagtatttaggaacgaaagatcttactgagcttgaacacagcactacttgtattagtgtaccctaatgcattaataatgacaagcaaaaaaatgtttctctttcctttacatgtcaaattat

SEQ ID NO: 276405 - DNA, 809 bp, Homo sapiens
ttgttttcctcagtaaatattagcaataacttaaatgtttataagattcatctcatggattcttggggatatgcatggaatcaggtacagacagtgcaaaggtggtgtgcctagtgagcttggatgtatcaaacagctgtaagaaaatctctccaaccttctctgaataaaggaggaatgtggtgtttattgaggaacaggcaacccttacatttgaataaaagatgccatatactgaaagtggactcacagagggctgtgttccagtggacatgttattcattccgtctaagcagaaggattccaacctcacttactaactagctgaagaaacgtttccctagagatttcattccaaatggtaggttccttaaggcacacctaagctagcaggcgatctttttctccatgtccatctcatatattctaggaattaaagttcaaaatctgttttttaatgtttaacataccctgtaaggaggaacactatttaaggacaacagattatcttgattacttctatgcaatgtgtatactgctattttttttttaaatcaaataagtaactatcctttaagggggaacaacctactacataaataagagctttccaggtagaaaaatcagacaagtcaatgaattataacttcattccacccaagccttcatgtatagatcaggaaaacacagtatttaggaacgaaagatcttactgagcttgaacacagcactacttgtattagtgtaccctaatgcattaataatgacaagcaaaaaaatgtttctctttcctttacatgtcaaattat

SEQ ID NO: 276406 - DNA, 2146 bp, Homo sapiens
ctcccacctggcactgcccccaaccaaagtcatgagggcaaggctccggttcctgccctcacagggtcccagaagcaagggcagtgaggacctggcccacgtccctggcacgggctgtctgattctccttcgctgtggcgggaagatggccggatttgaaggcctccgctgctcactgctgtgccttgatcggcctggacgagcccgcccacacctccatcatacccagtgtgaagaggggctggggacccaccactcctgagaacagcatccttgggaagacccagctaggcagaagaggcctggaccttggcgcacacagacccaggaacagatgagcagggatgtctgcatccacacctggccgtgcacctactacctggagcccaagaggcgatgggttactggacagctgtccttaacatcgctgtcgctcaggttcatgactgacagcactggagagattctggtcagcttccccctctccagcatagttgagatcaagaaggaggcttcacattttatcttcagctccatcaccatcctggagaagggccatgccaagcactggttcagctccctgcggccaagtcgaaatgtggtcttcagcatcatcgagcatttctggagggagctgctgctgtctcagcctggagccgtggcagacgcatctgtcccaaggacccggggcgaggagctgacgggactcatggctggatcccagaaacgcctggaggacacggcgagggtcctgcaccaccagggccagcagctggacagcgtcatgagaggcctggacaagatggagtcagacctggaggtggcggacagattgctgacagaactggaatctcctgcttggtggccctttagctccaagctttggaagacaccaccggaaacaaagcccagggaagatgtctccatgaccagttgtgaaccctttgggaaagaagggatactgataaaaattcctgctgttatttcccacagaacagagtctcacgttaaaccagggaggctcaccgtccttgtgtctgggttggaaatacatgactccagttctttgctcatgcacaggtttgaaagagaagacgtggacgacatcaaggtccactcaccttacgaaattagcatccgccagcggtttattggaaagccagacatggcctatcgtttgatatctgccaagatgccagaggttatccccattttagaagtgcagttcagcaagaagatggagctgttagaagatgcattggtgctcagaagcgcaagaacctcttcccccgcagagaagagctgctcagtctggcatgcagcatctgggctgatgggccgtaccctgcaccgtgagccacccgcaggagaccaggagggcacagcactgcacctgcagacaagcctgccagccctttctgaggcagatacccaggaactaacccagatcctgaggaggatgaaggggctggccctggaggccgagagtgagctggagagacaagacgaagccctggatggcgttgcagcagctgtggacagggcaaccttgaccatcgacaagcacaacaggcggatgaagaggctgacctaggggcagaacgtccctgcattcctgtctcaccctgcacatcccgctgagatggagggctgggcggcagtgccagggctgcagaggcctgtggccctccggagtggtcttcctctggatggggctgctactgtggggctgcttctgcaccaggggcctccccaggtgtgcaccatgcctgcctcccacttggctgtccctgctgctgggcaggacccggccacatgttctgcggatgctgcagaagtgtggaccatggcgggaccccaaggacacttggcacaggcctggaagaggccgccctcgtcttgtctcggctccctttcatggacagactggccttcttagctgtactataaatttgtgagtgaagttagagcccagctcacttagccagctcactttgagggcatcctataaacacccaactgttcttttatcgtctcggttttagccaaaagtgaaattagcatgactgcatctttcaaacaaaaatattgatttctgcttttagggccccgtttccatccagaaataaagggaaatgctggcttc

SEQ ID NO: 276407 - DNA, 2173 bp, Homo sapiens
acctagatgggcgaatggggcccacaggggacctggagggcatggcaaggggccccaggggatgacgggtgtctggagaagatggtggggaatgagggagggtgtgaaatgaaggtgtggtgggagtgtgggtagggatttggggctgtgtacacatgagcagggctgaagtgggaggacatcggagtagtgacatgaggagtgttttgccaaacttgcaactggagttaccccaaaagtggcggcaagggagttccccacactatcctcaggtgggaccagttgggataccaaagaaagaagtgctaaatgcatgaggcagaagaggcctggaccttggcgcacacagacccaggaacagatgagcagggatgtctgcatccacacctggccgtgcacctactacctggagcccaagaggcgatgggttactggacagctgtccttaacatcgctgtcgctcaggttcatgactgacagcactggagagattctggtcagcttccccctctccagcatagttgagatcaagaaggaggcttcacattttatcttcagctccatcaccatcctggagaagggccatgccaagcactggttcagctccctgcggccaagtcgaaatgtggtcttcagcatcatcgagcatttctggagggagctgctgctgtctcagcctggagccgtggcagacgcatctgtcccaaggacccggggcgaggagctgacgggactcatggctggatcccagaaacgcctggaggacacggcgagggtcctgcaccaccagggccagcagctggacagcgtcatgagaggcctggacaagatggagtcagacctggaggtggcggacagattgctgacagaactggaatctcctgcttggtggccctttagctccaagctttggaagacaccaccggaaacaaagcccagggaagatgtctccatgaccagttgtgaaccctttgggaaagaagggatactgataaaaattcctgctgttatttcccacagaacagagtctcacgttaaaccagggaggctcaccgtccttgtgtctgggttggaaatacatgactccagttctttgctcatgcacaggtttgaaagagaagacgtggacgacatcaaggtccactcaccttacgaaattagcatccgccagcggtttattggaaagccagacatggcctatcgtttgatatctgccaagatgccagaggttatccccattttagaagtgcagttcagcaagaagatggagctgttagaagatgcattggtgctcagaagcgcaagaacctcttcccccgcagagaagagctgctcagtctggcatgcagcatctgggctgatgggccgtaccctgcaccgtgagccacccgcaggagaccaggagggcacagcactgcacctgcagacaagcctgccagccctttctgaggcagatacccaggaactaacccagatcctgaggaggatgaaggggctggccctggaggccgagagtgagctggagagacaagacgaagccctggatggcgttgcagcagctgtggacagggcaaccttgaccatcgacaagcacaacaggcggatgaagaggctgacctaggggcagaacgtccctgcattcctgtctcaccctgcacatcccgctgagatggagggctgggcggcagtgccagggctgcagaggcctgtggccctccggagtggtcttcctctggatggggctgctactgtggggctgcttctgcaccaggggcctccccaggtgtgcaccatgcctgcctcccacttggctgtccctgctgctgggcaggacccggccacatgttctgcggatgctgcagaagtgtggaccatggcgggaccccaaggacacttggcacaggcctggaagaggccgccctcgtcttgtctcggctccctttcatggacagactggccttcttagctgtactataaatttgtgagtgaagttagagcccagctcacttagccagctcactttgagggcatcctataaacacccaactgttcttttatcgtctcggttttagccaaaagtgaaattagcatgactgcatctttcaaacaaaaatattgatttctgcttttagggccccgtttccatccagaaataaagggaaatgctggcttc

SEQ ID NO: 276408 - DNA, 1550 bp, Homo sapiens
gagaaggcgcccggctccgagacgaaggctacccggcccggagcctggccgacgccggggacatcgacccccaggcctcggaagtggctgtcggcgagggcgcgcgtctcgcggtccatccagctcagcacgggtcgaaggaccctcctcctcacttccgccggagcggaaacggtgaggaccagcctcggaaccagaagacgcagggcgccgcgtttctgccccgccagcgcctggggctccgggcctgcacgcatgcgcgcggctcgccgcggtcttcactgcgcaggcgccgagcggccgaggcgccgcggtcggctctgggactcgtctggcgtccctcagaggcagaagaggcctggaccttggcgcacacagacccaggaacagatgagcagggatgtctgcatccacacctggccgtgcacctactacctggagcccaagaggcgatgggttactggacagctgtccttaacatcgctgtcgctcaggttcatgactgacagcactggagagattctggtcagcttccccctctccagcatagttgagatcaagaaggaggcttcacattttatcttcagctccatcaccatcctggagaagggccatgccaagcactggttcagctccctgcggccaagtcgaaatgtggtcttcagcatcatcgagcatttctggagggagctgctgctgtctcagcctggagccgtggcagacgcatctgtcccaaggacccggggcgaggagctgacgggactcatggctggatcccagaaacgcctggaggacacggcgagggtcctgcaccaccagggccagcagctggacagcgtcatgagaggcctggacaagatggagtcagacctggaggtggcggacagattgctgacagaactggaatctcctgcttggtggccctttagctccaagctttggaagacaccaccggaaacaaagcccagggaagatgtctccatgaccagttgtgaaccctttgggaaagaagggatactgataaaaattcctgctgttatttcccacagaacagagtctcacgttaaaccagggaggctcaccgtccttgtgtctgggttggaaatacatgactccagttctttgctcatgcacaggtttgaaagagaagacgtggacgacatcaaggtccactcaccttacgaaattagcatccgccagcggtttattggaaagccagacatggcctatcgtttgatatctgccaagatgccagaggttatccccattttagaagtgcagttcagcaagaagatggagctgttagaagatgcattggtgctcagaagcgcaagaacctcttcccccgcagagaagagctgctcagtctggcatgcaggttagtgaccgacaaggcagtgagcgcgtgcacagacttctaaaattacaggcagactcagcacgcctgtgggaaatgcctaacagatgcgtcacctagagcagctgctggcctccagcttgctagagacagctcgtttgtttatacataaaaacaattccagaccattttc

SEQ ID NO: 276409 - DNA, 1476 bp, Homo sapiens
ctcccacctggcactgcccccaaccaaagtcatgagggcaaggctccggttcctgccctcacagggtcccagaagcaagggcagtgaggacctggcccacgtccctggcacgggctgtctgattctccttcgctgtggcgggaagatggccggatttgaagattgctgacagaactggaatctcctgcttggtggccctttagctccaagctttggaagacaccaccggaaacaaagcccagggaagatgtctccatgaccagttgtgaaccctttgggaaagaagggatactgataaaaattcctgctgttatttcccacagaacagagtctcacgttaaaccagggaggctcaccgtccttgtgtctgggttggaaatacatgactccagttctttgctcatgcacaggtttgaaagagaagacgtggacgacatcaaggtccactcaccttacgaaattagcatccgccagcggtttattggaaagccagacatggcctatcgtttgatatctgccaagatgccagaggttatccccattttagaagtgcagttcagcaagaagatggagctgttagaagatgcattggtgctcagaagcgcaagaacctcttcccccgcagagaagagctgctcagtctggcatgcagcatctgggctgatgggccgtaccctgcaccgtgagccacccgcaggagaccaggagggcacagcactgcacctgcagacaagcctgccagccctttctgaggcagatacccaggaactaacccagatcctgaggaggatgaaggggctggccctggaggccgagagtgagctggagagacaagacgaagccctggatggcgttgcagcagctgtggacagggcaaccttgaccatcgacaagcacaacaggcggatgaagaggctgacctaggggcagaacgtccctgcattcctgtctcaccctgcacatcccgctgagatggagggctgggcggcagtgccagggctgcagaggcctgtggccctccggagtggtcttcctctggatggggctgctactgtggggctgcttctgcaccaggggcctccccaggtgtgcaccatgcctgcctcccacttggctgtccctgctgctgggcaggacccggccacatgttctgcggatgctgcagaagtgtggaccatggcgggaccccaaggacacttggcacaggcctggaagaggccgccctcgtcttgtctcggctccctttcatggacagactggccttcttagctgtactataaatttgtgagtgaagttagagcccagctcacttagccagctcactttgagggcatcctataaacacccaactgttcttttatcgtctcggttttagccaaaagtgaaattagcatgactgcatctttcaaacaaaaatattgatttctgcttttagggccccgtttccatccagaaataaagggaaatgctggcttc

SEQ ID NO: 276410 - DNA, 1038 bp, Homo sapiens
ctcccacctggcactgcccccaaccaaagtcatgagggcaaggctccggttcctgccctcacagggtcccagaagcaagggcagtgaggacctggcccacgtccctggcacgggctgtctgattctccttcgctgtggcgggaagatggccggatttgaaggcctccgctgctcactgctgtgccttgatcggcctggacgagcccgcccacacctccatcatacccagtgtgaagaggggctggggacccaccactcctgagaacagcatccttgggaagacccagctgtgagtgcacagcaggcacagtccctcaggcccaggtgctatggggccgcagcagcatcaacagcctctctcagctgctgcagcagctctttgggctgtggtgagaacgcgctggtgtccactctctggaagtcggggtgcgcaaccaaggaggccagcacctctgtgatgcgcccaacatcaaaggctgcctgttcgaaacccaacccagcaccgtcctcagcggctgcctccctcaggaccaggagcctcttctcagcgatgaccttgaggaagtggtaaaactcttcaaagttgatgcccgagcaggacctcatgatgacctgggcagagggaagaggccagtgagctaacaccatggacacagtccaagctgcaaaggacccgacatgcgcccagtccccaaggacgaagaagggaccattaagacagaggcactgagaagctgcgcggtgaccaagggagtctgagccatgcagcctaaaagccttccccaggagggtagcctccatgcgtagccaccccacctggcagtggtggtgccagtcgggcatggagtccctccactcgctgacctcctcctgcacggcgcatagctcctgctgcaagaagcgccacatgttggccaggttgaagccattgacccagttgtggttgatggagatggtgtcatcctggaaggggcacagtgcaggcaggcctgagcccatggcaggtgccccctgaccaacccacatctcctgcgccag

SEQ ID NO: 276411 - DNA, 308 bp, Homo sapiens
tcatgtcccatgtggaccagttctggtgatttgctggaacattctgaagtcattctggggctccctgccttctatgaaactattttcagaaggtaacatccctttctttccttttgtttctcttttttaggaactggagaatgcattgcatcttcctcagggacccccgttcctggtctggcttccctcacttccctatccctgatgtctctaatctaaactttcctcaattaatctgtgtcctctcctagtcaggggaaaaaacatgtgtgtgtacctaatgaatgtaagataatcatattcacaga

SEQ ID NO: 276412 - DNA, 311 bp, Homo sapiens
tggggcatcctctgcaagaggatcccacgagagtccattccccaccacaggcctccgctgctcactgctgtgccttgatcggcctggacgagcccgcccacacctccatcatacccagtgtgaagaggggctggggacccaccactcctgagaacagcatccttgggaagacccagctgtgagtgcacagcaggcacagtccctcaggcccaggtgaggattcagcagcagatgggattccaccccatctgtggcctctccagctgtccacaggccctgcaaaggcagggaggtggcaaaggccagcccaa

SEQ ID NO: 276413 - DNA, 2202 bp, Homo sapiens
gagaaggcgcccggctccgagacgaaggctacccggcccggagcctggccgacgccggggacatcgacccccaggcctcggaagtggctgtcggcgagggcgcgcgtctcgcggtccatccagctcagcacgggtcgaaggaccctcctcctcacttccgccggagcggaaacggtgaggaccagcctcggaaccagaagacgcagggcgccgcgtttctgccccgccagcgcctggggctccgggcctgcacgcatgcgcgcggctcgccgcggtcttcactgcgcaggcgccgagcggccgaggcgccgcggtcggctctgggactcgtctggcgtccctcagaggcagaagaggcctggaccttggcgcacacagacccaggaacagatgagcagggatgtctgcatccacacctggccgtgcacctactacctggagcccaagaggcgatgggttactggacagctgtccttaacatcgctgtcgctcaggttcatgactgacagcactggagagattctggtcagcttccccctctccagcatagttgagatcaagaaggaggcttcacattttatcttcagctccatcaccatcctggagaagggccatgccaagcactggttcagctccctgcggccaagtcgaaatgtggtcttcagcatcatcgagcatttctggagggagctgctgctgtctcagcctggagccgtggcagacgcatctgtcccaaggacccggggcgaggagctgacgggactcatggctggatcccagaaacgcctggaggacacggcgagggtcctgcaccaccagggccagcagctggacagcgtcatgagaggcctggacaagatggagtcagacctggaggtggcggacagattgctgacagaactggaatctcctgcttggtggccctttagctccaagctttggaagacaccaccggaaacaaagcccagggaagatgtctccatgaccagttgtgaaccctttgggaaagaagggatactgataaaaattcctgctgttatttcccacagaacagagtctcacgttaaaccagggaggctcaccgtccttgtgtctgggttggaaatacatgactccagttctttgctcatgcacaggtttgaaagagaagacgtggacgacatcaaggtccactcaccttacgaaattagcatccgccagcggtttattggaaagccagacatggcctatcgtttgatatctgccaagatgccagaggttatccccattttagaagtgcagttcagcaagaagatggagctgttagaagatgcattggtgctcagaagcgcaagaacctcttcccccgcagagaagagctgctcagtctggcatgcagcatctgggctgatgggccgtaccctgcaccgtgagccacccgcaggagaccaggagggcacagcactgcacctgcagacaagcctgccagccctttctgaggcagatacccaggaactaacccagatcctgaggaggatgaaggggctggccctggaggccgagagtgagctggagagacaagacgaagccctggatggcgttgcagcagctgtggacagggcaaccttgaccatcgacaagcacaacaggcggatgaagaggctgacctaggggcagaacgtccctgcattcctgtctcaccctgcacatcccgctgagatggagggctgggcggcagtgccagggctgcagaggcctgtggccctccggagtggtcttcctctggatggggctgctactgtggggctgcttctgcaccaggggcctccccaggtgtgcaccatgcctgcctcccacttggctgtccctgctgctgggcaggacccggccacatgttctgcggatgctgcagaagtgtggaccatggcgggaccccaaggacacttggcacaggcctggaagaggccgccctcgtcttgtctcggctccctttcatggacagactggccttcttagctgtactataaatttgtgagtgaagttagagcccagctcacttagccagctcactttgagggcatcctataaacacccaactgttcttttatcgtctcggttttagccaaaagtgaaattagcatgactgcatctttcaaacaaaaatattgatttctgcttttagggccccgtttccatccagaaataaagggaaatgctggcttc

SEQ ID NO: 276414 - DNA, 1601 bp, Homo sapiens
gagaaggcgcccggctccgagacgaaggctacccggcccggagcctggccgacgccggggacatcgacccccaggcctcggaagtggctgtcggcgagggcgcgcgtctcgcggtccatccagctcagcacgggtcgaaggaccctcctcctcacttccgccggagcggaaacggtgaggaccagcctcggaaccagaagacgcagggcgccgcgtttctgccccgccagcgcctggggctccgggcctgcacgcatgcgcgcggctcgccgcggtcttcactgcgcaggcgccgagcggccgaggcgccgcggtcggctctgggactcgtctggcgtccctcagaggcagaagaggcctggaccttggcgcacacagacccaggaacagatgagcagggatgtctgcatccacacctggccgtgcacctactacctggagcccaagaggcgatgggttactggacagctgtccttaacatcgctgtcgctcaggttcatgactgacagcactggagagattctggtcagcttccccctctccagcatagttgagatcaagaaggaggcttcacattttatcttcagctccatcaccatcctggagaagggccatgccaagcactggttcagctccctgcggccaagtcgaaatgtggtcttcagcatcatcgagcatttctggagggagctgctgctgtctcagcctggagccgtggcagacgcatctgtcccaaggacccggggcgaggagctgacgggactcatggctggatcccagaaacgcctggaggacacggcgagggtcctgcaccaccagggccagcagctggacagcgtcatgagaggcctggacaagatggagtcagacctggaggtggcggacagattgctgacagaactggaatctcctgcttggtggccctttagctccaagctttggaagacaccaccggaaacaaagcccagggaagatgtctccatgaccagttgtgaaccctttgggaaagaagggatactgataaaaattcctgctgttatttcccacagaacagagtctcacgttaaaccagggaggctcaccgtccttgtgtctgggttggaaatacatgactccagttctttgctcatgcacaggtttgaaagagaagacgtggacgacatcaaggtccactcaccttacgaaattagcatccgccagcggtttattggaaagccagacatggcctatcgtttgatatctgccaagatgccagaggttatccccattttagaagtgcagttcagcaagaagatggagctgttagaagatgcattggtgctcagaagcgcaagaacctcttcccccgcagagaagagctgctcagtctggcatgcagcatctgggctgatgggccgtaccctgcaccgtgagccacccgcaggagaccaggagggcacagcactgcacctgcagacaagcctgccagccctttctgaggcagatacccaggaactaacccaggaactggagaatgcattgcatcttcctcagggacccccgttcctggtctggcttccctcacttccctatccctgatgtctctaatctaaactttcctc

SEQ ID NO: 276415 - DNA, 1639 bp, Homo sapiens
ctcccacctggcactgcccccaaccaaagtcatgagggcaaggctccggttcctgccctcacagggtcccagaagcaagggcagtgaggacctggcccacgtccctggcacgggctgtctgattctccttcgctgtggcgggaagatggccggatttgaaggcctccgctgctcactgctgtgccttgatcggcctggacgagcccgcccacacctccatcatacccagtgtgaagaggggctggggacccaccactcctgagaacagcatccttgggaagacccagctgtgagtgcacagcaggcacagtccctcaggcccagattgctgacagaactggaatctcctgcttggtggccctttagctccaagctttggaagacaccaccggaaacaaagcccagggaagatgtctccatgaccagttgtgaaccctttgggaaagaagggatactgataaaaattcctgctgttatttcccacagaacagagtctcacgttaaaccagggaggctcaccgtccttgtgtctgggttggaaatacatgactccagttctttgctcatgcacaggtttgaaagagaagacgtggacgacatcaaggtccactcaccttacgaaattagcatccgccagcggtttattggaaagccagacatggcctatcgtttgatatctgccaagatgccagaggttatccccattttagaagtgcagttcagcaagaagatggagctgttagaagatgcattggtgctcagaagcgcaagaacctcttcccccgcagagaagagctgctcagtctggcatgcagcatctgggctgatgggccgtaccctgcaccgtgagccacccgcaggagaccaggagggcacagcactgcacctgcagacaagcctgccagccctttctgaggcagatacccaggaactaacccagatcctgaggaggatgaaggggctggccctggaggccgagagtgagctggagagacaagacgaagccctggatggcgttgcagcagctgtggacagggcaaccttgaccatcgacaagcacaacaggcggatgaagaggctgacctaggggcagaacgtccctgcattcctgtctcaccctgcacatcccgctgagatggagggctgggcggcagtgccagggctgcagaggcctgtggccctccggagtggtcttcctctggatggggctgctactgtggggctgcttctgcaccaggggcctccccaggtgtgcaccatgcctgcctcccacttggctgtccctgctgctgggcaggacccggccacatgttctgcggatgctgcagaagtgtggaccatggcgggaccccaaggacacttggcacaggcctggaagaggccgccctcgtcttgtctcggctccctttcatggacagactggccttcttagctgtactataaatttgtgagtgaagttagagcccagctcacttagccagctcactttgagggcatcctataaacacccaactgttcttttatcgtctcggttttagccaaaagtgaaattagcatgactgcatctttcaaacaaaaatattgatttctgcttttagggccccgtttccatccagaaataaagggaaatgctggcttc

SEQ ID NO: 276416 - DNA, 998 bp, Homo sapiens
gagaaggcgcccggctccgagacgaaggctacccggcccggagcctggccgacgccggggacatcgacccccaggcctcggaagtggctgtcggcgagggcgcgcgtctcgcggtccatccagctcagcacgggtcgaaggaccctcctcctcacttccgccggagcggaaacggtgaggaccagcctcggaaccagaagacgcagggcgccgcgtttctgccccgccagcgcctggggctccgggcctgcacgcatgcgcgcggctcgccgcggtcttcactgcgcaggcgccgagcggccgaggcgccgcggtcggctctgggactcgtctggcgtccctcagaggcagaagaggcctggaccttggcgcacacagacccaggaacagatgagcagggatgtctgcatccacacctggccgtgcacctactacctggagcccaagaggcgatgggttactggacagctgtccttaacatcgctgtcgctcaggttcatgactgacagcactggagagattctggtcagcttccccctctccagcatagttgagatcaagaaggaggcttcacattttatcttcagctccatcaccatcctggagaagggccatgccaagcactggttcagctccctgcggccaagtcgaaatgtggtcttcagcatcatcgagcatttctggagggagctgctgctgtctcagcctggagccgtggcagacgcatctgtcccaaggacccggggcgaggagctgacgggactcatggctggatcccagaaacgcctggaggacacggcgagggtcctgcaccaccagggccagcagctggacagcgtcatgagaggcctggacaagatggagtcagacctggaggtggcggacagattgctgacagaactggaatctcctgcttggtggccctttagctccaagctttggaagacaccatcctggagaagggccatgccaagcactggttcagctccctgcggccg

SEQ ID NO: 276417 - DNA, 1098 bp, Homo sapiens
caattattttaatgttaaaattgcactggtgttagatattaacgaagatgattggaaaaaagtctgaaagatacatcatttctatattccttgcttaatttttataaaatattgggttttcccttaagatagttgaagtatttttcttgccatgcctatttatttttgcaaaaaaattatctgctatatagaaccaaagatagattcgctttgctatatattataactatacttgcttttgcaataaaacaacttgtaattcaaaaatgaagattatctgcatatagtatttatgtgtgtgaataacatcttggcatgcagaaaataattttggctgctttgaacaggattgttcattctacacttccctgaaattccatttttgggagtgtctatccttcaatggctgaatagttccttaaatcagacaagctcctggctatcttcataaccagcagtgagtagatcttcttaatatagctgtctgaccacatgtggaaggcagctagacttattgtatttacagcctggccactctagacatatgaatccaggctgactgcttaagtgcccatctcgtttgatataaactgtagaaaaggcaagcactttgttctgagtcttttatctccaaatacatagttgtctcaaaccaagcaagctttatcaaaatggcttatttgcagaatagttccaatgatataaatgccaactggcaagtcattccaaactgcttgaaggagtagatgaaccagaatctgagaatttggaaataggtcacagaaaaagcctccatttggctaaatatgacaattatctgagtatggttaaatacatacaattaaatgtctgaagccaatgagttgtttattctaacttgaaatatatttttgtgagaataaatgttagaaaagttagtttattttggaaacctgccgtgaaaggaaattctaaaggcttaacatgaaactgtctgcatttctacctgttagacaatggttgctcttgggctcttgttatacagtcatatggctacacgtttatgtaaagtttgcaaaagtttggtgttttgatttataataaaactgttatattatt

SEQ ID NO: 276418 - DNA, 431 bp, Homo sapiens
agtcaaataagtttcttgtctgttgcctggatttgacttcaaatttcacaacttattaacaaatgaaatcctagctgttcacctaatcttttaggtagggataatggtattgattttagaatgttagggagattaaatgaaataatgcacataaaagttagcatagtgcctgggaaaactgcattataagttctcaacaaatgttagttgtttttgttgttaaaattgttatcctcccaggagagcaatgtatttagaaattgagcctgtatttaaaaattgtgtctgtatgttttaaaaatattttttcaagtaatttaccatgatcactagatttgaaagctaatgcgtcttgagctttaaaatgtatatggattacccacagatcttgttaaaacacagattctaatattcagtaggtttgggtgggg

SEQ ID NO: 276419 - DNA, 847 bp, Homo sapiens
acagaaacataaaataagttttaaacttataagacttttattttaaaattactacaaacctcaatgtaggttataaagaagacttcaataaatggaaaaacacaccatacttcctgggatgaaaagactcaagtgcgagcgtgcaggcatctgtatacatagaggaaactgtttgcaaagctgagctgcacttatgtcccctcaagagtggcaaaaataaaagccaagcccagggcctccagaagtgagatctctggtaaattacctcccattttacgcttacacactgaaagaagagggtggagccatgtgtgttatagccctctcatgaacttgctttctgcccttgtgtcctgttggtggttcaacctgggattaagtggtcaaacctgaattaagatatgtagactcgtaatgtccgcagctctctggaagaaacagattgcctctaggagaaggtatcattatcctaggcctaaagttaataataatataatttttatatccagtgttcagcttataaatttaaccaggtacacacacacacacacaccacacacacacacagcaccaagagcaagaagcagcaaaaccaacagacaacagaaaaaaatctttaggtattggaattatcaaacagaaaaccatcatgctaagttgcaaaagtaaaaggagagatcaggacataatggtagtacactggaaactttaaaaaatgacaaggcagattttacaaagaactaaatagaaatttagatcaggaaataaattatttcagtgttgcaaacataacattagacaaagctgaagtgggcattagtgaactggaagatacagttcagaagaa

SEQ ID NO: 276420 - DNA, 895 bp, Homo sapiens
gtgttggagacacaggcccagagccactcctgcctacaggctctttagctgagaataagggccctgagggaactacctgcttctcacatccccgggtctctgaccatctgctgtgtgccccgaccccccctaccctgctcctccaccaagcctgatgccaagggctataaaccactggcccaacagaagcttggttcccagagaactggtccctgcctgggacatgctccttgctacagccccttgtgggagctcagagggcatggctgctccccctacggtccctcgcccagtggttctgtctctttatggcaggaagcaatgaggctccccaagaacacacctgaggaaaaggacaggcgcacggcggccctacaggagggtctgaggcgggcagtctctgtgccgctgacgctggcggagacggtggcctcgctgtggccggcgctgcaggaactggcccggtgtgggaacctggcctgccggtcagacctccaggtggcggccaaagccctggagatgggcgtgtttggcgcatatttcaacgtgctcatcaacctgagggacatcacagacgaggcatttaaggaccagatccaccatcgtgtttccagcctcctgcaggaagccaagacccaggctgcactggtgctggactgcttggagacccggcaggagtgacggtgcgggaggcctctccgggctctgtggcccctccctcgcccatccccagagggcagagctgtgacctcggtggggacacagcttgttcgtgtggggcccggaggataggtgggcaggcagcggggcatcgcctgggaatggaggcgctggcagggacagaaggcccctagtcccatgtgacctccagtaaagttttggcaccaaaaaaaaa

SEQ ID NO: 276421 - DNA, 1907 bp, Homo sapiens
cttccatctgcccagagaggagcatctggatcaaggtgctggccatgtcccagctggtggaatgcgtccccaacttttcggaggggaagaaccaggaggtgatcgacgccatctctggagccatcacacagaccccgggctgcgtgctgctggatgtggacgcaggcccttccaccaaccgcaccgtgtacaccttcgtggggccgccggagtgcgtggtggagggggccctcaacgctgcccgggtagcttcccgacttatcgacatgagcaggcaccaaggagagcacccccgcatgggggccctagacgtctgccccttcatccccgtgaggggcgtcagcgtggatgagtgtgtgctctgcgcccaggcctttggccagaggctggcagaggagctggacgtgccagtttacctgtacggcgaggcagccaggatggacagtcgccggaccctgccggccatccgggccggggagtacgaggccctccctaagaagctccagcaggccgactgggcgcccgactttggtcccagctcctttgtccccagttggggggccacggccacgggggcgaggaagttcctcattgcttttaacatcaacctgctcggcacaaaggagcaagcccaccgcatcgcgctcaacctgcgggagcagggccgcgggaaggaccagccaggacgtctgaagaaagttcagggcattggctggtacctggatgagaagaacctggctcaggtgtccaccaatcttctggactttgaggtcacggcactgcacacggtctacgaggagacctgccgagaagcacaggagctgagcctcccagtggtgggctcacagctggtgggcctggtgcccctgaaggctctgctggatgcggccgccttctactgcgagaaggagaacctcttcatcctggaggaggagcagcggatcaggctggtggtgagccggctgggcctggactccctgtgccccttcagccctaaggagcggatcatcgagtacctggtccctgagcgcgggcctgagcgaggcctgggcagcaagtccctgcgcgccttcgtgggggaggtgggtgcccgctctgcggcccccgggggcggctcggtggcggcggccgctgcggccatgggtgcggcgctgggctccatggtgggcctcatgacctacgggcggcgccaattccagtccctggacacgacgatgcggcgcctgatcccgcccttccgcgaggcttcggccaagctaaccacgctggtggatgccgacgccgaggccttcaccgcctacctggaagcaatgaggctccccaagaacacacctgaggaaaaggacaggcgcacggcggccctacaggagggtctgaggcgggcagtctctgtgccgctgacgctggcggagacggtggcctcgctgtggccggcgctgcaggaactggcccggtgtgggaacctggcctgccggtcagacctccaggtggcggccaaagccctggagatgggcgtgtttggcgcatatttcaacgtgctcatcaacctgagggacatcacagacgaggcatttaaggaccagatccaccatcgtgtttccagcctcctgcaggaagccaagacccaggctgcactggtgctggactgcttggagacccggcaggagtgacgaaaccccagggacagcaggaccttcgacgctggaaggatagcctcgcttcccaggtgcagctcccggcaggtctggacagttccacagagcacggtactggccctgtcctcagttcccgtccacccttcaaccagtggctcctgggagacttttcctccctgcctcagctccctgcccagccagcctcctgtctccagagaagttctccattaaaaaataatttagcaaatcaaa

SEQ ID NO: 276422 - DNA, 1884 bp, Homo sapiens
cttccatctgcccagagaggagcatctggatcaaggtgctggccatgtcccagctggtggaatgcgtccccaacttttcggaggggaagaaccaggaggtgatcgacgccatctctggagccatcacacagaccccgggctgcgtgctgctggatgtggacgcaggcccttccaccaaccgcaccgtgtacaccttcgtggggccgccggagtgcgtggtggagggggccctcaacgctgcccgggtagcttcccgacttatcgacatgagcaggcaccaaggagagcacccccgcatgggggccctagacgtctgccccttcatccccgtgaggggcgtcagcgtggatgagtgtgtgctctgcgcccaggcctttggccagaggctggcagaggagctggacgtgccagtttacctgtacggcgaggcagccaggatggacagtcgccggaccctgccggccatccgggccggggagtacgaggccctccctaagaagctccagcaggccgactgggcgcccgactttggtcccagctcctttgtccccagttggggggccacggccacgggggcgaggaagttcctcattgcttttaacatcaacctgctcggcacaaaggagcaagcccaccgcatcgcgctcaacctgcgggagcagggccgcgggaaggaccagccaggacgtctgaagaaagttcagggcattggctggtacctggatgagaagaacctggctcaggtgtccaccaatcttctggactttgaggtcacggcactgcacacggtctacgaggagacctgccgagaagcacaggagctgagcctcccagtggtgggctcacagctggtgggcctggtgcccctgaaggctctgctggatgcggccgccttctactgcgagaaggagaacctcttcatcctggaggaggagcagcggatcaggctggtggtgagccggctgggcctggactccctgtgccccttcagccctaaggagcggatcatcgagtacctggtccctgagcgcgggcctgagcgaggcctgggcagcaagtccctgcgcgccttcgtgggggaggtgggtgcccgctctgcggcccccgggggcggctcggtggcggcggccgctgcggccatgggtgcggcgctgggctccatggtgggcctcatgacctacgggcggcgccaattccagtccctggacacgacgatgcggcgcctgatcccgcccttccgcgaggcttcggccaagctaaccacgctggtggatgccgacgccgaggccttcaccgcctacctggaagcaatgaggctccccaagaacacacctgaggaaaaggacaggcgcacggcggccctacaggagggtctgaggcgggcagtctctgtgccgctgacgctggcggagacggtggcctcgctgtggccggcgctgcaggaactggcccggtgtgggaacctggcctgccggtcagacctccaggtggcggccaaagccctggagatgggcgtgtttggcgcatatttcaacgtgctcatcaacctgagggacatcacagacgaggcatttaaggaccagatccaccatcgtgtttccagcctcctgcaggaagccaagacccaggctgcactggtgctggactgcttggagacccggcaggagtgacggtgcgggaggcctctccgggctctgtggcccctccctcgcccatccccagagggcagagctgtgacctcggtggggacacagcttgttcgtgtggggcccggaggataggtgggcaggcagcggggcatcgcctgggaatggaggcgctggcagggacagaaggcccctagtcccatgtgacctccagtaaagttttggcaccaaaaaaaaa

SEQ ID NO: 276423 - DNA, 1932 bp, Homo sapiens
cttccatctgcccagagaggagcatctggatcaaggtgctggccatgtcccagctggtggaatgcgtccccaacttttcggaggggaagaaccaggaggtgatcgacgccatctctggagccatcacacagaccccgggctgcgtgctgctggatgtggacgcaggcccttccaccaaccgcaccgtgtacaccttcgtggggccgccggagtgcgtggtggagggggccctcaacgctgcccgggtagcttcccgacttatcgacatgagcaggcaccaaggagagcacccccgcatgggggccctagacgtctgccccttcatccccgtgaggggcgtcagcgtggatgagtgtgtgctctgcgcccaggcctttggccagaggctggcagaggagctggacgtgccaggcctgaccgccgggctctcctgcagtttacctgtacggcgaggcagccaggatggacagtcgccggaccctgccggccatccgggccggggagtacgaggccctccctaagaagctccagcaggccgactgggcgcccgactttggtcccagctcctttgtccccagttggggggccacggccacgggggcgaggaagttcctcattgcttttaacatcaacctgctcggcacaaaggagcaagcccaccgcatcgcgctcaacctgcgggagcagggccgcgggaaggaccagccaggacgtctgaagaaagttcagggcattggctggtacctggatgagaagaacctggctcaggtgtccaccaatcttctggactttgaggtcacggcactgcacacggtctacgaggagacctgccgagaagcacaggagctgagcctcccagtggtgggctcacagctggtgggcctggtgcccctgaaggctctgctggatgcggccgccttctactgcgagaaggagaacctcttcatcctggaggaggagcagcggatcaggctggtggtgagccggctgggcctggactccctgtgccccttcagccctaaggagcggatcatcgagtacctggtccctgagcgcgggcctgagcgaggcctgggcagcaagtccctgcgcgccttcgtgggggaggtgggtgcccgctctgcggcccccgggggcggctcggtggcggcggccgctgcggccatgggtgcggcgctgggctccatggtgggcctcatgacctacgggcggcgccaattccagtccctggacacgacgatgcggcgcctgatcccgcccttccgcgaggcttcggccaagctaaccacgctggtggatgccgacgccgaggccttcaccgcctacctggaagcaatgaggctccccaagaacacacctgaggaaaaggacaggcgcacggcggccctacaggagggtctgaggcgggcagtctctgtgccgctgacgctggcggagacggtggcctcgctgtggccggcgctgcaggaactggcccggtgtgggaacctggcctgccggtcagacctccaggtggcggccaaagccctggagatgggcgtgtttggcgcatatttcaacgtgctcatcaacctgagggacatcacagacgaggcatttaaggaccagatccaccatcgtgtttccagcctcctgcaggaagccaagacccaggctgcactggtgctggactgcttggagacccggcaggagtgacgaaaccccagggacagcaggaccttcgacgctggaaggatagcctcgcttcccaggtgcagctcccggcaggtctggacagttccacagagcacggtactggccctgtcctcagttcccgtccacccttcaaccagtggctcctgggagacttttcctccctgcctcagctccctgcccagccagcctcctgtctccagagaagttctccattaaaaaataatttagcaaatcaaa

SEQ ID NO: 276424 - DNA, 1840 bp, Homo sapiens
cttccatctgcccagagaggagcatctggatcaaggtgctggccatgtcccagctggtggaatgcgtccccaacttttcggaggggaagaaccaggaggtgatcgacgccatctctggagccatcacacagaccccgggctgcgtgctgctggatgtggacgcaggcccttccaccaaccgcaccgtgtacaccttcgtggggccgccggagtgcgtggtggagggggccctcaacgctgcccgggtagcttcccgacttatcgacatgagcaggcaccaaggagagcacccccgcatgggggccctagacgtctgccccttcatccccgtgaggggcgtcagcgtggatgagtgtgtgctctgcgcccaggcctttggccagaggctggcagaggagctggacgtgccagtttacctgtacggcgaggcagccaggatggacagtcgccggaccctgccggccatccgggccggggagtacgaggccctccctaagaagctccagcaggccgactgggcgcccgactttggtcccagctcctttgtccccagttggggggccacggccacgggggcgaggaagttcctcattgcttttaacatcaacctgctcggcacaaaggagcaagcccaccgcatcgcgctcaacctgcgggagcagggccgcgggaaggaccagccaggacgtctgaagaaagttcagggcattggctggtacctggatgagaagaacctggctcaggtgtccaccaatcttctggactttgaggtcacggcactgcacacggtctacgaggagacctgccgagaagcacaggagctgagcctcccagtggtgggctcacagctggtgggcctggtgcccctgaaggctctgctggatgcggccgccttctactgcgagaaggagaacctcttcatcctggaggaggagcagcggatcaggctggtggtgagccggctgggcctggactccctgtgccccttcagccctaaggagcggatcatcgagtacctggtccctgagcgcgggcctgagcgaggcctgggcagcaagtccctgcgcgccttcgtgggggaggtgggtgcccgctctgcggcccccgggggcggctcggtggcggcggccgctgcggccatgggtgcggcgctgggctccatggtgggcctcatgacctacgggcggcgccaattccagtccctggacacgacgatgcggcgcctgatcccgcccttccgcgaggcttcggccaagctaaccacgctggtggatgccgacgccgaggccttcaccgcctacctggcgcacggcggccctacaggagggtctgaggcgggcagtctctgtgccgctgacgctggcggagacggtggcctcgctgtggccggcgctgcaggaactggcccggtgtgggaacctggcctgccggtcagacctccaggtggcggccaaagccctggagatgggcgtgtttggcgcatatttcaacgtgctcatcaacctgagggacatcacagacgaggcatttaaggaccagatccaccatcgtgtttccagcctcctgcaggaagccaagacccaggctgcactggtgctggactgcttggagacccggcaggagtgacggtgcgggaggcctctccgggctctgtggcccctccctcgcccatccccagagggcagagctgtgacctcggtggggacacagcttgttcgtgtggggcccggaggataggtgggcaggcagcggggcatcgcctgggaatggaggcgctggcagggacagaaggcccctagtcccatgtgacctccagtaaagttttggcaccaaaaaaaaa

SEQ ID NO: 276425 - DNA, 1310 bp, Homo sapiens
  misc_feature (1060)..(1060): n is a, c, g, or t
gtgttggagacacaggcccagagccactcctgcctacaggttctgagggctcaggggacctcctgggccctcaggctctttagctgagaataagggccctgagggaactacctgcttctcacatccccgggtctctgaccatctgctgtgtgccccgaccccccctaccctgctcctccaccaagcctgatgccaagggctataaaccactggcccaacagaagcttggttcccagagaactggtccctgcctgggacatgctccttgctacagccccttgtgggagctcagagggcatggctgctccccctacggtccctcgcccagtggttctgtctctttatggcaggaagcaatgaggctccccaagaacacacctgaggaaaaggacaggtgagcctggagggccggccgcaccgtgggcctctgtgtctggggagttggtggccaggatcccgagtacctgggtgctgtgacggggcgtggttggcctgggcgtgctgggtgtttgggaatgacttcccatcgcccgcttctgcagcctgctcagccctgttggggtgcagtgtgtccactgcctgcctgtgtgtgccgctgtgctcaggctctcctcttgctcctttcaggcgcacggcggccctacaggagggtctgaggcgggcagtctctgtgccgctgacgctggcggagacggtggcctcgctgtggccggcgctgcaggaactggcccggtgtgggaacctggcctgccggtcagacctccaggtaggggggcccgggggaccccaggcctcctgccgcaaagcaggaagcagctgttggggctgagttgctggagagcacggtggttggctgggctgagccaggtagggagacctcacttcacgggcagttcccggggctttggcctcctccaacagggccggggtgtccgctgccttctaagatctcgctcacggcggcaccacagacggagacccaaatgtgtctgcagagcccaccctgaccactgtataagtgtatactcccccaagaccccttgtatcacccccactgtcntgttctagaaaacacctatgtcagcccaggcacaatggttctcgcctgtggtcccagcactttgggaggctgaggcgggaggatcacttgaatagaggaggtcgagaccagcctgggcaacatagtgggaccctggctgtacaatagatacatatgagccaggcacggtggtgcctgtggtcccagcctgcccagccagcctcctgtctccagagaagttctccattaaaaaataatttagcaaatcaaa

SEQ ID NO: 276426 - DNA, 756 bp, Homo sapiens
cagtgagccgtgatcacaccactgcgctccagccttggtgacagagcaagaccctgggtcaaaaacaacaaaacacgagaaagcacacaaggcagctcttggaagtagatgcctcacactgacaggggccacagctgggcagagggtcccagagaaggagcgtctctctcatgggctcagcactttctgcagctgccctaagacctcatggtcttcgggttctttataggaaagacgcctcttttcagcatctggtcccagagaaagtgtcccctcagtccctgggaagtgtccctgggcagtgggcgggccgttagcctgaagctgcctccgggggccctccaggggatgactttgtctctagaactgtggtcctggttcctagagtggcggagagcctccagtgtgactgctcccaggcctcctgtggggctgagccctgcttggataagagaaagttttgttttctaagctcagtggtggggcttagccctctgtggggcgaaagcgggggctgcgctgggctccttgtgaggaggaggacgaagtccggcctgtcccagagcccgtcaggcagagaccctccttccggcagtttgctcagccttgatccatgtaggggctccctggggtccttgcaggtggcggccaaagccctggagatgggcgtgtttggcgcatatttcaacgtgcctgcccagccagcctcctgtctccagagaagttctccattaaaaaataatttagcaaatcaaa

SEQ ID NO: 276427 - DNA, 477 bp, Homo sapiens
tgagctgcgggtcttggggcaggagcaggacatatggtcagtggcccatgggagccagggttggagggaatggggttgcagcgtgaggagacagacctcagcgccagggtccccagacacccagtgcagcccacagtgggcagggtcacaggtattcagaggacctggggttcagtgcaggtccctgggctgtgaggccccttgtctgagggaaaggggccctggttctgtgcatgggacagaaaccccagggacagcaggaccttcgacgctggaaggatagcctcgcttcccaggtgcagctcccggcaggtctggacagttccacagagcacggtactggccctgtcctcagttcccgtccacccttcaaccagtggctcctgggagacttttcctccctgcctcagctccctgcccagccagcctcctgtctccagagaagttctccattaaaaaataatttagcaaatcaaa

SEQ ID NO: 276428 - DNA, 1234 bp, Homo sapiens
caactcctttctctgggcctcaggttccccaagggcaactcagggtgatggctgtttccagaagcctgtacggggtgcctgctggggcggggcccacagggctcctggcggggcagaggtggggggtgccagccacgcccctgccctgctccccgcaaaagcacctgtgtgctcggggcagggggcggctgccgcaagggtgggacccgcgggttccgaggctttcctggtggtggagacgcgccgaggccgtttccactccaagccccttttccaggtggtgagccggctgggcctggactccctgtgccccttcagccctaaggagcggatcatcgagtacctggtccctgagcgcgggcctgagcgaggcctgggcagcaagtccctgcgcgccttcgtgggggaggtgggtgcccgctctgcggcccccgggggcggctcggtggcggcggccgctgcggccatgggtgcggcgctgggctccatggtgggcctcatgacctacgggcggcgccaattccagtccctggacacgacgatgcggcgcctgatcccgcccttccgcgaggcttcggccaagctaaccacgctggtggatgccgacgccgaggccttcaccgcctacctggaagcaatgaggctccccaagaacacacctgaggaaaaggacaggcgcacggcggccctacaggagggtctgaggcgggcagtctctgtgccgctgacgctggcggagacggtggcctcgctgtggccggcgctgcaggaactggcccggtgtgggaacctggcctgccggtcagacctccaggtggcggccaaagccctggagatgggcgtgtttggcgcatatttcaacgtgctcatcaacctgagggacatcacagacgaggcatttaaggaccagatccaccatcgtgtttccagcctcctgcaggaagccaagacccaggctgcactggtgctggactgcttggagacccggcaggagtgacgaaaccccagggacagcaggaccttcgacgctggaaggatagcctcgcttcccaggtgcagctcccggcaggtctggacagttccacagagcacggtactggccctgtcctcagttcccgtccacccttcaaccagtggctcctgggagacttttcctccctgcctcagctccctgcccagccagcctcctgtctccagagaagttctccattaaaaaataatttagcaaatcaaa

SEQ ID NO: 276429 - DNA, 1864 bp, Homo sapiens
cttccatctgcccagagaggagcatctggatcaaggtgctggccatgtcccagctggtggaatgcgtccccaacttttcggaggggaagaaccaggaggtgatcgacgccatctctggagccatcacacagaccccgggctgcgtgctgctggatgtggacgcaggcccttccaccaaccgcaccgtgtacaccttcgtggggccgccggagtgcgtggtggagggggccctcaacgctgcccgggtagcttcccgacttatcgacatgagcaggcaccaaggagagcacccccgcatgggggccctagacgtctgccccttcatccccgtgaggggcgtcagcgtggatgagtgtgtgctctgcgcccaggcctttggccagaggctggcagaggagctggacgtgccagtttacctgtacggcgaggcagccaggatggacagtcgccggaccctgccggccatccgggccggggagtacgaggccctccctaagaagctccagcaggccgactgggcgcccgactttggtcccagctcctttgtccccagttggggggccacggccacgggggcgaggaagttcctcattgcttttaacatcaacctgctcggcacaaaggagcaagcccaccgcatcgcgctcaacctgcgggagcagggccgcgggaaggaccagccaggacgtctgaagaaagttcagggcattggctggtacctggatgagaagaacctggctcaggtgtccaccaatcttctggactttgaggtcacggcactgcacacggtctacgaggagacctgccgagaagcacaggagctgagcctcccagtggtgggctcacagctggtgggcctggtgcccctgaaggctctgctggatgcggccgccttctactgcgagaaggagaacctcttcatcctggaggaggagcagcggatcaggctggtggtgagccggctgggcctggactccctgtgccccttcagccctaaggagcggatcatcgagtacctggtccctgagcgcgggcctgagcgaggcctgggcagcaagtccctgcgcgccttcgtgggggaggtgggtgcccgctctgcggcccccgggggcggctcggtggcggcggccgctgcggccatgggtgcggcgctgggctccatggtgggcctcatgacctacgggcggcgccaattccagtccctggacacgacgatgcggcgcctgatcccgcccttccgcgaggcttcggccaagctaaccacgctggtggatgccgacgccgaggccttcaccgcctacctggaagcaatgaggctccccaagaacacacctgaggaaaaggacaggcgcacggcggccctacaggagggtctgaggcgggcagtctctgtgccgctgacgctggcggagacggtggcctcgctgtggccggcgctgcaggaactggcccggtgtgggaacctggcctgccggtcagacctccaggtggcggccaaagccctggagatgggcgtgtttggcgcatatttcaacgtgctcatcaacctgagggacatcacagacgaggcatttaaggaccagcctcctgcaggaagccaagacccaggctgcactggtgctggactgcttggagacccggcaggagtgacggtgcgggaggcctctccgggctctgtggcccctccctcgcccatccccagagggcagagctgtgacctcggtggggacacagcttgttcgtgtggggcccggaggataggtgggcaggcagcggggcatcgcctgggaatggaggcgctggcagggacagaaggcccctagtcccatgtgacctccagtaaagttttggcaccaaaaaaaaa

SEQ ID NO: 276430 - DNA, 2012 bp, Homo sapiens
cttccatctgcccagagaggagcatctggatcaaggtgctggccatgtcccagctggtggaatgcgtccccaacttttcggaggggaagaaccaggaggtgatcgacgccatctctggagccatcacacagaccccgggctgcgtgctgctggatgtggacgcaggcccttccaccaaccgcaccgtgtacaccttcgtggggccgccggagtgcgtggtggagggggccctcaacgctgcccgggtagcttcccgacttatcgacatgagcaggcaccaaggagagcacccccgcatgggggccctagacgtctgccccttcatccccgtgaggggcgtcagcgtggatgagtgtgtgctctgcgcccaggcctttggccagaggctggcagaggagctggacgtgccagtttacctgtacggcgaggcagccaggatggacagtcgccggaccctgccggccatccgggccggggagtacgaggccctccctaagaagctccagcaggccgactgggcgcccgactttggtcccagctcctttgtccccagttggggggccacggccacgggggcgaggaagttcctcattgcttttaacatcaacctgctcggcacaaaggagcaagcccaccgcatcgcgctcaacctgcgggagcagggccgcgggaaggaccagccaggacgtctgaagaaagttcagggcattggctggtacctggatgagaagaacctggctcaggtgtccaccaatcttctggactttgaggtcacggcactgcacacggtctacgaggagacctgccgagaagcacaggagctgagcctcccagtggtgggctcacagctggtgggcctggtgcccctgaaggctctgctggatgcggccgccttctactgcgagaaggagaacctcttcatcctggaggaggagcagcggatcaggctggtggtgagccggctgggcctggactccctgtgccccttcagccctaaggagcggatcatcgagtacctggtccctgagcgcgggcctgagcgaggcctgggcagcaagtccctgcgcgccttcgtgggggaggtgggtgcccgctctgcggcccccgggggcggctcggtggcggcggccgctgcggccatgggtgcggcgctgggctccatggtgggcctcatgacctacgggcggcgccaattccagtccctggacacgacgatgcggcgcctgatcccgcccttccgcgaggcttcggccaagctaaccacgctggtggatgccgacgccgaggccttcaccgcctacctggaagcaatgaggctccccaagaacacacctgaggaaaaggacaggcgcacggcggccctacaggagggtctgaggcgggcagtctctgtgccgctgacgctggcggagacggtggcctcgctgtggccggcgctgcaggaactggcccggtgtgggaacctggcctgccggtcagacctccaggtggcggccaaagccctggagatgggcgtgtttggcgcatatttcaacgtgctcatcaacctgagggacatcacagacgaggcatttaaggaccagatccaccatcgtgtttccagcctcctgcaggaagccaagacccaggctgcactggtgctggactgcttggagacccggcaggagtgacggtgcgggaggcctctccgggctctgtggcccctccctcgcccatccccagagggcagagctgtgacctcggtggggacacagcttgttcgtgtggggcccggaggaaaccccagggacagcaggaccttcgacgctggaaggatagcctcgcttcccaggtgcagctcccggcaggtctggacagttccacagagcacggtactggccctgtcctcagttcccgtccacccttcaaccagtggctcctgggagacttttcctccctgcctcagctccctgcccagccagcctcctgtctccagagaagttctccattaaaaaataatttagcaaatcaaa

SEQ ID NO: 276431 - DNA, 1887 bp, Homo sapiens
cttccatctgcccagagaggagcatctggatcaaggtgctggccatgtcccagctggtggaatgcgtccccaacttttcggaggggaagaaccaggaggtgatcgacgccatctctggagccatcacacagaccccgggctgcgtgctgctggatgtggacgcaggcccttccaccaaccgcaccgtgtacaccttcgtggggccgccggagtgcgtggtggagggggccctcaacgctgcccgggtagcttcccgacttatcgacatgagcaggcaccaaggagagcacccccgcatgggggccctagacgtctgccccttcatccccgtgaggggcgtcagcgtggatgagtgtgtgctctgcgcccaggcctttggccagaggctggcagaggagctggacgtgccagtttacctgtacggcgaggcagccaggatggacagtcgccggaccctgccggccatccgggccggggagtacgaggccctccctaagaagctccagcaggccgactgggcgcccgactttggtcccagctcctttgtccccagttggggggccacggccacgggggcgaggaagttcctcattgcttttaacatcaacctgctcggcacaaaggagcaagcccaccgcatcgcgctcaacctgcgggagcagggccgcgggaaggaccagccaggacgtctgaagaaagttcagggcattggctggtacctggatgagaagaacctggctcaggtgtccaccaatcttctggactttgaggtcacggcactgcacacggtctacgaggagacctgccgagaagcacaggagctgagcctcccagtggtgggctcacagctggtgggcctggtgcccctgaaggctctgctggatgcggccgccttctactgcgagaaggagaacctcttcatcctggaggaggagcagcggatcaggctggtggtgagccggctgggcctggactccctgtgccccttcagccctaaggagcggatcatcgagtacctggtccctgagcgcgggcctgagcgaggcctgggcagcaagtccctgcgcgccttcgtgggggaggtgggtgcccgctctgcggcccccgggggcggctcggtggcggcggccgctgcggccatgggtgcggcgctgggctccatggtgggcctcatgacctacgggcggcgccaattccagtccctggacacgacgatgcggcgcctgatcccgcccttccgcgaggcttcggccaagctaaccacgctggtggatgccgacgccgaggccttcaccgcctacctggaagcaatgaggctccccaagaacacacctgaggaaaaggacaggcgcacggcggccctacaggagggtctgaggcgggcagtctctgtgccgctgacgctggcggagacggtggcctcgctgtggccggcgctgcaggaactggcccggtgtgggaacctggcctgccggtcagacctccaggtggcggccaaagccctggagatgggcgtgtttggcgcatatttcaacgtgctcatcaacctgagggacatcacagacgaggcatttaaggaccagcctcctgcaggaagccaagacccaggctgcactggtgctggactgcttggagacccggcaggagtgacgaaaccccagggacagcaggaccttcgacgctggaaggatagcctcgcttcccaggtgcagctcccggcaggtctggacagttccacagagcacggtactggccctgtcctcagttcccgtccacccttcaaccagtggctcctgggagacttttcctccctgcctcagctccctgcccagccagcctcctgtctccagagaagttctccattaaaaaataatttagcaaatcaaa

SEQ ID NO: 276432 - DNA, 1018 bp, Homo sapiens
cagtgagccgtgatcacaccactgcgctccagccttggtgacagagcaagaccctgggtcaaaaacaacaaaacacgagaaagcacacaaggcagctcttggaagtagatgcctcacactgacaggggccacagctgggcagagggtcccagagaaggagcgtctctctcatgggctcagcactttctgcagctgccctaagacctcatggtcttcgggttctttataggaaagacgcctcttttcagcatctggtcccagagaaagtgtcccctcagtccctgggaagtgtccctgggcagtgggcgggccgttagcctgaagctgcctccgggggccctccaggggatgactttgtctctagaactgtggtcctggttcctagagtggcggagagcctccagtgtgactgctcccaggcctcctgtggggctgagccctgcttggataagagaaagttttgttttctaagctcagtggtggggcttagccctctgtggggcgaaagcgggggctgcgctgggctccttgtgaggaggaggacgaagtccggcctgtcccagagcccgtcaggcagagaccctccttccggcagtttgctcagccttgatccatgtaggggctccctggggtccttgcaggtggcggccaaagccctggagatgggcgtgtttggcgcatatttcaacgtgctcatcaacctgagggacatcacagacgaggcatttaaggaccagcctcctgcaggaagccaagacccaggctgcactggtgctggactgcttggagacccggcaggagtgacggtgcgggaggcctctccgggctctgtggcccctccctcgcccatccccagagggcagagctgtgacctcggtggggacacagcttgttcgtgtggggcccggaggataggtgggcaggcagcggggcatcgcctgggaatggaggcgctggcagggacagaaggcccctagtcccatgtgacctccagtaaagttttggcaccaaaaaaaaa

SEQ ID NO: 276433 - DNA, 1957 bp, Homo sapiens
cttccatctgcccagagaggagcatctggatcaaggtgctggccatgtcccagctggtggaatgcgtccccaacttttcggaggggaagaaccaggaggtgatcgacgccatctctggagccatcacacagaccccgggctgcgtgctgctggatgtggacgcaggcccttccaccaaccgcaccgtgtacaccttcgtggggccgccggagtgcgtggtggagggggccctcaacgctgcccgggtagcttcccgacttatcgacatgagcaggcaccaaggagagcacccccgcatgggggccctagacgtctgccccttcatccccgtgaggggcgtcagcgtggatgagtgtgtgctctgcgcccaggcctttggccagaggctggcagaggagctggacgtgccagtttacctgtacggcgaggcagccaggatggacagtcgccggaccctgccggccatccgggccggggagtacgaggccctccctaagaagctccagcaggccgactgggcgcccgactttggtcccagctcctttgtccccagttggggggccacggccacgggggcgaggaagttcctcattgcttttaacatcaacctgctcggcacaaaggagcaagcccaccgcatcgcgctcaacctgcgggagcagggccgcgggaaggaccagccaggacgtctgaagaaagttcagggcattggctggtacctggatgagaagaacctggctcaggtgtccaccaatcttctggactttgaggtcacggcactgcacacggtctacgaggagacctgccgagaagcacaggagctgagcctcccagtggtgggctcacagctggtgggcctggtgcccctgaaggctctgctggatgcggccgccttctactgcgagaaggagaacctcttcatcctggaggaggagcagcggatcaggctggtggtgagccggctgggcctggactccctgtgccccttcagccctaaggagcggatcatcgagtacctggtccctgagcgcgggcctgagcgaggcctgggcagcaagtccctgcgcgccttcgtgggggaggtgggtgcccgctctgcggcccccgggggcggctcggtggcggcggccgctgcggccatgggtgcggcgctgggctccatggtgggcctcatgacctacgggcggcgccaattccagtccctggacacgacgatgcggcgcctgatcccgcccttccgcgaggcttcggccaagctaaccacgctggtggatgccgacgccgaggccttcaccgcctacctggaagcaatgaggctccccaagaacacacctgaggaaaaggacaggcgcacggcggccctacaggagggtctgaggcgggcagtctctgtgccgctgacgctggcggagacggtggcctcgctgtggccggcgctgcaggaactggcccggtgtgggaacctggcctgccggtcagacctccaggtggcggccaaagccctggagatgggcgtgtttggcgcatatttcaacgtgctcatcaacctgagggacatcacagacgaggcatttaaggaccagcctcctgcaggaagccaagacccaggctgcactggtgctggactgcttggagacccggcaggagtgacggtgcgggaggcctctccgggctctgtggcccctccctcgcccatccccagagggcagagctgtgacctcgaaaccccagggacagcaggaccttcgacgctggaaggatagcctcgcttcccaggtgcagctcccggcaggtctggacagttccacagagcacggtactggccctgtcctcagttcccgtccacccttcaaccagtggctcctgggagacttttcctccctgcctcagctccctgcccagccagcctcctgtctccagagaagttctccattaaaaaataatttagcaaatcaaa

SEQ ID NO: 276434 - DNA, 2013 bp, Homo sapiens
cttccatctgcccagagaggagcatctggatcaaggtgctggccatgtcccagctggtggaatgcgtccccaacttttcggaggggaagaaccaggaggtgatcgacgccatctctggagccatcacacagaccccgggctgcgtgctgctggatgtggacgcaggcccttccaccaaccgcaccgtgtacaccttcgtggggccgccggagtgcgtggtggagggggccctcaacgctgcccgggtagcttcccgacttatcgacatgagcaggcaccaaggagagcacccccgcatgggggccctagacgtctgccccttcatccccgtgaggggcgtcagcgtggatgagtgtgtgctctgcgcccaggcctttggccagaggctggcagaggagctggacgtgccagtttacctgtacggcgaggcagccaggatggacagtcgccggaccctgccggccatccgggccggggagtacgaggccctccctaagaagctccagcaggccgactgggcgcccgactttggtcccagctcctttgtccccagttggggggccacggccacgggggcgaggaagttcctcattgcttttaacatcaacctgctcggcacaaaggagcaagcccaccgcatcgcgctcaacctgcgggagcagggccgcgggaaggaccagccaggacgtctgaagaaagttcagggcattggctggtacctggatgagaagaacctggctcaggtgtccaccaatcttctggactttgaggtcacggcactgcacacggtctacgaggagacctgccgagaagcacaggagctgagcctcccagtggtgggctcacagctggtgggcctggtgcccctgaaggctctgctggatgcggccgccttctactgcgagaaggagaacctcttcatcctggaggaggagcagcggatcaggctggtggtgagccggctgggcctggactccctgtgccccttcagccctaaggagcggatcatcgagtacctggtccctgagcgcgggcctgagcgaggcctgggcagcaagtccctgcgcgccttcgtgggggaggtgggtgcccgctctgcggcccccgggggcggctcggtggcggcggccgctgcggccatgggtgcggcgctgggctccatggtgggcctcatgacctacgggcggcgccaattccagtccctggacacgacgatgcggcgcctgatcccgcccttccgcgaggcttcggccaagctaaccacgctggtggatgccgacgccgaggccttcaccgcctacctgaagcttggttcccagagaactggtccctgcctgggacatgctccttgctacagccccttgtgggagctcagagggcatggctgctccccctacggtccctcgcccagtggttctgtctctttatggcaggaagcaatgaggctccccaagaacacacctgaggaaaaggacaggcgcacggcggccctacaggagggtctgaggcgggcagtctctgtgccgctgacgctggcggagacggtggcctcgctgtggccggcgctgcaggaactggcccggtgtgggaacctggcctgccggtcagacctccaggtggcggccaaagccctggagatgggcgtgtttggcgcatatttcaacgtgctcatcaacctgagggacatcacagacgaggcatttaaggaccagatccaccatcgtgtttccagcctcctgcaggaagccaagacccaggctgcactggtgctggactgcttggagacccggcaggagtgacggtgcgggaggcctctccgggctctgtggcccctccctcgcccatccccagagggcagagctgtgacctcggtggggacacagcttgttcgtgtggggcccggaggataggtgggcaggcagcggggcatcgcctgggaatggaggcgctggcagggacagaaggcccctagtcccatgtgacctccagtaaagttttggcaccaaaaaaaaa

SEQ ID NO: 276435 - DNA, 1093 bp, Homo sapiens
cactctccaccccgcccggctgctgtccgtctctgtggggtggggtgggggtcgcatagccaacgtgttctgaatgggtttcccagaatgaattctaatcttaaatgggactgtcacaactttattttgaatttaggtggtgagccggctgggcctggactccctgtgccccttcagccctaaggagcggatcatcgagtacctggtccctgagcgcgggcctgagcgaggcctgggcagcaagtccctgcgcgccttcgtgggggaggtgggtgcccgctctgcggcccccgggggcggctcggtggcggcggccgctgcggccatgggtgcggcgctgggctccatggtgggcctcatgacctacgggcggcgccaattccagtccctggacacgacgatgcggcgcctgatcccgcccttccgcgaggcttcggccaagctaaccacgctggtggatgccgacgccgaggccttcaccgcctacctggaagcaatgaggctccccaagaacacacctgaggaaaaggacaggcgcacggcggccctacaggagggtctgaggcgggcagtctctgtgccgctgacgctggcggagacggtggcctcgctgtggccggcgctgcaggaactggcccggtgtgggaacctggcctgccggtcagacctccaggtggcggccaaagccctggagatgggcgtgtttggcgcatatttcaacgtgctcatcaacctgagggacatcacagacgaggcatttaaggaccagatccaccatcgtgtttccagcctcctgcaggaagccaagacccaggctgcactggtgctggactgcttggagacccggcaggagtgacgaaaccccagggacagcaggaccttcgacgctggaaggatagcctcgcttcccaggtgcagctcccggcaggtctggacagttccacagagcacggtactggccctgtcctcagttcccgtccacccttcaaccagtggctcctgggagacttttcctccctgcctcagctccctgcccagccagcctcctgtctccagagaagttctccattaaaaaataatttagcaaatcaaa

SEQ ID NO: 276436 - DNA, 1385 bp, Homo sapiens
cttccatctgcccagagaggagcatctggatcaaggtgctggccatgtcccagctggtggaatgcgtccccaacttttcggaggggaagaaccaggaggtgatcgacgccatctctggagccatcacacagaccccgggctgcgtgctgctggatgtggacgcaggcccttccaccaaccgcaccgtgtacaccttcgtggggccgccggagtgcgtggtggagggggccctcaacgctgcccgggtagcttcccgacttatcgacatgagcaggcaccaaggagagcacccccgcatgggggccctagacgtctgccccttcatccccgtgaggggcgtcagcgtggatgagtgtgtgctctgcgcccaggcctttggccagaggctggcagaggagctggacgtgccagtttacctgtacggcgaggcagccaggatggacagtcgccggaccctgtgccccttcagccctaaggagcggatcatcgagtacctggtccctgagcgcgggcctgagcgaggcctgggcagcaagtccctgcgcgccttcgtgggggaggtgggtgcccgctctgcggcccccgggggcggctcggtggcggcggccgctgcggccatgggtgcggcgctgggctccatggtgggcctcatgacctacgggcggcgccaattccagtccctggacacgacgatgcggcgcctgatcccgcccttccgcgaggcttcggccaagctaaccacgctggtggatgccgacgccgaggccttcaccgcctacctggaagcaatgaggctccccaagaacacacctgaggaaaaggacaggcgcacggcggccctacaggagggtctgaggcgggcagtctctgtgccgctgacgctggcggagacggtggcctcgctgtggccggcgctgcaggaactggcccggtgtgggaacctggcctgccggtcagacctccaggtggcggccaaagccctggagatgggcgtgtttggcgcatatttcaacgtgctcatcaacctgagggacatcacagacgaggcatttaaggaccagatccaccatcgtgtttccagcctcctgcaggaagccaagacccaggctgcactggtgctggactgcttggagacccggcaggagtgacgaaaccccagggacagcaggaccttcgacgctggaaggatagcctcgcttcccaggtgcagctcccggcaggtctggacagttccacagagcacggtactggccctgtcctcagttcccgtccacccttcaaccagtggctcctgggagacttttcctccctgcctcagctccctgcccagccagcctcctgtctccagagaagttctccattaaaaaataatttagcaaatcaaa

SEQ ID NO: 276437 - DNA, 435 bp, Homo sapiens
ttggaaatctaaagtctagtattttttttcaactacagaaagctgaggtcctccaataaggaaaagcttctatccacctggaaaatttacaagtaatgattaacacatggtcataacccaaagacttcagatgtcatataaaatttattcgtagtcaggtgcggtggctcacacctgtaatcccagcactttaggaggccgaggtgggtagatcgtgaggtcaggagattgagaccattctggctaacacggtgaaaccccgtctctactaaaaatacaaaaaaattagccgggcatggtggcgggcgcctgtagtcccagctactcaggaggctgaggcaggagaatggcgtgaacccaggaggtggagcttgcagtgagccgagatcgcgccactgcactccagcctgggcgacagagcgagactccatctca

SEQ ID NO: 276438 - DNA, 423 bp, Homo sapiens
gcgtgtggaagcttttttctgagccatccgccctgtggaagccacacaggcaaggccagaggagaacagtggcacaggcattcagaaaagcccagtttcccgacgtcagtttgcctgaggtcaggcggagcaccagcactttctggctcttagaaaatgactcaacccctccaacctgcagcttacccctatgcaaaatcagggctgcccttgcaggactgttgggacgagtcagtgacaggggagtgtccagccctacctggcatgtcataagtgcactctatccattgggagctgttattttagaagcaggacttcgtgttgttgctatgtcttgcctcagcagagagaaacattttgctcttgacactgattgtcccttctcagctgtaaggaggccacagcccccttgattttgaaccc

SEQ ID NO: 276439 - DNA, 2483 bp, Homo sapiens
  misc_feature (1803)..(1803): n is a, c, g, or t
ggctccacggccacatccgcaaaaagggtactggtgaacgtgacattttcacgaagccacagcccatggtcactccctgcaaagctctgaacttgcgcattcccaggccaggccgtggttgtctttccaaggcggctcagcttgtgctttgcttggagagagcggagggcagcagcacagtgacagcgtctgggacctcagaccagtttccacagccacttatgaaagcagacggctccatgggctggaggaggtgggacgctctggaaagaactcgggtgcgagtgggaaagaaaatcgagctgagcagcgggaagtcgaagtcgcgtgagtgaggaccagacactctcgatttaggcaaaggcggggtgcacttcccaacaacacatcctcctcactggcgagaccaggcctgcccttcaagttcctctcctgatttaatccccttggcgagggtttggcatgaaatcaatggccagcaagcttggtaaacgaagccgcctacaccgccctccccctccctgcacggccgcgccccgcctccgctcctgtctcaatctgggattgtcctcctgtagccccaccatccaccgtggggaacggtggagagactacaactcccagtatgcaccgcgatgcgcgcctcaccctgcatctcccagcccgcagccagctggcatcctagaccctctgccctgcgaccaacagccgggagcggaccagacaccagaactcccggaacggttgaagacggttccgctccctgtcccgcctttcgcagcccagcagtttcgccctgcggagaggagccttgctgtttccaaatctctcctgctgaagagacattggagctagggcggctagtttcacctggtaattgtgacaccctgtctcctcgagctgcaggcttttatgcttgtcatgttcgaagtttgataccttgcagatcaacaaagggtcggtggcctctcactgcctccgcggcagggttgtcaagacatgcgcagtgcggcccgtccctagggctgggttaagggccgcggatgtggcagttctcaggcctcttgggatcgcctcaagaagccccctcacgagtgtctcgatttcctgtcagccaacaaagggccgttcgcctttcatggcctccacagcagcgttgccgtggctgtcacaaatcctctgcaccccaggagcgccgcttggacccccgggctcgctgcgtggtccatatctaggtcgggcctctcacggagactttcccaccagtgtaataaagaggagaaaacgtcacagcggaagggcctgaccctgctgcatccactaaggaaacagctacggggatgggaccctgggagctgctgtggagcctcatccaccgcttctctgaccccacccaggctgcttcccaggcctcagggtcttagtgtggacctccgggccgtgattaatgcagtttttcaggttaagtactgcacgactactcgcttctgaaactgatagacactgcctcagctccgtgcagggcagacgcacaagagcagaatctccgtgggacatctctctggagcatcaatattactgcagtatttggaagaaacaaatttaaataagttctaaggtgaagaatggaacatttaagacaagtctggaaagtcatctgcctttaataactgtcgtttgtccttaacgtcagactttctccaagaccaaaactctaagaacttatttccattcttacaaatagtaaaaatgataaatcatatcaagtcaattgaaagtcctgcctgctgctttcctaaatcncaatatggccttggtatggttttatttgtacttttgtgggggattcgtggatctttagattaaaaaaaaaaaataggtttttgaacaatttttgcaagtttgcagctgttagttattgatttatttttgcaacccatctaattcttctgtctctctcctctcctcaggctcaataattccatgggtctctaaggctgtgtttattttctttaaattttgttgatttacttttatactccatttgattttttctatctctcaccttttctcagactcagtcatcccacaggtctgtaaggctctgttcattttctttaaacttttttttttcctctcctcagattggataaattatattgctatgtctctgtttctgaactatagaaaagctcaaaattactatttttatttctcattttttatatggctattttttctctgctgatgtttcacatctattcatttatgagaatattttcctttgccctcatgagcgtgtttataatagctgccttcaaattcttgtctgccgtttacatcttggacatcttggagatggctactgcctgctttttatcttgtgtatttattacattttcacgtgtcttcacgcatctcttgaattggaaattgtgccctggagactgtatacaagactggattaaaaagactggattctg

SEQ ID NO: 276440 - DNA, 2027 bp, Homo sapiens
  misc_feature (1347)..(1347): n is a, c, g, or t
ggctccacggccacatccgcaaaaagggtactggtgaacgtgacattttcacgaagccacagcccatggtcactccctgcaaagctctgaacttgcgcattcccaggccaggccgtggttgtctttccaaggcggctcagcttgtgctttgcttggagagagcggagggcagcagcacagtgacagcgtctgggacctcagaccagtttccacagccacttatgaaagcagacggctccatgggctggaggaggtgggacgctctggaaagaactcgggtgcgagtgggaaagaaaatcgagctgagcagcgggaagtcgaagtcgcgtgagtgaggaccagacactctcgatttaggcaaaggcggggtgcacttcccaacaacacatcctcctcactggcgagaccaggcctgcccttcaagttcctctcctgatttaatccccttggcgagggtttggcatgaaatcaatggccagcaagcttggtaaacgaagccgcctacaccgccctccccctccctgcacggccgcgccccgcctccgctcctgtctcaatctgggattgtcctcctgtagccccaccatccaccgtggggaacggtggagagactacaactcccagtatgcaccgcgatgcgcgcctcaccctgcatctcccagcccgcagccagctggcatcctagaccctctgccctgcgaccaacagccgggagcggaccagacaccagaactcccggaacggttgaagacggttccgctccctgtcccgcctttcgcagcccagcagtttcgccctgcggagaggagccttgctgtttccaaatctctcctgctgaagagacattggagctagggcggctagtttcacctggtaattgtgacaccctgtctcctcgagctgcaggcttttatgcttgtcatgttcgaagtttgataccttgcagatcaacaaagggtcggtggcctctcactgcctccgcggcagggttgtcaagtttttcaggttaagtactgcacgactactcgcttctgaaactgatagacactgcctcagctccgtgcagggcagacgcacaagagcagaatctccgtgggacatctctctggagcatcaatattactgcagtatttggaagaaacaaatttaaataagttctaaggtgaagaatggaacatttaagacaagtctggaaagtcatctgcctttaataactgtcgtttgtccttaacgtcagactttctccaagaccaaaactctaagaacttatttccattcttacaaatagtaaaaatgataaatcatatcaagtcaattgaaagtcctgcctgctgctttcctaaatcncaatatggccttggtatggttttatttgtacttttgtgggggattcgtggatctttagattaaaaaaaaaaaataggtttttgaacaatttttgcaagtttgcagctgttagttattgatttatttttgcaacccatctaattcttctgtctctctcctctcctcaggctcaataattccatgggtctctaaggctgtgtttattttctttaaattttgttgatttacttttatactccatttgattttttctatctctcaccttttctcagactcagtcatcccacaggtctgtaaggctctgttcattttctttaaacttttttttttcctctcctcagattggataaattatattgctatgtctctgtttctgaactatagaaaagctcaaaattactatttttatttctcattttttatatggctattttttctctgctgatgtttcacatctattcatttatgagaatattttcctttgccctcatgagcgtgtttataatagctgccttcaaattcttgtctgccgtttacatcttggacatcttggagatggctactgcctgctttttatcttgtgtatttattacattttcacgtgtcttcacgcatctcttgaattggaaattgtgccctggagactgtatacaagactggattaaaaagactggattctg

SEQ ID NO: 276441 - DNA, 1300 bp, Homo sapiens
ggctccacggccacatccgcaaaaagggtactggtgaacgtgacattttcacgaagccacagcccatggtcactccctgcaaagctctgaacttgcgcattcccaggccaggccgtggttgtctttccaaggcggctcagcttgtgctttgcttggagagagcggagggcagcagcacagtgacagcgtctgggacctcagaccagtttccacagccacttatgaaagcagacggctccatgggctggaggaggtgggacgctctggaaagaactcgggtgcgagtgggaaagaaaatcgagctgagcagcgggaagtcgaagtcgcgtgagtgaggaccagacactctcgatttaggcaaaggcggggtgcacttcccaacaacacatcctcctcactggcgagaccaggcctgcccttcaagttcctctcctgatttaatccccttggcgagggtttggcatgaaatcaatggccagcaagcttggtaaacgaagccgcctacaccgccctccccctccctgcacggccgcgccccgcctccgctcctgtctcaatctgggattgtcctcctgtagccccaccatccaccgtggggaacggtggagagactacaactcccagtatgcaccgcgatgcgcgcctcaccctgcatctcccagcccgcagccagctggcatcctagaccctctgccctgcgaccaacagccgggagcggaccagacaccagaactcccggaacggttgaagacggttccgctccctgtcccgcctttcgcagcccagcagtttcgccctgcggagaggagccttgctgtttccaaatctctcctgctgaagagacattggagctagggcggctagtttcacctggtaattgtgacaccctgtctcctcgagctgcaggcttttatgcttgtcatgttcgaagtttgataccttgcagatcaacaaagggtcggtggcctctcactgcctccgcggcagggttgtcaaggtaacgctcctcagacaagggtggggcgcggcccgccccttttctcaccccgcctcctcctcagccccaccctccttcgctcctcctcttgtcactccctttcagacatgcgcagtgcggcccgtccctagggctgggttaagggccgcggatgtggcagttctcaggcctcttgggatcgcctcaagaagccccctcacgagtgtctcgatttcctgtcagccaacaaagggccgttcgcctttcatggcctccacagcagcgttgccgtggtaacgatcctccgccggacgttggccgcac

SEQ ID NO: 276442 - DNA, 1503 bp, Homo sapiens
  misc_feature (823)..(823): n is a, c, g, or t
gtgcagcccgtccctaggtgtagggtaatggcggccgacctggcaggtctcaggctccttgggatcccctcgagaagcccgttcatgagtgtctgaaactgtcacttgactgccagaagtgaaaacatcgtgtccctagtcacctgccatttgccttttcaaaaccatttcctctgttctctaggctgtcacaaatcctctgcaccccaggagcgccgcttggacccccgggctcgctgcgtggtccatatctaggtcgggcctctcacggagactttcccaccagtgtaataaagaggagaaaacgtcacagcggaagggcctgaccctgctgcatccactaaggaaacagctacggggatgggaccctgggagctgctgtggagcctcatccaccgcttctctgaccccacccaggctgcttcccaggcctcagggtcttagtgtggacctccgggccgtgattaatgcagtttttcaggttaagtactgcacgactactcgcttctgaaactgatagacactgcctcagctccgtgcagggcagacgcacaagagcagaatctccgtgggacatctctctggagcatcaatattactgcagtatttggaagaaacaaatttaaataagttctaaggtgaagaatggaacatttaagacaagtctggaaagtcatctgcctttaataactgtcgtttgtccttaacgtcagactttctccaagaccaaaactctaagaacttatttccattcttacaaatagtaaaaatgataaatcatatcaagtcaattgaaagtcctgcctgctgctttcctaaatcncaatatggccttggtatggttttatttgtacttttgtgggggattcgtggatctttagattaaaaaaaaaaaataggtttttgaacaatttttgcaagtttgcagctgttagttattgatttatttttgcaacccatctaattcttctgtctctctcctctcctcaggctcaataattccatgggtctctaaggctgtgtttattttctttaaattttgttgatttacttttatactccatttgattttttctatctctcaccttttctcagactcagtcatcccacaggtctgtaaggctctgttcattttctttaaacttttttttttcctctcctcagattggataaattatattgctatgtctctgtttctgaactatagaaaagctcaaaattactatttttatttctcattttttatatggctattttttctctgctgatgtttcacatctattcatttatgagaatattttcctttgccctcatgagcgtgtttataatagctgccttcaaattcttgtctgccgtttacatcttggacatcttggagatggctactgcctgctttttatcttgtgtatttattacattttcacgtgtcttcacgcatctcttgaattggaaattgtgccctggagactgtatacaagactggattaaaaagactggattctg

SEQ ID NO: 276443 - DNA, 1254 bp, Homo sapiens
  misc_feature (574)..(574): n is a, c, g, or t
gtgcagcccgtccctaggtgtagggtaatggcggccgacctggcaggtctcaggctccttgggatcccctcgagaagcccgttcatgagttgtctgcgcttctaccctgaattgggctcccttggaaaataatatctctttttaaatacccccttggaccacttttaatagttttctgatagaactaaacagtgatcattctcttaattcatgtttccattaagtttttcaggttaagtactgcacgactactcgcttctgaaactgatagacactgcctcagctccgtgcagggcagacgcacaagagcagaatctccgtgggacatctctctggagcatcaatattactgcagtatttggaagaaacaaatttaaataagttctaaggtgaagaatggaacatttaagacaagtctggaaagtcatctgcctttaataactgtcgtttgtccttaacgtcagactttctccaagaccaaaactctaagaacttatttccattcttacaaatagtaaaaatgataaatcatatcaagtcaattgaaagtcctgcctgctgctttcctaaatcncaatatggccttggtatggttttatttgtacttttgtgggggattcgtggatctttagattaaaaaaaaaaaataggtttttgaacaatttttgcaagtttgcagctgttagttattgatttatttttgcaacccatctaattcttctgtctctctcctctcctcaggctcaataattccatgggtctctaaggctgtgtttattttctttaaattttgttgatttacttttatactccatttgattttttctatctctcaccttttctcagactcagtcatcccacaggtctgtaaggctctgttcattttctttaaacttttttttttcctctcctcagattggataaattatattgctatgtctctgtttctgaactatagaaaagctcaaaattactatttttatttctcattttttatatggctattttttctctgctgatgtttcacatctattcatttatgagaatattttcctttgccctcatgagcgtgtttataatagctgccttcaaattcttgtctgccgtttacatcttggacatcttggagatggctactgcctgctttttatcttgtgtatttattacattttcacgtgtcttcacgcatctcttgaattggaaattgtgccctggagactgtatacaagactggattaaaaagactggattctg

SEQ ID NO: 276444 - DNA, 940 bp, Homo sapiens
gggtaatggcggccgacctggcaggtctcaggctccttgggatcccctcgagaagcccgttcatgagtgtctgaaactgtcacttgactgccagaagtgaaaacatcgtgtccctagtcacctgccatttgccttttcaaaaccatttcctctgttctctaggctgtcacaaatcctctgcaccccaggagcgccgcttggacccccgggctcgctgcgtggtccatatctaggtcgggcctctcacggagactttcccaccagtgtaataaagaggagaaaacgtcacagcggaagggcctgaccctgctgcatccactaaggaaacagctacggggatgggaccctgggagctgctgtggagcctcatccaccgcttctctgaccccacccaggctgcttcccaggcctcagggtcttagtgtggacctccgggccgtgattaatgcaggtcagcaggaccagagcgccccttggtccctcccaacacatgagggtagtttgtgtggtgaggtcagggatagtgtctgcgcttctaccctgaattgggctcccttggaaaataatatctctttttaaatacccccttggaccacttttaatagttttctgatagaactaaacagtgatcattctcttaattcatgtttccattaagtttttcaggttaagtactgcacgactactcgcttctgaaactgatagacactgcctcagctccgtgcagggcagacgcacaagagcagaatctccgtgggacatctctctggagcatcaatattactgcagtatttggaagaaacaaatttaaataagttctaaggtgaagaatggaacatttaagacaagtctggaaagtcatctgcctttaataactgtcgtttgtccttaacgtcagactttctccaagaccaaaactctaagaacttatttccattct

SEQ ID NO: 276445 - DNA, 2588 bp, Homo sapiens
  misc_feature (1908)..(1908): n is a, c, g, or t
ggctccacggccacatccgcaaaaagggtactggtgaacgtgacattttcacgaagccacagcccatggtcactccctgcaaagctctgaacttgcgcattcccaggccaggccgtggttgtctttccaaggcggctcagcttgtgctttgcttggagagagcggagggcagcagcacagtgacagcgtctgggacctcagaccagtttccacagccacttatgaaagcagacggctccatgggctggaggaggtgggacgctctggaaagaactcgggtgcgagtgggaaagaaaatcgagctgagcagcgggaagtcgaagtcgcgtgagtgaggaccagacactctcgatttaggcaaaggcggggtgcacttcccaacaacacatcctcctcactggcgagaccaggcctgcccttcaagttcctctcctgatttaatccccttggcgagggtttggcatgaaatcaatggccagcaagcttggtaaacgaagccgcctacaccgccctccccctccctgcacggccgcgccccgcctccgctcctgtctcaatctgggattgtcctcctgtagccccaccatccaccgtggggaacggtggagagactacaactcccagtatgcaccgcgatgcgcgcctcaccctgcatctcccagcccgcagccagctggcatcctagaccctctgccctgcgaccaacagccgggagcggaccagacaccagaactcccggaacggttgaagacggttccgctccctgtcccgcctttcgcagcccagcagtttcgccctgcggagaggagccttgctgtttccaaatctctcctgctgaagagacattggagctagggcggctagtttcacctggtaattgtgacaccctgtctcctcgagctgcaggcttttatgcttgtcatgttcgaagtttgataccttgcagatcaacaaagggtcggtggcctctcactgcctccgcggcagggttgtcaaggtaacgctcctcagacaagggtggggcgcggcccgccccttttctcaccccgcctcctcctcagccccaccctccttcgctcctcctcttgtcactccctttcagacatgcgcagtgcggcccgtccctagggctgggttaagggccgcggatgtggcagttctcaggcctcttgggatcgcctcaagaagccccctcacgagtgtctcgatttcctgtcagccaacaaagggccgttcgcctttcatggcctccacagcagcgttgccgtggctgtcacaaatcctctgcaccccaggagcgccgcttggacccccgggctcgctgcgtggtccatatctaggtcgggcctctcacggagactttcccaccagtgtaataaagaggagaaaacgtcacagcggaagggcctgaccctgctgcatccactaaggaaacagctacggggatgggaccctgggagctgctgtggagcctcatccaccgcttctctgaccccacccaggctgcttcccaggcctcagggtcttagtgtggacctccgggccgtgattaatgcagtttttcaggttaagtactgcacgactactcgcttctgaaactgatagacactgcctcagctccgtgcagggcagacgcacaagagcagaatctccgtgggacatctctctggagcatcaatattactgcagtatttggaagaaacaaatttaaataagttctaaggtgaagaatggaacatttaagacaagtctggaaagtcatctgcctttaataactgtcgtttgtccttaacgtcagactttctccaagaccaaaactctaagaacttatttccattcttacaaatagtaaaaatgataaatcatatcaagtcaattgaaagtcctgcctgctgctttcctaaatcncaatatggccttggtatggttttatttgtacttttgtgggggattcgtggatctttagattaaaaaaaaaaaataggtttttgaacaatttttgcaagtttgcagctgttagttattgatttatttttgcaacccatctaattcttctgtctctctcctctcctcaggctcaataattccatgggtctctaaggctgtgtttattttctttaaattttgttgatttacttttatactccatttgattttttctatctctcaccttttctcagactcagtcatcccacaggtctgtaaggctctgttcattttctttaaacttttttttttcctctcctcagattggataaattatattgctatgtctctgtttctgaactatagaaaagctcaaaattactatttttatttctcattttttatatggctattttttctctgctgatgtttcacatctattcatttatgagaatattttcctttgccctcatgagcgtgtttataatagctgccttcaaattcttgtctgccgtttacatcttggacatcttggagatggctactgcctgctttttatcttgtgtatttattacattttcacgtgtcttcacgcatctcttgaattggaaattgtgccctggagactgtatacaagactggattaaaaagactggattctg

SEQ ID NO: 276446 - DNA, 1910 bp, Homo sapiens
  misc_feature (1803)..(1803): n is a, c, g, or t
ggctccacggccacatccgcaaaaagggtactggtgaacgtgacattttcacgaagccacagcccatggtcactccctgcaaagctctgaacttgcgcattcccaggccaggccgtggttgtctttccaaggcggctcagcttgtgctttgcttggagagagcggagggcagcagcacagtgacagcgtctgggacctcagaccagtttccacagccacttatgaaagcagacggctccatgggctggaggaggtgggacgctctggaaagaactcgggtgcgagtgggaaagaaaatcgagctgagcagcgggaagtcgaagtcgcgtgagtgaggaccagacactctcgatttaggcaaaggcggggtgcacttcccaacaacacatcctcctcactggcgagaccaggcctgcccttcaagttcctctcctgatttaatccccttggcgagggtttggcatgaaatcaatggccagcaagcttggtaaacgaagccgcctacaccgccctccccctccctgcacggccgcgccccgcctccgctcctgtctcaatctgggattgtcctcctgtagccccaccatccaccgtggggaacggtggagagactacaactcccagtatgcaccgcgatgcgcgcctcaccctgcatctcccagcccgcagccagctggcatcctagaccctctgccctgcgaccaacagccgggagcggaccagacaccagaactcccggaacggttgaagacggttccgctccctgtcccgcctttcgcagcccagcagtttcgccctgcggagaggagccttgctgtttccaaatctctcctgctgaagagacattggagctagggcggctagtttcacctggtaattgtgacaccctgtctcctcgagctgcaggcttttatgcttgtcatgttcgaagtttgataccttgcagatcaacaaagggtcggtggcctctcactgcctccgcggcagggttgtcaagacatgcgcagtgcggcccgtccctagggctgggttaagggccgcggatgtggcagttctcaggcctcttgggatcgcctcaagaagccccctcacgagtgtctcgatttcctgtcagccaacaaagggccgttcgcctttcatggcctccacagcagcgttgccgtggctgtcacaaatcctctgcaccccaggagcgccgcttggacccccgggctcgctgcgtggtccatatctaggtcgggcctctcacggagactttcccaccagtgtaataaagaggagaaaacgtcacagcggaagggcctgaccctgctgcatccactaaggaaacagctacggggatgggaccctgggagctgctgtggagcctcatccaccgcttctctgaccccacccaggctgcttcccaggcctcagggtcttagtgtggacctccgggccgtgattaatgcagtttttcaggttaagtactgcacgactactcgcttctgaaactgatagacactgcctcagctccgtgcagggcagacgcacaagagcagaatctccgtgggacatctctctggagcatcaatattactgcagtatttggaagaaacaaatttaaataagttctaaggtgaagaatggaacatttaagacaagtctggaaagtcatctgcctttaataactgtcgtttgtccttaacgtcagactttctccaagaccaaaactctaagaacttatttccattcttacaaatagtaaaaatgataaatcatatcaagtcaattgaaagtcctgcctgctgctttcctaaatcncaatatggccttggtatggttttatttgtacttttgtaagaggggagaggggttcttagagtttttgtcttcgagaaagtctgacgttaaggacaaacggtcgaacc

SEQ ID NO: 276447 - DNA, 2194 bp, Homo sapiens
  misc_feature (1514)..(1514): n is a, c, g, or t
ggctccacggccacatccgcaaaaagggtactggtgaacgtgacattttcacgaagccacagcccatggtcactccctgcaaagctctgaacttgcgcattcccaggccaggccgtggttgtctttccaaggcggctcagcttgtgctttgcttggagagagcggagggcagcagcacagtgacagcgtctgggacctcagaccagtttccacagccacttatgaaagcagacggctccatgggctggaggaggtgggacgctctggaaagaactcgggtgcgagtgggaaagaaaatcgagctgagcagcgggaagtcgaagtcgcgtgagtgaggaccagacactctcgatttaggcaaaggcggggtgcacttcccaacaacacatcctcctcactggcgagaccaggcctgcccttcaagttcctctcctgatttaatccccttggcgagggtttggcatgaaatcaatggccagcaagcttggtaaacgaagccgcctacaccgccctccccctccctgcacggccgcgccccgcctccgctcctgtctcaatctgggattgtcctcctgtagccccaccatccaccgtggggaacggtggagagactacaactcccagtatgcaccgcgatgcgcgcctcaccctgcatctcccagcccgcagccagctggcatcctagaccctctgccctgcgaccaacagccgggagcggaccagacaccagaactcccggaacggttgaagacggttccgctccctgtcccgcctttcgcagcccagcagtttcgccctgcggagaggagccttgctgtttccaaatctctcctgctgaagagacattggagctagggcggctagtttcacctggtaattgtgacaccctgtctcctcgagctgcaggcttttatgcttgtcatgttcgaagtttgataccttgcagatcaacaaagggtcggtggcctctcactgcctccgcggcagggttgtcaagacatgcgcagtgcggcccgtccctagggctgggttaagggccgcggatgtggcagttctcaggcctcttgggatcgcctcaagaagccccctcacgagtgtctcgatttcctgtcagccaacaaagggccgttcgcctttcatggcctccacagcagcgttgccgtgtttttcaggttaagtactgcacgactactcgcttctgaaactgatagacactgcctcagctccgtgcagggcagacgcacaagagcagaatctccgtgggacatctctctggagcatcaatattactgcagtatttggaagaaacaaatttaaataagttctaaggtgaagaatggaacatttaagacaagtctggaaagtcatctgcctttaataactgtcgtttgtccttaacgtcagactttctccaagaccaaaactctaagaacttatttccattcttacaaatagtaaaaatgataaatcatatcaagtcaattgaaagtcctgcctgctgctttcctaaatcncaatatggccttggtatggttttatttgtacttttgtgggggattcgtggatctttagattaaaaaaaaaaaataggtttttgaacaatttttgcaagtttgcagctgttagttattgatttatttttgcaacccatctaattcttctgtctctctcctctcctcaggctcaataattccatgggtctctaaggctgtgtttattttctttaaattttgttgatttacttttatactccatttgattttttctatctctcaccttttctcagactcagtcatcccacaggtctgtaaggctctgttcattttctttaaacttttttttttcctctcctcagattggataaattatattgctatgtctctgtttctgaactatagaaaagctcaaaattactatttttatttctcattttttatatggctattttttctctgctgatgtttcacatctattcatttatgagaatattttcctttgccctcatgagcgtgtttataatagctgccttcaaattcttgtctgccgtttacatcttggacatcttggagatggctactgcctgctttttatcttgtgtatttattacattttcacgtgtcttcacgcatctcttgaattggaaattgtgccctggagactgtatacaagactggattaaaaagactggattctg

SEQ ID NO: 276448 - DNA, 274 bp, Homo sapiens
aaaaatgcaggggttgctattctaatttcagacaaaacaggctttaaaccaacagtgatcaaaaaagacaaagatggacattacataatgttaaagagttcaagtcaacaagaatatctaactattatatatatgtatgtgtgtgtgtatgtatacacaacacaggagtacccaaatccataaaacaagttcttagagacattaaaagagacttagataaccacatattaataatgagagacttcaacaccttattaataatattagtcaaatc

SEQ ID NO: 276449 - DNA, 295 bp, Homo sapiens
accacgcccagctaatttttgtatttttagtagagacggattttgccatgttggccaggctggtctcgaactcctgacctcaaccgcccgcctcggcctcccaaagtgctgggattacaggcgtgagccaccgcacctgaccctaaaggctattttaatagcttccttgcaacttcagcctagtctgaatacagcagccacagtgatccttctaaaacgtaagtgaaatcacattactcctctgcacaaaaccttccaatggtttatcatccaactccaaagttcttctcataac

SEQ ID NO: 276450 - DNA, 337 bp, Homo sapiens
accatattataccacctctccttgccctaatgcacaaactccaagtgcatatctggttttcatctagggggttttacatttgccccagctgctgaagataaggaccttctctctgttcctgaactatttgcaatatcatagaattgttttaggttatcttttttctggttatagagtaatacattccttataaaagctcaaacaatgtcaaaatgtaaatcttagaaagcaaaagtctcctctaattccaccttgcagaggtaatcaatgctaacagtttagtgtatattttggcattttcccatatgcatatactaataaataaatatttaaatac

SEQ ID NO: 276451 - DNA, 493 bp, Homo sapiens
tggaatttagaattgtaatatcttttagttcttactttccttctaactacataaaataatgttctgactttctcatcttccccaaaatcggtaaatgcatttgtcaatatgttaaggatataagccagggtgaacaatttggacatggaacatgtgatatattacacttaaatatattaaataccatgggagatgggttttaataagattcagcccaaataaattagtattcctttttatcctgggccagactttcaaaaagtggatacatctagccctttgaaataaacgtgatatttgtagataagtatatatttaaatctaagtatatgaatataaaaagtagccgggcgaggtagcaggcgcctgtagtcccagctactcgggaggctgaggcaggagaatggcgtgaaccccagggggcggagcctgcagtgagccgagatcgcgccactgcactccagcctgggcgacagcgagactacgtctcaaa

SEQ ID NO: 276452 - DNA, 441 bp, Homo sapiens
gtcattagtactcaatacagtttttgttgttatgaattgatccttgtaagaaatctaaagcaatgtgtgcttaaccgatgcttaaaactaatatgttattccccccaaatttttgcttatatgactattaataagctcagtttagaaactactgttctagaaaggaatatacttggtgttaatagttgttatgacccatcatcactagactgggctttttaaaaaaaagagagagagagagagatggggcctcagtatgttgcccaggctggactcctgggccaagtgatcctcctgcctcctaatagcgagactacaggcatatgctaccatgccaagctaaaatatttgagttttgattttgccgagtttttgatatgtggacaatagttgattagcttcgaaaagtgatagaattctacatctaaagtcatctttttt

SEQ ID NO: 276453 - DNA, 342 bp, Homo sapiens
tcctgcctgaccttgcacatttcaagacccttgtgatcacactgggccccagatcctcaggacactctctccatctgaaaaccagcagtggcatcctcccttctacctcgattccccttcatcatggggtagtggtgttcacaaaggaatcacaggtcccttcactctgtttctttggggtctttggccttcctcttctctttttccaagacgcctgcaaatatccaggaaactgggtctgtttctcatgtgacctgccaaatgtttctttccagttgacagcatccgtttacactttaccaacgatgtttgttgtttttgttgcagaagatttcagtttgt

SEQ ID NO: 276454 - DNA, 440 bp, Homo sapiens
ataactttgttccaacacattcaggctgcggtcagaaagggtgagctggaagcagtgagctgggagataatgaaaccaaaacaccattatcaggaagcttgagaacaaggccaccttttaagtatctagaaattcccattaatttcttccacaccttgttccccatcccacctgaagactgaagctgagaggcttttttcccagtcatcttgaccacaagatcagttctctccgtgaacataaagacaaaatcgctgtgacaccaacagacagattttttaacaagtggaatccatgtctcatgtaaacaatgtgctactgcctgccattgagttctcttccctcgttttcctttttgaagacttaacccctttcccaaagggacatgtgctcaggtttcttgactccacagcaatcccttctgttgtgtaaggcaaact

SEQ ID NO: 276455 - DNA, 195 bp, Homo sapiens
cagggaaaagcctctgaggagtagggctgggggaggctgtggcagggaccgtgtttcctgttcagaggctgtgctgagaaccgacttgaactcctggcctcaagtgatcaaccctcctcagcctcctaaagtgctggaattacaggtgtgagtcaccacgcacagctcaactttttttaaaaaaattaaaataac

SEQ ID NO: 276456 - DNA, 413 bp, Homo sapiens
ttaattagtatctctatcttccttctgtgtaataaaaagaatttagaatacttaacctccaatcgctcctctcatcctatataggtttttgtccatgttgttatctccaaattagtcatctctgttattactaaccctgtcggaaaataaatgcttgtttagacttagttacatgttaaccagttttgttttgttttgttttgttttgtttctgagtcccagttccactcttgttgcccaggctgaagtgcactggctgggtctcagctcactgcaacctctgcctcccaggttcaaggaattctcctgcctcagcctcccaagtaactgagattacaggcactcgccaccacaccctgctaatttttgtatttttagtagagatggggtttcaccacgttggccagtctgga

SEQ ID NO: 276457 - DNA, 699 bp, Homo sapiens
accactggactccagcctgggcaagagcaagactgtctcaaaacaaaaacaacaaacaaacaaacaaaaagaaaacacaaaaaacattactaaacaagatttctagagggaattaacaaaccagtgcttatttaccaataaactaatacgctaattgcaggaaccctgattaaagcaggcccctgttaacacaagattcttaggatatacttggaaacaggtgcattggaaaccactgtactgagaagtttatgggctcaagactgaattggaagctaggcgtggtcgctcatgcctgtaatcccagcactctgggaggctgaggtggaaggatgagttcaggagttcgagaccagcctgggcaacacagagagacgtgtctttaaaaaagtaaaaaatgggctgagtgccttggctcatgcctgtaatcccagcactttgggaagccaaggcgggtggatcacttcaggccaggagttcaagaacagcctgaccaacatggcaaaactccatctctactaaaaataccaaaaaattagcagggtgtggtggtgcacacctgtagtcccagctactcaggaggctgatgtgtgagaatcacttgaacctgggaggcggagtttgcagcgagccaagatcgtgccactgcactccagtgtgggcaacagagattctgtctcaaaaaaaaaaaaaaaagac

SEQ ID NO: 276458 - DNA, 333 bp, Homo sapiens
cacacagtagaggccatatatggcaagtctgcagctaacagcatactcaatactgaagagctaaaggctttttttctaatatcatgaacaatacaagatgcttacctattctcaccatttcttttgaacatagttctggaagtcctagccagagcaattagacaagagaaagaaataaaaggcatcctaataggaaaggatgaagtgaaattatctttgtttgctgactacatgatcttatacagttacacctctgtatctgtgggttctgcatctttggattcaaccaaccacagattgaaaatactcagaaaaaaatggatagttatgcct

SEQ ID NO: 276459 - DNA, 473 bp, Homo sapiens
agaggccacaggatgtgcctacaatcacagagctggaggcaaaacccagcagaaccaagtcagcccagtggccttcctaccgattcaccatggcctttggaccggcccatactcagtctattttaagtaatgccaagaagtgtctctatgtatcccccagcagtattcatgcccaaccagccaggacactcagggttccccaatttactattagggagcctacttcggcagcagggagagtggtactttgggacaggttggggctggcagggcaggctgacagaggtgctgagcaggaaagcatgcaggaggaaaatcctgcaggggtgtctgtttcacaagagttacaagaatacaggaccattccttctaccaaggaggctagtggttcgagatcctagaaaactaggactccgcctttaccaagaataaacaacagcttctccttccccaaattgcaaaaacaaacaaac

SEQ ID NO: 276460 - DNA, 200 bp, Homo sapiens
cccttttctgctctgttccatccaggctcccccagacaggccatgttggcttatgggtatggggtgctaagaggacttagcctgctcaagtgccttcaggagagagagccatcatggccaaggtgccagaacccctgtctgtggatatttaccctggagaaacctggagaccagggtctgtgcctccatccatttgatca

SEQ ID NO: 276461 - DNA, 322 bp, Homo sapiens
gaacattctctccctgaaggcagagatgttcatctatcttattgtggctgtgtccccacacagtaggtgctcagtaagggcccaagtgtcccagctgcctcgtcctgagtataggatttagcctctctatgccaaagtttctccatacgtcagaagggggaaataaaatgagctgacctcacagaatcattgagggataaatcctagctactcaggaggctgaggtgggaggattgcttgagcccaggaggtggagactgcagtgagtcataatcataccactgcaccccagcctgggctacagagccagaccctgcctcaa

SEQ ID NO: 276462 - DNA, 355 bp, Homo sapiens
tgcggccgcgccccgcccccagctccccgcacgctgcccctcccgctcgtctgtcccgctggcggcccagcgtgctggctgtacgcgtcacttccggctgtgtcggcgcgcgaaaaaaggaaccaaagagaagtgaaggaatgtgtccaagggctcccaagttggcggtggaattagaattgaagcctcagctccaaagcctgtgttctgaactacccggttgcagttcacaaaatacactttggcagtactttcataacgaaaacaaatgattacaaccagtttacaaatgctttgctttactggaggatcgacatgtttgactaattttcaaaaataaatctcagaagcagca

SEQ ID NO: 276463 - DNA, 491 bp, Homo sapiens
gcctcgcgtgccgattttcatagttccctgtggctccgagccgagggagccgcggtgtggaacggagggaaccagtgatctcagtgctgaagaaaacagggagtgtgtgtcttcatacttgatttgccttaccgcaggggcataatatgagatatctgggcgtgttaagtcgttcttgatgaaatgtgtcctctgtgaatgtagtctcactgttagactaggaagatgctgttttgctgtgcccagttcctcttaaaagtacagatgctccttgggttgcagccgtaataaacccatcctaaatagaaaacgcgttttaatacccttataaacgaaaaggataaataagcctttgggttctgtaatgtgagccagcattctttgagtgcgtatgtgacaggtaaatgttttacgtatattaaactcatttaatgttcataagttctaagtgcatcgctacaattattacaaatgaatcccattttacacag

SEQ ID NO: 276464 - DNA, 908 bp, Homo sapiens
tgcggccgcgccccgcccccagctccccgcacgctgcccctcccgctcgtctgtcccgctggcggcccagcgtgctggctgtacgcgtcacttccggctgtgtcggcgcgcgaaaaaaggtcctgggttggaatgtttgtactggtctgtggcggtggttgtcggctgtcctgccaggaaaactcggcactgactatcccactgctgatgctgtaaaagaggtccttctgctatgacgcaactgtggttcctctggttctggggacacttaggcctcgcgtgccgattttcatagttccctgtggctccgagccgagggagccgcggtgtggaacggagggaaccagtgatctcagtgctgaagaaaacagggagtgtgtgtcttcatacttgatttgccttaccgcaggggcataatatgagatatctgggcgtgttaagtcgttcttgatgaaatgtgtcctctgtgaatgtagtctcactgttagactaggaagatgctgttttgctgtgcccagttcctcttaaaagtacagatgctccttgggttgcagccgtaataaacccatcctaaatagaaaacgcgttttaatacccttataaacgaaaaggataaataagcctttgggttctgtaatgtgagccagcattctttgagtgcgtatgtgacaggaaccaaagagaagtgaaggaatgtgtccaagggctcccaagttggcggtggaattagaattgaagcctcagctccaaagcctgtgttctgaactacccggttgcagttcacaaaatacactttggcagtactttcataacgaaaacaaatgattacaaccagtttacaaatgctttgctttactggaggatcgacatgtttgactaattttcaaaaataaatctcagaagcagca

SEQ ID NO: 276465 - DNA, 781 bp, Homo sapiens
tcagtttgaatgattgtggtttaaaccaggataggagcaaaaaacacttctttgaattggataaataatctatgcattcagtcataaattaaatatgattaactccctttcttggtatgtcctgtatattgatctatccagcatccaaaactgttatctaccttacatagtggtacgtttgaggcattccatttacctacagtttccattgagccaatgtatgggtttcagtaggttccttaatgatgtaacattgtcaatttttaatgatgttatgttgttatgtatagaagtccagtctccatcatctgaatcaaaccaaaggatttaattacagagtgaatctgggaccttacctaagttagatctagtaccattaaggctttctatgcatacagataagtcaccagtaataaaacttagagtaactagaagctatcccatggcttccagtgcttcttcccaatgccaaaccagctggccatgagtattagtcagatgacttatgttaaacctttttgtaaagtcattttcctgaatgggtcaacaaatcatatataggagctggttctagcattaattgcaattcttcccaagtgtttgtttgtttgtttgtttgtttgtttgttttaacagagacagggtctagctctgttgcccaagctggaatgctgtggtgggatcatagctcactgcaacctccaacttctaggctcaagtgatcctcttgcctcagcctcgcggactacaggtgcctgcaaccatttctggctatttaaaa

SEQ ID NO: 276466 - DNA, 443 bp, Homo sapiens
gggaggaaggcaggggaggggaagagagagaactataaaaagtaaagaatccaaatatccagtatcaaaacaaggacaggaatagtttgtggacatcccattagaacacaatatactattcataagttttataaagtcacttactttgccttccagaatcaatcatgttagttactacttaagcctttcttagttttattttcctttcgtaaattatatagtcttatcagaaggacttaaacactgttaagtgtttcaaaagatgctatttagttatttttaaatccttatgacatctgaataaatgtttcttccattgaaggtgaaaacatttactgtttgcccatagataaaaatgggcaaaatattggcattattagattatattattttttcttttcattgttttttattgatttctatcctagagaaacaaaacaaac

SEQ ID NO: 276467 - DNA, 291 bp, Homo sapiens
aaagacttgaatttggttattagaagtttattagtgacatctgggtatacagctcgagttagaggaagaagccaattatagagggttaaagagaacatagatgctgtgtgcttttctcagtatgtttttgttacaaagattgttctgcagggacatcacttaaatcacatataacagtatcttgtatccctagttgtgatgatgccatagatgtcttgtttctacttctctttggcttcacggtattaagcatgtagtagatgtgttgaaaataataactgtgtgagtaaa

SEQ ID NO: 276468 - DNA, 307 bp, Homo sapiens
aaagacttgaatttggttattagaagtttattagtgacatctgggtatacagctcgagttagaggaagaagccaattatagagggttaaagagaacatagatgctgtgtgcttttctcagtatgtttttgttacaaagattgttctgcagggacatcacttaaatcacatataacagtatcttgtatccctagttgcgactccttgacgttgacaatcgagtagtactcccgattgaggccccattcgtataataatacatcacagacgtctgcactcatgagctgtcccacataggctaaaacaga

SEQ ID NO: 276469 - DNA, 410 bp, Homo sapiens
tgatgatcccttgcattcacttaatgaatggtaaacatattttctcttccttataattttcttagtaacattttccttttgctagtttactgtaagactacagtattaatacttatgacatataaaatacatgttaatagactgtttatcttatcagtaagacttccaatcaacaagaggctatcagtagttaagttttgagggagtcaaaattataaatagatttttgactgtggtgaggagagtcgacacccttaagccccatattattcaaagtcacctgtatttcagtatcctgcccaaataggaatccctctgccaaatgaccaaacagcctttccttgaaaatgtagaaagtcagagactcctcacttcacaaaataaactcattctgctgttgggaaatttac

SEQ ID NO: 276470 - DNA, 327 bp, Homo sapiens
ggcaggagtgtcgcttgagcccagatgtttgaggttgcaataagctatgaccatgccactgcactctagtctgggtgacagagggagaccctgtttcttaaaaaataaaataacagataccctcaactaaacttggtgtggccatgacagtgaccttgatcttaggttatttaacatttacgacttttatctcttagtcccatcaagccttcaagaactatttctgaatgtaatctcatgtcagctagggaaatcatactccagtggaaaagctttggagtcaaatcttgagtccaaatttctgtgcaaccacatgttaataatgcg

SEQ ID NO: 276471 - DNA, 1161 bp, Homo sapiens
cgcaattttattgtattttatttttttagagacagggtcttgctgtttcccccaggctggagtgcaatggagtgatcatagctcacttcagcctccaactcctgggctcaagcgatcctcccacctcagcctcccccgtagctgggactacaggcatatgccaccatgcccggcttctcagagctgcaattttaaattgggagccagggaagacctccctgtggaggtggcaggttatcaagactgaagatgtagagaagaaccttccagtcaaagggaaaaggcaggtcctgctgtgctcaggaatggccagaagtactatcatccatccccatcttagagatgtggacagggccgcaacagtgtcagggcgtttcctggctcctcaacagcaggatccgaagtcgtctggaggatgtgccgctctgcttggggcggacctcccctggagcgcacctcccctggagcgcgcgacgcgcagggtgcacacagccctcttggaccccgggaccggctcaggctcaggctcggcgtcagcaaagggacctgcgcggcgccctggggcggaggaggcccgacggtcagtggccagtgccgtgcggctgacggaggtcggggcgcaacgggaccgggaggagcgcccagggcgggggtgccaggccccctccaaccgcggcggggttggagtcaaggcggctccgggcgggggtcggaccccaaatccaggccacaggccgccgcccggtcttcttctttacccgaagggcggccgcggcggatgggaagccgtgcacgacgagcacaatctccatggggaggagaacaggaatgttcctgtgagccccgccgcgccctaccgccagcgcagcccagcatcgcgggtcccctcctatcccaccggagaacggggtcctcactcccagcttcagccgagccctggccccgcaactgcctgaaggcacgccccctgcacctgcccacctcaggtcccgcctccagcccaggtacccacctgttctcattcctctccctcctgcgctccacccgaccccagcgtgccccccaagacccctgcgctggaccccagcctggatcatcaccctcgcctcagccagctgctctccggagttctcgagtcatcgctgttccagacagcgatga

SEQ ID NO: 276472 - DNA, 1270 bp, Homo sapiens
ttccgcctcctccagggagccttcctccgggcacagagaccctccccctcttaacagggacctcggccaatggtccgccaagccccgccttttttgcggccaccattgtgctgctggacgaacagggttgacagtgagccccacgtagacagggcccgggtaccagggattcaggcagtagagcagctggacgctgaagaggcacccggcctcgccccgattcccgcgggacccttcgaattttaggaacttttcactaacgaaacacacttctgtgtcagcaccgacatcaagaagagaacctcaccagcacctcagaacccgctttgtccctccctggttccttcccctgggtgcctggtgtgctgccgtctcacccatatgtagttgagcgcagcagcccctgtaggacacctggcagatcaggtcacagtcctgctgtgccctcgggctcactcgggagctgggggctcccaggtgctcctccagcagctcagttcagcatgctggggggtcagggccagcccctgtccctggggcctcaggcctccctttcttcccacagtggccaagatcgcgggtctctacaatgacttggagccaccccggaagaccatgcgcagaggggtgctgatgaccctgctgcagcagtcggccatgaccctgcccctgtggattgggaagcctggtgacaagcccccacccctctgtggggccatccctgcctcaggagactacgtggccagacctggagacaaggtggctgcccgggtgaaggccgtggatggggatgagcagtggatcctggccgaggtggtcagttacagccatgccaccaacaagtgagtgacaccagccccggggctgctctctgcccttcctgtccacctgccccacagccccaggaggactattctatcctgtttgaagacacctcctatgcagacggctactcccctcatctcagtgtggcccagaggtacctggtagcttctaaggagcccaagaaaaagtgacgctgcccggcggactcgacgtcctccaccatcttggggcaggacagcagaggatgtgctgggattaaacagacatcccccctccacacatctcctgggttttacttctccaaacccttctcccctccccagatatggtgacctggggagctgaaggctgggggagaggtgaccatatgtggccccaccgggcattcactctttcagctcagagtttctcttcctttccaatacaggctctacatgaacacaaa

SEQ ID NO: 276473 - DNA, 1621 bp, Homo sapiens
cgcaattttattgtattttatttttttagagacagggtcttgctgtttcccccaggctggagtgcaatggagtgatcatagctcacttcagcctccaactcctgggctcaagcgatcctcccacctcagcctcccccgtagctgggactacaggcatatgccaccatgcccggcttctcagagctgcaattttaaattgggagccagggaagacctccctgtggaggtggcaggttatcaagactgaagatgtagagaagaaccttccagtcaaagggaaaaggcaggtcctgctgtgctcaggaatggccagaagtactatcatccatccccatcttagagatgtggacagggccgcaacagtgtcagggcgtttcctggctcctcaacagcaggatccgaagtcgtctggaggatgtgccgctctgcttggggcggacctcccctggagcgcacctcccctggagcgcgcgacgcgcagggtgcacacagccctcttggaccccgggaccggctcaggctcaggctcggcgtcagcaaagggacctgcgcggcgccctggggcggaggaggcccgacggtcagtggccagtgccgtgcggctgacggaggtcggggcgcaacgggaccgggaggagcgcccagggcgggggtgccaggccccctccaaccgcggcggggttggagtcaaggcggctccgggcgggggtcggaccccaaatccaggccacaggccgccgcccggtcttcttctttacccgaagggcggccgcggcggatgggaagccgtgcacgacgagcacaatctccatggggaggagaacaggaatgttcctgtgagccccgccgcgccctaccgccagcgcagcccagcatcgcgggtcccctcctatcccaccggagaacggggtcctcactcccagcttcagccgagccctggccccgcaactgcctgaaggcacgccccctgcacctgcccacctcaggtcccgcctccagcccagtggccaagatcgcgggtctctacaatgacttggagccaccccggaagaccatgcgcagaggggtgctgatgaccctgctgcagcagtcggccatgaccctgcccctgtggattgggaagcctggtgacaagcccccacccctctgtggggccatccctgcctcaggagactacgtggccagacctggagacaaggtggctgcccgggtgaaggccgtggatggggatgagcagtggatcctggccgaggtggtcagttacagccatgccaccaacaaacacctcctatgcagacggctactcccctcatctcagtgtggcccagaggtacctggtagcttctaaggagcccaagaaaaagtgacgctgcccggcggactcgacgtcctccaccatcttggggcaggacagcagaggatgtgctgggattaaacagacatcccccctccacacatctcctgggttttacttctccaaacccttctcccctccccagatatggtgacctggggagctgaaggctgggggagaggtgaccatatgtggccccaccgggcattcactctttcagctcagagtttctcttcctttccaatacaggctctacatgaacacaaa

SEQ ID NO: 276474 - DNA, 1235 bp, Homo sapiens
ttccgcctcctccagggagccttcctccgggcacagagaccctccccctcttaacagggacctcggccaatggtccgccaagccccgccttttttgcggccaccattgtgctgctggacgaacagggttgacagtgagccccacgtagacagggcccgggtaccagggattcaggcagtagagcagctggacgctgaagaggcacccggcctcgccccgattcccgcgggacccttcgaattttaggaacttttcactaacgaaacacacttctgtgtcagcaccgacatcaagaagagaacctcaccagcacctcagaacccgctttgtccctccctggttccttcccctgggtgcctggtgtgctgccgtctcacccatatgtagttgagcgcagcagcccctgtaggacacctggcagatcaggtcacagtcctgctgtgccctcgggctcactcgggagctgggggctcccaggtgctcctccagcagctcagttcagcatgctggggggtcagggccagcccctgtccctggggcctcaggcctccctttcttcccacagtggccaagatcgcgggtctctacaatgacttggagccaccccggaagaccatgcgcagaggggtgctgatgaccctgctgcagcagtcggccatgaccctgcccctgtggattgggaagcctggtgacaagagactacgtggccagacctggagacaaggtggctgcccgggtgaaggccgtggatggggatgagcagtggatcctggccgaggtggtcagttacagccatgccaccaacaagtgagtgacaccagccccggggctgctctctgcccttcctgtccacctgccccacagccccaggaggactattctatcctgtttgaagacacctcctatgcagacggctactcccctcatctcagtgtggcccagaggtacctggtagcttctaaggagcccaagaaaaagtgacgctgcccggcggactcgacgtcctccaccatcttggggcaggacagcagaggatgtgctgggattaaacagacatcccccctccacacatctcctgggttttacttctccaaacccttctcccctccccagatatggtgacctggggagctgaaggctgggggagaggtgaccatatgtggccccaccgggcattcactctttcagctcagagtttctcttcctttccaatacaggctctacatgaacacaaa

SEQ ID NO: 276475 - DNA, 1674 bp, Homo sapiens
cgcaattttattgtattttatttttttagagacagggtcttgctgtttcccccaggctggagtgcaatggagtgatcatagctcacttcagcctccaactcctgggctcaagcgatcctcccacctcagcctcccccgtagctgggactacaggcatatgccaccatgcccggcttctcagagctgcaattttaaattgggagccagggaagacctccctgtggaggtggcaggttatcaagactgaagatgtagagaagaaccttccagtcaaagggaaaaggcaggtcctgctgtgctcaggaatggccagaagtactatcatccatccccatcttagagatgtggacagggccgcaacagtgtcagggcgtttcctggctcctcaacagcaggatccgaagtcgtctggaggatgtgccgctctgcttggggcggacctcccctggagcgcacctcccctggagcgcgcgacgcgcagggtgcacacagccctcttggaccccgggaccggctcaggctcaggctcggcgtcagcaaagggacctgcgcggcgccctggggcggaggaggcccgacggtcagtggccagtgccgtgcggctgacggaggtcggggcgcaacgggaccgggaggagcgcccagggcgggggtgccaggccccctccaaccgcggcggggttggagtcaaggcggctccgggcgggggtcggaccccaaatccaggccacaggccgccgcccggtcttcttctttacccgaagggcggccgcggcggatgggaagccgtgcacgacgagcacaatctccatggggaggagaacaggaatgttcctgtgagccccgccgcgccctaccgccagcgcagcccagcatcgcgggtcccctcctatcccaccggagaacggggtcctcactcccagcttcagccgagccctggccccgcaactgcctgaaggcacgccccctgcacctgcccacctcaggtcccgcctccagcccagtggccaagatcgcgggtctctacaatgacttggagccaccccggaagaccatgcgcagaggggtgctgatgaccctgctgcagcagtcggccatgaccctgcccctgtggattgggaagcctggtgacaagagactacgtggccagacctggagacaaggtggctgcccgggtgaaggccgtggatggggatgagcagtggatcctggccgaggtggtcagttacagccatgccaccaacaagtgagtgacaccagccccggggctgctctctgcccttcctgtccacctgccccacagccccaggaggactattctatcctgtttgaagacacctcctatgcagacggctactcccctcatctcagtgtggcccagaggtacctggtagcttctaaggagcccaagaaaaagtgacgctgcccggcggactcgacgtcctccaccatcttggggcaggacagcagaggatgtgctgggattaaacagacatcccccctccacacatctcctgggttttacttctccaaacccttctcccctccccagatatggtgacctggggagctgaaggctgggggagaggtgaccatatgtggccccaccgggcattcactctttcagctcagagtttctcttcctttccaatacaggctctacatgaacacaaa

SEQ ID NO: 276476 - DNA, 1709 bp, Homo sapiens
cgcaattttattgtattttatttttttagagacagggtcttgctgtttcccccaggctggagtgcaatggagtgatcatagctcacttcagcctccaactcctgggctcaagcgatcctcccacctcagcctcccccgtagctgggactacaggcatatgccaccatgcccggcttctcagagctgcaattttaaattgggagccagggaagacctccctgtggaggtggcaggttatcaagactgaagatgtagagaagaaccttccagtcaaagggaaaaggcaggtcctgctgtgctcaggaatggccagaagtactatcatccatccccatcttagagatgtggacagggccgcaacagtgtcagggcgtttcctggctcctcaacagcaggatccgaagtcgtctggaggatgtgccgctctgcttggggcggacctcccctggagcgcacctcccctggagcgcgcgacgcgcagggtgcacacagccctcttggaccccgggaccggctcaggctcaggctcggcgtcagcaaagggacctgcgcggcgccctggggcggaggaggcccgacggtcagtggccagtgccgtgcggctgacggaggtcggggcgcaacgggaccgggaggagcgcccagggcgggggtgccaggccccctccaaccgcggcggggttggagtcaaggcggctccgggcgggggtcggaccccaaatccaggccacaggccgccgcccggtcttcttctttacccgaagggcggccgcggcggatgggaagccgtgcacgacgagcacaatctccatggggaggagaacaggaatgttcctgtgagccccgccgcgccctaccgccagcgcagcccagcatcgcgggtcccctcctatcccaccggagaacggggtcctcactcccagcttcagccgagccctggccccgcaactgcctgaaggcacgccccctgcacctgcccacctcaggtcccgcctccagcccagtggccaagatcgcgggtctctacaatgacttggagccaccccggaagaccatgcgcagaggggtgctgatgaccctgctgcagcagtcggccatgaccctgcccctgtggattgggaagcctggtgacaagcccccacccctctgtggggccatccctgcctcaggagactacgtggccagacctggagacaaggtggctgcccgggtgaaggccgtggatggggatgagcagtggatcctggccgaggtggtcagttacagccatgccaccaacaagtgagtgacaccagccccggggctgctctctgcccttcctgtccacctgccccacagccccaggaggactattctatcctgtttgaagacacctcctatgcagacggctactcccctcatctcagtgtggcccagaggtacctggtagcttctaaggagcccaagaaaaagtgacgctgcccggcggactcgacgtcctccaccatcttggggcaggacagcagaggatgtgctgggattaaacagacatcccccctccacacatctcctgggttttacttctccaaacccttctcccctccccagatatggtgacctggggagctgaaggctgggggagaggtgaccatatgtggccccaccgggcattcactctttcagctcagagtttctcttcctttccaatacaggctctacatgaacacaaa

SEQ ID NO: 276477 - DNA, 435 bp, Homo sapiens
gagaccaaacgtttaataattgtcttctattctaaaacttgtctctcagcaacaacagcagcaattacttttgaccactcactatcggaaaacactgctttaggctgtggaaatgcagtagtagaaaagccaggcataatccttatccccatggaggcactatctccatccaagggcagaggacctgcaagccctgaggtctccagctgaggttcctctctgaaggacagttgcacttcaggtcatgctgcagtatgagagaaggcagcgtgacatcttaagtttctaatgctcacacctgtctcagtgaagcatttttacagagtaatcaccacccccctcacacccccaacaatgtcatcaagtcataaatctccttggtttgaaatattggattaaaatatgattaaacaatatgtctcaatggaaagttaa

SEQ ID NO: 276478 - DNA, 431 bp, Homo sapiens
taacaaactggctttaggatcacgtgcagtggactttttatttaagaaaatagaagtgaaaattttactatgaacatttcctaagcaaagatttttcttttaaacaagtatcacaaatatttgtgggattagaaaataatcccccccacacacacacaaacacacacatagcaaacttatataattggaaaagtatatttatctcttcctaatacttcaatgctagaaaaatattttactttaacatttatttaaaagcaatactatattctgttaaagtggtaaactgataatttcaataattgcttcaaataaaattttaaaaatgttttaattgtgataaaatacacgtgacataaatttaccatcttaacgatttttaagtgtacagttcaccagggttaagtgtattcactttgttttacaaccaa

SEQ ID NO: 276479 - DNA, 188 bp, Homo sapiens
aataatacatggtttatctgtctcacaaatttattattgggatcaaaactttacatacacaaaagcattttccaaactctaacagagcccagggaaggagagagagctcaagctaggaaatgtaatatagatgctcaatagcagtctttatatactgtgacagtcttcattaaaagcaatatataata

SEQ ID NO: 276480 - DNA, 182 bp, Homo sapiens
  misc_feature (175)..(175): n is a, c, g, or t
gaaattttaacagcaacaaagaaagtaaaacatggaatagcattttccccctgaaggtgcagggaaaaaagtaactgaacaattaaaatcctctatctactaaatatcttaaaaaagagggaagataagtgtttttcatttgtttacttccaacagagtgaggcttaaataattnttttttt

SEQ ID NO: 276481 - DNA, 297 bp, Homo sapiens
agattatgtgcttttccgtgctgcagaccggaagactgatttgatttcctgaatgaggaaggctccttgcccttccctgaattgaggggatggctttgctcagccaagggagaagacgggcaaagaggacatccggaggacagaggaaggtggaagtggaactgaagaagcagcatgctgcttgctgacagggaaggcacacaggcttggcatcaggcgagcaaggcagaagccctggttcagatattataacagaaccaaggccaagttactgtgcctcttagagtctcagtttcc

SEQ ID NO: 276482 - DNA, 456 bp, Homo sapiens
taatgtatttggaaccttgggctgtatcttcacgtacatactgggttggaagaaggagccaccaagtggcaatgactgcacttggtgacgagagaactcagcaactagtcacaatctaggtcattaaaatgtcctttaaatgtctccgtttaatccatttttccgttttcaaacctgtttacatgtcgaattttcttgtctcttttatgtaggatttgtaattcaggtaaatctgagtttttcttatttcttttctccttcatacaatgatatttttataaatgtggattacgacaaggcttaaggcagcttattagatattgtgtgtaaaggaggatctgctttttccatcgattccattgaattctcacactatcatccataaaattcttccattttttacatattataaccatatttaaaaagttatttctatggataatactttcaaaaaat

SEQ ID NO: 276483 - DNA, 1933 bp, Homo sapiens
  misc_feature (1)..(1): n is a, c, g, or t
  misc_feature (4)..(4): n is a, c, g, or t
  misc_feature (6)..(6): n is a, c, g, or t
  misc_feature (8)..(8): n is a, c, g, or t
nccntncnagccctaataaaactctgagactattttctatcacaatgacagctgatgaatttaatgtgcctcacaaactataggaattgtgataggaagttgactctgtcctagaggccactgacaaacctgataaggctgtagcaggggtcagtctctataggaaacttgggctatatgagcatgtatgagttctgtggttaagaatctgaagcactcagtatagcaaacaaaattccaaagctgagtaccaatgtaatacgctggatcgctgtacctacttggacaagagtacatgcaacaggcacatacaatatacatctggttaaatgtaaaatcatccattgctaaagcattttaaacttctaggagaaatctactggcaatgtgttaacagcaaggacaaccaaaacaataaaataacatctctttcctaaaatttaagaacatcaagtaagtgccccttaggctgggttgtgattcctggaagtttcagcctatgagaaccatattggcgacatcaaagactccccctctttccaaaaagcaattcacttcagatgctgccacacaatcgaatgcttttatggccaccatgtttttttggtttttgtttcgtcttttgttttttccatgcttaatgaacatgccagattcttgaaatagaaagaagatgagaaaacccagtaagatggaatacctctagaaaagaaactaggcagggacctgatggtaaaggataaaaacacattccaacaggaattctacttttagggagagtatgagttattaagaaggatgtggaaggcacattttggctatgaaagctggtccgtggactcctctgccagtctcacatcagacaggatgcaaccatccccactccattccttcgacaacttcccagagcacattcaatcagtgtcccttaaattgaggacaatactatatttgggtttaatactgtgaggacagtcatttagttttcctgtggcaggatgataaatttcctgggaaccaaataaggattctcattgcattcttctgcttgatactatgaatgcagaagaataaagaagagggtgtgacaaatcatattttccaaaggtcgggtgtggggaggttccctaacatttaaaagcaaccagttgttagcaaagtgatctttagaacagtattagcaagaatgtttgctctacatccactatagatattctctcctgcttagctaggcatgtaagtactgtgagcataatgtaaatactcagaacagaaatgcatggaaagctggtggagtgaaactccaaatgaacaattaattccactttcacttcccccatctacctccctgaatactacctccctgcccccactcacctatcttcctccccccaacaagcatgtttgctaggcatgtcaaggctgacatccatcggtggcagtatgaaacctatgcctacaggctgctcctgagcatagcctcaaggctctgccattgtccgtagagtgctctaagttgtgcccgctaaaaatcttcatcattccatttgactgtttggtagtatttctttaattgtattttttgtttgtttgttttaaaaacaccctttatttcctgcttgccttagagacaccaagaataaaatccttgacacatcaaattctggaacctcaccactcaccaggactatggttcctgatccaaggagtgacgactgagaatcagcacacagtctcttgagggtgtccaggcctggctgttaagctccctgctctgattagtttgtcgagttcacagtgttccagagtgctgaagcacagaaattagggaggggaggtggaaggaaaatcactggagcctcttacgatctaacttccactaactgggaggaaatgtcttataaataaacaacagtaagagaaacaaaaaaaa

SEQ ID NO: 276484 - DNA, 5440 bp, Homo sapiens
  misc_feature (191)..(191): n is a, c, g, or t
aggagagggagtggggaggccgaaccggagagaagcaggaagtagcggcggccgcggggagggcggcggtggctgcagcggctggagcggggtagagaccgccgggtctcggcccgcaccaggagcggaacaacctttcagatctgtgtggaccccagaagatccgtgaagaatatgaattgattccatgnggacatgaatgagtccttaaacctagaacatcatgtacatcatcctccttaataatagtattgattatttggttctatgctggggaccggaggggatgagatggtttccaccagaatgctcactgagctctattacccttccctgttccctgtattttttttttttttctgagacagtcttgctctgtcgcccaggtgggagtgcagtggcacgatctcagctcactgcaaactccacctcccaggttcaagcaattcttctgcctcagcctcccgagtagctgggactacaggtgtgtgctgccatgcccagctaatttttgtatttttagtagagacggggtttcactatcttggccaggatggtcttgatctcctgacctcgtgatccgcccgcctctgcctccccaagtgctgggattacaggcgtgagccaccatgcccagccccctatatttcttttttttgagacagggtctcgctctgtccaggctggagtgcagtggcgtgatcttggctcattgaaacctcaacctcatgggttcaggcgattctcctgcctcagcctcctttgtagctgcgattacaggcatgtgccaccacacctgtctagttttttgtatttttagtagagacaaggtttcaccatgttggccaagctggtctcaaactcctgacctcaagtgatccatctgcctcagcctcccaaaacgctgggattacaagcatgagccaccgcacctggccccttccctgtatttctaagaactctcttttcccctgctttctctggattttggagcccaccaaggtctgggatctgccgatatgggggatatgaagacccctgattttgatgacctccttgctgcctttgacatccctgacattgatgcgaatgaagccatccattctgggccagaagaaaatgaggggcctggaggcccagggaagccagaaccaggtgtaggaagtgaatctgaagacacagcagcagcctctgctggggatggccctggagttccagcccaggcctctgaccatggcctgccaccgccagacatttctgtagtcagtgtcattgtcaagaacactgtgtgtcccgagcagtctgaggccctggctggaggctcagcaggagacggggcccaggctgctggggtaactaaagaagggcctgtggggcctcatcgaatgcagaatggttttgggagccctgaaccttccctcccaggaactccccactctcctgctcctcccagtgggggcacctggaaagaaaaaggcatggaaggcaaaactcccttggacctgtttgctcattttggccctgagccaggggaccactcagatccgctgcctccctctgcaccctctcccactcgggagggggctctgaccccgcctcctttcccctcttcctttgagctggcccaggagaatggcccaggcatgcagccacctgtttcttccccaccattgggggccttgaagcaggagagctgcagcccccatcatccccaggtcctagcccaacaaggctcaggctccagccctaaggccacggacatccctgccagtgcctcgcctcccccagttgctggggtgcccttcttcaagcagtctccagggcaccagagccctcttgcctcccccaaagtgcccgtctgtcagcccttgaaggaagaagatgatgatgaggggccagtggacaagtcttccccaggaagtccccagagtccctctagtggggccgaggctgcagatgaggacagcaatgactcccctgcctccagctcctctaggcctcttaaggtgcggatcaagaccattaaaacatcctgcgggaatatcacaaggactgtaactcaggtcccctcagatcctgatccacctgcccccttggctgagggggccttcttggctgaggctagcctcttgaagctgtcccctgcaacacctacttctgagggtccaaaggtggtgagcgtacagttgggtgatggtacaaggctgaaaggcactgtgctgcctgtggccaccatccagaacgccagtactgccatgctgatggcagccagtgtggctcgcaaggctgtggtgctgcctggggggactgccaccagccctaagatgattgctaagaacgtgctaggcctggtgccccaagccctgcctaaggctgacgggcgggcagggctggggactgggggacagaaggtgaatggtgcctcggtggtgatggtgcaaccttcaaagacagctactgggccaagtacagggggcggcacagtgatatcacggacccagtccagcctggtggaggccttcaacaagatcctcaacagcaagaacctgctccctgcctataggccaaacctgagcccaccagctgaggctgggctggccctgcctcccaccggctaccgctgcctggagtgtggggatgccttctcattggagaagagcctggcacggcactatgaccgtcggagcatgcgcatcgaggtcacctgcaaccactgcgcccgccgcctggtcttcttcaacaagtgcagcctgctcctgcatgcacgtgaacacaaggacaaggggctcgtcatgcagtgctcacatttggtcatgaggcctgtagcccttgaccagatggtggggcagccggacatcacaccgctgctgcctgtagctgtcccacctgtctctggacctctggccttgcctgccttgggcaagggtgagggggccatcacctcctctgccattactacagttgctgctgaggcccctgtcctgccgctctccacagagccgcctgctgccccggccacctctgcttacacatgctttcgctgcctggagtgcaaggaacagtgccgggacaaggctggcatggcagctcacttccagcagctcggcccccctgcccctggggccaccagcaatgtgtgcccaacctgccccatgatgctccccaatcgctgcagcttcagcgcccaccagcgcatgcataagaatcgacccccccatgtctgtcctgagtgtgggggcaacttcctgcaagccaattttcagacccatctccgggaggcctgtctgcacgtctctcgccgtgtaggatacaggtgccccagctgttcagtggtgtttgggggtgtgaactccatcaagtcccacatccagacgtcgcactgcgaggttttccacaagtgccccatctgccccatggccttcaagtctgggccaagtgcccatgcccacctctactcccagcatcccagcttccaaactcagcaggccaagctgatctacaagtgcgccatgtgcgacacagtcttcactcacaaacccctcctctcctcacacttcgaccagcacttgctgccccagcgtgtcagtgtctttaagtgcccgtcttgtcctctgctctttgcccaaaaaaggaccatgctggaacatctcaagaacacccatcagtctgggcgcttggaggagactgctgggaaaggggccgggggtgccctgctgacccccaagactgagcctgaggagctggctgtttctcagggaggggcagcccctgctactgaggagtcgtcttcatcttcagaagaggaggaagtacccagctcccctgagcccccccgtccagccaaacggcctcggcgggaactagggagcaaaggcctcaagggtgggggtggggggcctggaggctggacctgtggcctgtgtcactcctggttccctgagcgtgatgaatacgtggcccacatgaagaaggagcatggcaagtcagtgaaaaagttcccctgtcgcctgtgtgagcgctccttctgctccgcccccagcctgaggcgccatgtcagagttaatcacgagggcatcaagcgagtttacccctgcaggtattgcacagagggaaaacgcaccttcagcagccgcctgatcctagagaaacatgtccaggtccggcacggcttgcagcttggggcccagtcccctggccgggggaccaccttggctcggggttccagtgccagagcccaggggccaggtcggaaacgccgccagtcttctgactcttgcagtgaggagcctgacagcacgacaccgccagccaagtcccccaggggcggacctggatctggaggccatggccctctgcgctaccggagcagcagctccacagaacagagcctcatgatggggttgagggtggaggatggtgcccagcagtgcctcgactgtggcttgtgctttgcctcccctggctccctgagccgacaccgtttcatcagccacaagaagagacggggtgtgggtaaagccagtgccctggggctgggggatggggaggaagaggcccctccatcaaggtctgaccccgatggtggagactcacccctgcctgcttctggaggcccactgacctgtaaggtctgtggcaagagctgcgacagccctctaaacctcaagacccacttccgcacgcatggcatggcgttcatcagggctcggcagggggctgttggggacaactagtctccaaggcctgggactgaccagccccttcctcttggagcctggttttccctactgctgcctgatccctcggctggggagttttcattaacattagtattttgttaattcctgtctctccaacctgaagaagaagagcatttgaggattattctagttatttgcaacctccctttgggtttggccctggagtcctagtagagtggaccctccattcctcctttctgagcccaacactaattaattttatgctcctgctgcagaacccccagtgtgggcctgggggtgggaggatgggacttaggtatgcctgctagacaggttcagggaaggactgatgggggtgtcatggatggacacacctctccacaattccttcaggcatggactggaactttcctcctctaggccgggccctgccctagtgcccacccccgcccccgcccccgcccaaccccaactcactggcactcaagccccctacccctgcagtgcctttcacttctttttttccccagaaatccggggcgggggggtggggggttggtagggatgagtcctgtcaagggggccacaggagaggaggggacaggctctcaggaatcctttattcttgtagtaataataatactaacaaacagttggggaactagggagaaaaccagaccattaaaactgtttgtggtcgaatctccaaaaaaaaaaat

SEQ ID NO: 276485 - DNA, 4632 bp, Homo sapiens
aggagagggagtggggaggccgaaccggagagaagcaggaagtagcggcggccgcggggagggcggcggtggctgcagcggctggagcggggtagagaccgccgggtctcggcccgcaccaggagcggaacaagtctgggatctgccgatatgggggatatgaagacccctgattttgatgacctccttgctgcctttgacatccctgacattgatgcgaatgaagccatccattctgggccagaagaaaatgaggggcctggaggcccagggaagccagaaccaggtgtaggaagtgaatctgaagacacagcagcagcctctgctggggatggccctggagttccagcccaggcctctgaccatggcctgccaccgccagacatttctgtagtcagtgtcattgtcaagaacactgtgtgtcccgagcagtctgaggccctggctggaggctcagcaggagacggggcccaggctgctggggtaactaaagaagggcctgtggggcctcatcgaatgcagaatggttttgggagccctgaaccttccctcccaggaactccccactctcctgctcctcccagtgggggcacctggaaagaaaaaggcatggaaggcaaaactcccttggacctgtttgctcattttggccctgagccaggggaccactcagatccgctgcctccctctgcaccctctcccactcgggagggggctctgaccccgcctcctttcccctcttcctttgagctggcccaggagaatggcccaggcatgcagccacctgtttcttccccaccattgggggccttgaagcaggagagctgcagcccccatcatccccaggtcctagcccaacaaggctcaggctccagccctaaggccacggacatccctgccagtgcctcgcctcccccagttgctggggtgcccttcttcaagcagtctccagggcaccagagccctcttgcctcccccaaagtgcccgtctgtcagcccttgaaggaagaagatgatgatgaggggccagtggacaagtcttccccaggaagtccccagagtccctctagtggggccgaggctgcagatgaggacagcaatgactcccctgcctccagctcctctaggcctcttaaggtgcggatcaagaccattaaaacatcctgcgggaatatcacaaggactgtaactcaggtcccctcagatcctgatccacctgcccccttggctgagggggccttcttggctgaggctagcctcttgaagctgtcccctgcaacacctacttctgagggtccaaaggtggtgagcgtacagttgggtgatggtacaaggctgaaaggcactgtgctgcctgtggccaccatccagaacgccagtactgccatgctgatggcagccagtgtggctcgcaaggctgtggtgctgcctggggggactgccaccagccctaagatgattgctaagaacgtgctaggcctggtgccccaagccctgcctaaggctgacgggcgggcagggctggggactgggggacagaaggtgaatggtgcctcggtggtgatggtgcaaccttcaaagacagctactgggccaagtacagggggcggcacagtgatatcacggacccagtccagcctggtggaggccttcaacaagatcctcaacagcaagaacctgctccctgcctataggccaaacctgagcccaccagctgaggctgggctggccctgcctcccaccggctaccgctgcctggagtgtggggatgccttctcattggagaagagcctggcacggcactatgaccgtcggagcatgcgcatcgaggtcacctgcaaccactgcgcccgccgcctggtcttcttcaacaagtgcagcctgctcctgcatgcacgtgaacacaaggacaaggggctcgtcatgcagtgctcacatttggtcatgaggcctgtagcccttgaccagatggtggggcagccggacatcacaccgctgctgcctgtagctgtcccacctgtctctggacctctggccttgcctgccttgggcaagggtgagggggccatcacctcctctgccattactacagttgctgctgaggcccctgtcctgccgctctccacagagccgcctgctgccccggccacctctgcttacacatgctttcgctgcctggagtgcaaggaacagtgccgggacaaggctggcatggcagctcacttccagcagctcggcccccctgcccctggggccaccagcaatgtgtgcccaacctgccccatgatgctccccaatcgctgcagcttcagcgcccaccagcgcatgcataagaatcgacccccccatgtctgtcctgagtgtgggggcaacttcctgcaagccaattttcagacccatctccgggaggcctgtctgcacgtctctcgccgtgtaggatacaggtgccccagctgttcagtggtgtttgggggtgtgaactccatcaagtcccacatccagacgtcgcactgcgaggttttccacaagtgccccatctgccccatggccttcaagtctgggccaagtgcccatgcccacctctactcccagcatcccagcttccaaactcagcaggccaagctgatctacaagtgcgccatgtgcgacacagtcttcactcacaaacccctcctctcctcacacttcgaccagcacttgctgccccagcgtgtcagtgtctttaagtgcccgtcttgtcctctgctctttgcccaaaaaaggaccatgctggaacatctcaagaacacccatcagtctgggcgcttggaggagactgctgggaaaggggccgggggtgccctgctgacccccaagactgagcctgaggagctggctgtttctcagggaggggcagcccctgctactgaggagtcgtcttcatcttcagaagaggaggaagtacccagctcccctgagcccccccgtccagccaaacggcctcggcgggaactagggagcaaaggcctcaagggtgggggtggggggcctggaggctggacctgtggcctgtgtcactcctggttccctgagcgtgatgaatacgtggcccacatgaagaaggagcatggcaagtcagtgaaaaagttcccctgtcgcctgtgtgagcgctccttctgctccgcccccagcctgaggcgccatgtcagagttaatcacgagggcatcaagcgagtttacccctgcagaagcaagggccctggccttcgggctgtgccgctgctgccatcctgtcctctcccatttcaggtattgcacagagggaaaacgcaccttcagcagccgcctgatcctagagaaacatgtccaggtccggcacggcttgcagcttggggcccagtcccctggccgggggaccaccttggctcggggttccagtgccagagcccaggggccaggtcggaaacgccgccagtcttctgactcttgcagtgaggagcctgacagcacgacaccgccagccaagtcccccaggggcggacctggatctggaggccatggccctctgcgctaccggagcagcagctccacagaacagagcctcatgatggggttgagggtggaggatggtgcccagcagtgcctcgactgtggcttgtgctttgcctcccctggctccctgagccgacaccgtttcatcagccacaagaagagacggggtgtgggtaaagccagtgccctggggctgggggatggggaggaagaggcccctccatcaaggtctgaccccgatggtggagactcacccctgcctgcttctggaggcccactgacctgtaaggtctgtggcaagagctgcgacagccctctaaacctcaagacccacttccgcacgcatggcatggcgttcatcagggctcggcagggggctgttggggacaactagtctccaaggcctgggactgaccagccccttcctcttggagcctggttttccctactgctgcctgatccctcggctggggagttttcattaacattagtattttgttaattcctgtctctccaacctgaagaagaagagcatttgaggattattctagttatttgcaacctccctttgggtttggccctggagtcctagtagagtggaccctccattcctcctttctgagcccaacactaattaattttatgctcctgctgcagaacccccagtgtgggcctgggggtgggaggatgggacttaggtatgcctgctagacaggttcagggaaggactgatgggggtgtcatggatggacacacctctccacaattccttcaggcatggactggaactttcctcctctaggccgggccctgccctagtgcccacccccgcccccgcccccgcccaaccccaactcactggcactcaagccccctacccctgcagtgcctttcacttctttttttccccagaaatccggggcgggggggtggggggttggtagggatgagtcctgtcaagggggccacaggagaggaggggacaggctctcaggaatcctttattcttgtagtaataataatactaacaaacagttggggaactagggagaaaaccagaccattaaaactgtttgtggtcgaatctccaaaaaaaaaaat

SEQ ID NO: 276486 - DNA, 2430 bp, Homo sapiens
gcttccaaactcagcaggccaagctgatctacaagtgcgccatgtgcgacacagtcttcactcacaaacccctcctctcctcacacttcgaccagcacttgcttgccctggggccaccagcaatgtgtgcccaacctgccccatgatgctccccaatcgctgcagcttcagcgcccaccagcgcatgcataagaatcgacccccccatgtctgtcctgagtgtgggggcaacttcctgcaagccaattttcagacccatctccgggaggcctgtctgcacgtctctcgccgtgtaggatacaggtgccccagctgttcagtggtgtttgggggtgtgaactccatcaagtcccacatccagacgtcgcactgcgaggttttccacaagtgccccatctgccccatggccttcaagtctgggccaagtgcccatgcccacctctactcccagcatcccagcttccaaactcagcaggccaagctgatctacaagtgcgccatgtgcgacacagtcttcactcacaaacccctcctctcctcacacttcgaccagcacttgctgccccagcgtgtcagtgtctttaagtgcccgtcttgtcctctgctctttgcccaaaaaaggaccatgctggaacatctcaagaacacccatcagtctgggcgcttggaggagactgctgggaaaggggccgggggtgccctgctgacccccaagactgagcctgaggagctggctgtttctcagggaggggcagcccctgctactgaggagtcgtcttcatcttcagaagaggaggaagtacccagctcccctgagcccccccgtccagccaaacggcctcggcgggaactagggagcaaaggcctcaagggtgggggtggggggcctggaggctggacctgtggcctgtgtcactcctggttccctgagcgtgatgaatacgtggcccacatgaagaaggagcatggcaagtcagtgaaaaagttcccctgtcgcctgtgtgagcgctccttctgctccgcccccagcctgaggcgccatgtcagagttaatcacgagggcatcaagcgagtttacccctgcaggtattgcacagagggaaaacgcaccttcagcagccgcctgatcctagagaaacatgtccaggtccggcacggcttgcagcttggggcccagtcccctggccgggggaccaccttggctcggggttccagtgccagagcccaggggccaggtcggaaacgccgccagtcttctgactcttgcagtgaggagcctgacagcacgacaccgccagccaagtcccccaggggcggacctggatctggaggccatggccctctgcgctaccggagcagcagctccacagaacagagcctcatgatggggttgagggtggaggatggtgcccagcagtgcctcgactgtggcttgtgctttgcctcccctggctccctgagccgacaccgtttcatcagccacaagaagagacggggtgtgggtaaagccagtgccctggggctgggggatggggaggaagaggcccctccatcaaggtctgaccccgatggtggagactcacccctgcctgcttctggaggcccactgacctgtaaggtctgtggcaagagctgcgacagccctctaaacctcaagacccacttccgcacgcatggcatggcgttcatcagggctcggcagggggctgttggggacaactagtctccaaggcctgggactgaccagccccttcctcttggagcctggttttccctactgctgcctgatccctcggctggggagttttcattaacattagtattttgttaattcctgtctctccaacctgaagaagaagagcatttgaggattattctagttatttgcaacctccctttgggtttggccctggagtcctagtagagtggaccctccattcctcctttctgagcccaacactaattaattttatgctcctgctgcagaacccccagtgtgggcctgggggtgggaggatgggacttaggtatgcctgctagacaggttcagggaaggactgatgggggtgtcatggatggacacacctctccacaattccttcaggcatggactggaactttcctcctctaggccgggccctgccctagtgcccacccccgcccccgcccccgcccaaccccaactcactggcactcaagccccctacccctgcagtgcctttcacttctttttttccccagaaatccggggcgggggggtggggggttggtagggatgagtcctgtcaagggggccacaggagaggaggggacaggctctcaggaatcctttattcttgtagtaataataatactaacaaacagttggggaactagggagaaaaccagaccattaaaactgtttgtggtcgaatctccaaaaaaaaaaat

SEQ ID NO: 276487 - DNA, 1179 bp, Homo sapiens
aggagagggagtggggaggccgaaccggagagaagcaggaagtagcggcggccgcggggagggcggcggtggctgcagcggctggagcggggtagagaccgccgggtctcggcccgcaccaggagcggaacaagtctgggatctgccgatatgggggatatgaagacccctgattttgatgacctccttgctgcctttgacatccctgacattgatgcgaatgaagccatccattctgggccagaagaaaatgaggggcctggaggcccagggaagccagaaccaggtgtaggaagtgaatctgaagacacagcagcagcctctgctggggatggccctggagttccagcccaggcctctgaccatggcctgccaccgccagacatttctgtagtcagtgtcattgtcaagaacactgtgtgtcccgagcagtctgaggccctggctggaggctcagcaggagacggggcccaggctgctggggtaactaaagaagggcctgtggggcctcatcgaatgcagaatggttttgggagccctgaaccttccctcccaggaactccccactctcctgctcctcccagtgggggcacctggaaagaaaaaggcatggaaggcaaaactcccttggacctgtttgctcattttggccctgagccaggggaccactcagatccgctgcctccctctgcaccctctcccactcgggagggggctctgaccccgcctcctttcccctcttcctttgagctggcccaggagaatggcccaggcatgcagccacctgtttcttccccaccattgggggccttgaagcaggagagctgcagcccccatcatccccaggtcctagcccaacaaggctcaggctccagccctaaggccacggacatccctgccagtgcctcgcctcccccagttgctggggtgcccttcttcaagcagtctccagggcaccagagccctcttgcctcccccaaagtgcccgtctgtcagcccttgaaggaagaagatgatgatgaggggccagtggacaagtcttccccaggaagtccccagagtccctctagtggggccgaggctgcagatgaggacagcaatgactcccctgcctccagctcctctaggcctcttaaggtgcggatcaagaccattaaaacatcctgcgggaatatcaca

SEQ ID NO: 276488 - DNA, 1417 bp, Homo sapiens
aggagagggagtggggaggccgaaccggagagaagcaggaagtagcggcggccgcggggagggcggcggtggctgcagcggctggagcggggtagagaccgccgggtctcggcccgcaccaggagcggaacaagtctgggatctgccgatatgggggatatgaagacccctgattttgatgacctccttgctgcctttgacatccctgacattgatgcgaatgaagccatccattctgggccagaagaaaatgaggggcctggaggcccagggaagccagaaccaggtgtaggaagtgaatctgaagacacagcagcagcctctgctggggatggccctggagttccagcccaggcctctgaccatggcctgccaccgccagacatttctgtagtcagtgtcattgtcaagaacactgtgtgtcccgagcagtctgaggccctggctggaggctcagcaggagacggggcccaggctgctggggtaactaaagaagggcctgtggggcctcatcgaatgcagaatggttttgggagccctgaaccttccctcccaggaactccccactctcctgctcctcccagtgggggcacctggaaagaaaaaggcatggaaggcaaaactcccttggacctgtttgctcattttggccctgagccaggggaccactcagatccgctgcctccctctgcaccctctcccactcgggagggggctctgaccccgcctcctttcccctcttcctttgagctggcccaggagaatggcccaggcatgcagccacctgtttcttccccaccattgggggccttgaagcaggagagctgcagcccccatcatccccaggtcctagcccaacaaggctcaggctccagccctaaggccacggacatccctgccagtgcctcgcctcccccagttgctggggtgcccttcttcaagcagtctccagggcaccagagccctcttgcctcccccaaagtgcccgtctgtcagcccttgaaggaagaagatgatgatgaggggccagtggacaagtcttccccaggaagtccccagagtccctctagtggggccgaggctgcagatgaggacagcaatgactcccctgcctccagctcctctaggcctcttaaggtgcggatcaagaccattaaaacatcctgcgggaatatcacaaggactgtaactcaggtcccctcagatcctgatccacctgcccccttggctgagggggccttcttggctgaggctagcctcttgaagctgtcccctgcaacacctacttctgagggtccaaaggtggtgagccttgttgggctaggacctggggatgatgggggctgcagctctcctgcttcaaggcccccaatggtggggaagaaacaggtggctgcatgcctgggccattctcctg

SEQ ID NO: 276489 - DNA, 401 bp, Homo sapiens
ccccccatgtctgtcctgagtgtgggggcaacttcctgcaagccaattttcagacccatctccgggaggcctgtctgcacgtctctcgccgtgtaggatacaggtgcctcggacccttcctccatagaactgtagggtttcgtgtgtcctagcctcagcctcagatggcctttcaagatcccctatcttccctgctatatccctcagccctgttgttttgccagactcaaccctgagatagtacgtcctgccttcccgtcgtcccccatggagatggggggaagcagggccacctctggagctccagctctcccttggcagcctcccttggggcacagcctctgcacctctctcctttctccaccctgctcatgctccactactgatttccttcttgtagt

SEQ ID NO: 276490 - DNA, 770 bp, Homo sapiens
atggctccaggcccacctggcgaactgactctcagcccgcgcctgggctaagcctggctaggagccgcgcaggtactcgagcagtgggcgcccagggtccgagtgctctgcgcccagcgcaccgagggagccaaggccgtcgggccggcgctttcagctgtctctcgcagcagctcagggccgcgccccctgggctggcgtcgtgccctagccaaggagaaggtgggcaccggaacgtggccgcagcgcttatctgtgaatttcagtcacgtgccagactttttcttaattacaaactgatagatggtccacatctcaactaacagtattgacgctgtaagagcatcagatttgaaacatatctgtattaatgaagagtgactgcatgcaaacgacaatatgtcaggaaagaaaaaaagatcccatagaaatgtttcattctggacagctggtaaaagtctgtgccccaatggttcgatattcaaagttggcttttaggacactagtaagaaaatatagttgtgatctgtgttacacaccaatgattgttgccgctgattttgtcaaatctataaaagccagagacagcgaatttaccacaaatcaaggtgattgcccattgattgttcagtttgctgctaacgatgcaagacttttatctgatgctgctcgtatagtctgtccttatgcgaatggaatagacattaactgtggttgccctcagaggtaaagctcaaagaagttggaagaattttccaaaagagtagaaa

SEQ ID NO: 276491 - DNA, 2250 bp, Homo sapiens
atggctccaggcccacctggcgaactgactctcagcccgcgcctgggctaagcctggctaggagccgcgcaggtactcgagcagtgggcgcccagggtccgagtgctctgcgcccagcgcaccgagggagccaaggccgtcgggccggcgctttcagctgtctctcgcagcagctcagggccgcgccccctgggctggcgtcgtgccctagccaaggagaagtttcagtcacgtgccagactttttcttaattacaaactgatagatggtccacatctcaactaacagtattgacgctgtaagagcatcagatttgaaacatatctgtattaatgaagagtgactgcatgcaaacgacaatatgtcaggaaagaaaaaaagatcccatagaaatgtttcattctggacagctggtaaaagtctgtgccccaatggttcgatattcaaagttggcttttaggacactagtaagaaaatatagttgtgatctgtgttacacaccaatgattgttgccgctgattttgtcaaatctataaaagccagagacagcgaatttaccacaaatcaaggtgattgcccattgattgttcagtttgctgctaacgatgcaagacttttatctgatgctgctcgtatagtctgtccttatgcgaatggaatagacattaactgtggttgccctcagaggtgggcaatggcagaaggttatggggcttgcttaataaacaagccagagcttgttcaagacatggtgaaacaagtaagaaatcaagtggaaacccctggattttcagtttctattaaaataaggatccatgatgaccttaaaagaactgtagatctttgtcaaaaggctgaagcaacaggagtttcatggattacagtccatggaagaactgctgaagaaagacatcagccagtgcactatgattccattaaaataattaaggaaaatatgtctatacctgtaattgctaatggagacatcagaagcttaaaggaagcagaaaatgtgtggcggattactgggacagatggtgtgatggttgcaagaggactcttagcaaacccggccatgtttgctggatatgaggaaaccccactgaaatgcatctgggactgggttgacattgctcttgaactcgggactccttacatgtgtttccatcaacatttaatgtacatgatggaaaagataacttcaaggcaggaaaaaagggtatttaatgctctgtcaagcacatcagcaatcatagattaccttacagaccattatggcatttgactagacttcccaaataattttaatatatacttttagacccacagtgaaaccacagaaggtcatattttgtaccttaaaccagtagctctcaaattttagtataaaaacaattcctgggagcgttttttaaaaatcagttgtagacaccaccctcagagattctgattaggtagatctggagtagacccagaaatacacagtttaaagaaaactcccagtggttcaaacatcctgatcatcctaggcaaacattgacaaatactgctctgaatcctgttctatagatattggggggatgggtagagtgggaattttttcctaatcatgtttttaacattttaaaataaaatttaatactaagaaattatggcttatagtatctataaattaacaagaagtatgcaggtgcaaaaaagtggtggaacaaataccaacatccatccaaaatgaaaaagaacaggaaattctgaatagaattgcactcagaacttatattaaaaattccatttggttaatgacattaaatttggtacatttcaaaacttctaggtcctccaaagattgaaagcttaataatctcctacctaaaaagataaaattaattgcaatctaccatatcttaagtataggaaatttggtgtccaacctggagatgattatatatttgaaatatttcctagagaatagtaaccaggttttgtttttaactttaaaacctaattacttttgtgcctctcagccgttgattgtaactttaaagtcccatggttttggagtgttattaatagattttgttatcggtgggcatgcactgcaagaattaagtatctcagactgaaataaaaccgtcataattaaagtattattttgttttgccaacatgaaaactgttataaggaaacaattatgtaaaactgtttaattcacgtttgggaatattgaatgaatccattttaacataaaa

SEQ ID NO: 276492 - DNA, 2510 bp, Homo sapiens
atggctccaggcccacctggcgaactgactctcagcccgcgcctgggctaagcctggctaggagccgcgcaggtactcgagcagtgggcgcccagggtccgagtgctctgcgcccagcgcaccgagggagccaaggccgtcgggccggcgctttcagctgtctctcgcagcagctcagggccgcgccccctgggctggcgtcgtgccctagccaaggagaaggtgggcaccggaacgtggccgcagcgcttatctgtgaagcaagtattaaacctcagaacaggggccgcgcggcgtaaggcaggagagcagagcggaggtttcagggagcttcgtttgccctccacactcacaagagtcacgcgttagttgctacacagctttatctgttccacgccttgattggcactcctggggtaataaaagcccgcaggaaatgcttgggaagaaaagttgctggggatgaacagtgaagagaattagggagagtcgatgaagaaggaagtctgaaccataaaaggaccaataaaactcactgtctctaccctccttccttcccatgagacctttgaccttttgccttttctacttcttcctcagtttcagtcacgtgccagactttttcttaattacaaactgatagatggtccacatctcaactaacagtattgacgctgtaagagcatcagatttgaaacatatctgtattaatgaagagtgactgcatgcaaacgacaatatgtcaggaaagaaaaaaagatcccatagaaatgtttcattctggacagctggtaaaagtctgtgccccaatggttcgatattcaaagttggcttttaggacactagtaagaaaatatagttgtgatctgtgttacacaccaatgattgttgccgctgattttgtcaaatctataaaagccagagacagcgaatttaccacaaatcaaggtgggcaatggcagaaggttatggggcttgcttaataaacaagccagagcttgttcaagacatggtgaaacaagtaagaaatcaagtggaaacccctggattttcagtttctattaaaataaggatccatgatgaccttaaaagaactgtagatctttgtcaaaaggctgaagcaacaggagtttcatggattacagtccatggaagaactgctgaagaaagacatcagccagtgcactatgattccattaaaataattaaggaaaatatgtctatacctgtaattgctaatggagacatcagaagcttaaaggaagcagaaaatgtgtggcggattactgggacagatggtgtgatggttgcaagaggactcttagcaaacccggccatgtttgctggatatgaggaaaccccactgaaatgcatctgggactgggttgacattgctcttgaactcgggactccttacatgtgtttccatcaacatttaatgtacatgatggaaaagataacttcaaggcaggaaaaaagggtatttaatgctctgtcaagcacatcagcaatcatagattaccttacagaccattatggcatttgactagacttcccaaataattttaatatatacttttagacccacagtgaaaccacagaaggtcatattttgtaccttaaaccagtagctctcaaattttagtataaaaacaattcctgggagcgttttttaaaaatcagttgtagacaccaccctcagagattctgattaggtagatctggagtagacccagaaatacacagtttaaagaaaactcccagtggttcaaacatcctgatcatcctaggcaaacattgacaaatactgctctgaatcctgttctatagatattggggggatgggtagagtgggaattttttcctaatcatgtttttaacattttaaaataaaatttaatactaagaaattatggcttatagtatctataaattaacaagaagtatgcaggtgcaaaaaagtggtggaacaaataccaacatccatccaaaatgaaaaagaacaggaaattctgaatagaattgcactcagaacttatattaaaaattccatttggttaatgacattaaatttggtacatttcaaaacttctaggtcctccaaagattgaaagcttaataatctcctacctaaaaagataaaattaattgcaatctaccatatcttaagtataggaaatttggtgtccaacctggagatgattatatatttgaaatatttcctagagaatagtaaccaggttttgtttttaactttaaaacctaattacttttgtgcctctcagccgttgattgtaactttaaagtcccatggttttggagtgttattaatagattttgttatcggtgggcatgcactgcaagaattaagtatctcagactgaaataaaaccgtcataattaaagtattattttgttttgccaacatgaaaactgttataaggaaacaattatgtaaaactgtttaattcacgtttgggaatattgaatgaatccattttaacataaaa

SEQ ID NO: 276493 - DNA, 2132 bp, Homo sapiens
atggctccaggcccacctggcgaactgactctcagcccgcgcctgggctaagcctggctaggagccgcgcaggtactcgagcagtgggcgcccagggtccgagtgctctgcgcccagcgcaccgagggagccaaggccgtcgggccggcgctttcagctgtctctcgcagcagctcagggccgcgccccctgggctggcgtcgtgccctagccaaggagaagtttcagtcacgtgccagactttttcttaattacaaactgatagatggtccacatctcaactaacagtattgacgctgtaagagcatcagatttgaaacatatctgtattaatgaagagtgactgcatgcaaacgacaatatgtcaggaaagaaaaaaagatcccatagaaatgtttcattctggacagctggtaaaagtctgtgccccaatggttcgatattcaaagttggcttttaggacactagtaagaaaatatagttgtgatctgtgttacacaccaatgattgttgccgctgattttgtcaaatctataaaagccagagacagcgaatttaccacaaatcaaggtgggcaatggcagaaggttatggggcttgcttaataaacaagccagagcttgttcaagacatggtgaaacaagtaagaaatcaagtggaaacccctggattttcagtttctattaaaataaggatccatgatgaccttaaaagaactgtagatctttgtcaaaaggctgaagcaacaggagtttcatggattacagtccatggaagaactgctgaagaaagacatcagccagtgcactatgattccattaaaataattaaggaaaatatgtctatacctgtaattgctaatggagacatcagaagcttaaaggaagcagaaaatgtgtggcggattactgggacagatggtgtgatggttgcaagaggactcttagcaaacccggccatgtttgctggatatgaggaaaccccactgaaatgcatctgggactgggttgacattgctcttgaactcgggactccttacatgtgtttccatcaacatttaatgtacatgatggaaaagataacttcaaggcaggaaaaaagggtatttaatgctctgtcaagcacatcagcaatcatagattaccttacagaccattatggcatttgactagacttcccaaataattttaatatatacttttagacccacagtgaaaccacagaaggtcatattttgtaccttaaaccagtagctctcaaattttagtataaaaacaattcctgggagcgttttttaaaaatcagttgtagacaccaccctcagagattctgattaggtagatctggagtagacccagaaatacacagtttaaagaaaactcccagtggttcaaacatcctgatcatcctaggcaaacattgacaaatactgctctgaatcctgttctatagatattggggggatgggtagagtgggaattttttcctaatcatgtttttaacattttaaaataaaatttaatactaagaaattatggcttatagtatctataaattaacaagaagtatgcaggtgcaaaaaagtggtggaacaaataccaacatccatccaaaatgaaaaagaacaggaaattctgaatagaattgcactcagaacttatattaaaaattccatttggttaatgacattaaatttggtacatttcaaaacttctaggtcctccaaagattgaaagcttaataatctcctacctaaaaagataaaattaattgcaatctaccatatcttaagtataggaaatttggtgtccaacctggagatgattatatatttgaaatatttcctagagaatagtaaccaggttttgtttttaactttaaaacctaattacttttgtgcctctcagccgttgattgtaactttaaagtcccatggttttggagtgttattaatagattttgttatcggtgggcatgcactgcaagaattaagtatctcagactgaaataaaaccgtcataattaaagtattattttgttttgccaacatgaaaactgttataaggaaacaattatgtaaaactgtttaattcacgtttgggaatattgaatgaatccattttaacataaaa

SEQ ID NO: 276494 - DNA, 1982 bp, Homo sapiens
atggctccaggcccacctggcgaactgactctcagcccgcgcctgggctaagcctggctaggagccgcgcagtttcagtcacgtgccagactttttcttaattacaaactgatagatggtccacatctcaactaacagtattgacgctgtaagagcatcagatttgaaacatatctgtattaatgaagagtgactgcatgcaaacgacaatatgtcaggaaagaaaaaaagatcccatagaaatgtttcattctggacagctggtaaaagtctgtgccccaatggttcgatattcaaagttggcttttaggacactagtaagaaaatatagttgtgatctgtgttacacaccaatgattgttgccgctgattttgtcaaatctataaaagccagagacagcgaatttaccacaaatcaaggtgggcaatggcagaaggttatggggcttgcttaataaacaagccagagcttgttcaagacatggtgaaacaagtaagaaatcaagtggaaacccctggattttcagtttctattaaaataaggatccatgatgaccttaaaagaactgtagatctttgtcaaaaggctgaagcaacaggagtttcatggattacagtccatggaagaactgctgaagaaagacatcagccagtgcactatgattccattaaaataattaaggaaaatatgtctatacctgtaattgctaatggagacatcagaagcttaaaggaagcagaaaatgtgtggcggattactgggacagatggtgtgatggttgcaagaggactcttagcaaacccggccatgtttgctggatatgaggaaaccccactgaaatgcatctgggactgggttgacattgctcttgaactcgggactccttacatgtgtttccatcaacatttaatgtacatgatggaaaagataacttcaaggcaggaaaaaagggtatttaatgctctgtcaagcacatcagcaatcatagattaccttacagaccattatggcatttgactagacttcccaaataattttaatatatacttttagacccacagtgaaaccacagaaggtcatattttgtaccttaaaccagtagctctcaaattttagtataaaaacaattcctgggagcgttttttaaaaatcagttgtagacaccaccctcagagattctgattaggtagatctggagtagacccagaaatacacagtttaaagaaaactcccagtggttcaaacatcctgatcatcctaggcaaacattgacaaatactgctctgaatcctgttctatagatattggggggatgggtagagtgggaattttttcctaatcatgtttttaacattttaaaataaaatttaatactaagaaattatggcttatagtatctataaattaacaagaagtatgcaggtgcaaaaaagtggtggaacaaataccaacatccatccaaaatgaaaaagaacaggaaattctgaatagaattgcactcagaacttatattaaaaattccatttggttaatgacattaaatttggtacatttcaaaacttctaggtcctccaaagattgaaagcttaataatctcctacctaaaaagataaaattaattgcaatctaccatatcttaagtataggaaatttggtgtccaacctggagatgattatatatttgaaatatttcctagagaatagtaaccaggttttgtttttaactttaaaacctaattacttttgtgcctctcagccgttgattgtaactttaaagtcccatggttttggagtgttattaatagattttgttatcggtgggcatgcactgcaagaattaagtatctcagactgaaataaaaccgtcataattaaagtattattttgttttgccaacatgaaaactgttataaggaaacaattatgtaaaactgtttaattcacgtttgggaatattgaatgaatccattttaacataaaa

SEQ ID NO: 276495 - DNA, 2170 bp, Homo sapiens
atggctccaggcccacctggcgaactgactctcagcccgcgcctgggctaagcctggctaggagccgcgcaggtactcgagcagtgggcgcccagggtccgagtgctctgcgcccagcgcaccgagggagccaaggccgtcgggccggcgctttcagctgtctctcgcagcagctcagggccgcgccccctgggctggcgtcgtgccctagccaaggagaaggtgggcaccggaacgtggccgcagcgcttatctgtgaatttcagtcacgtgccagactttttcttaattacaaactgatagatggtccacatctcaactaacagtattgacgctgtaagagcatcagatttgaaacatatctgtattaatgaagagtgactgcatgcaaacgacaatatgtcaggaaagaaaaaaagatcccatagaaatgtttcattctggacagctggtaaaagtctgtgccccaatggttcgatattcaaagttggcttttaggacactagtaagaaaatatagttgtgatctgtgttacacaccaatgattgttgccgctgattttgtcaaatctataaaagccagagacagcgaatttaccacaaatcaaggtgggcaatggcagaaggttatggggcttgcttaataaacaagccagagcttgttcaagacatggtgaaacaagtaagaaatcaagtggaaacccctggattttcagtttctattaaaataaggatccatgatgaccttaaaagaactgtagatctttgtcaaaaggctgaagcaacaggagtttcatggattacagtccatggaagaactgctgaagaaagacatcagccagtgcactatgattccattaaaataattaaggaaaatatgtctatacctgtaattgctaatggagacatcagaagcttaaaggaagcagaaaatgtgtggcggattactgggacagatggtgtgatggttgcaagaggactcttagcaaacccggccatgtttgctggatatgaggaaaccccactgaaatgcatctgggactgggttgacattgctcttgaactcgggactccttacatgtgtttccatcaacatttaatgtacatgatggaaaagataacttcaaggcaggaaaaaagggtatttaatgctctgtcaagcacatcagcaatcatagattaccttacagaccattatggcatttgactagacttcccaaataattttaatatatacttttagacccacagtgaaaccacagaaggtcatattttgtaccttaaaccagtagctctcaaattttagtataaaaacaattcctgggagcgttttttaaaaatcagttgtagacaccaccctcagagattctgattaggtagatctggagtagacccagaaatacacagtttaaagaaaactcccagtggttcaaacatcctgatcatcctaggcaaacattgacaaatactgctctgaatcctgttctatagatattggggggatgggtagagtgggaattttttcctaatcatgtttttaacattttaaaataaaatttaatactaagaaattatggcttatagtatctataaattaacaagaagtatgcaggtgcaaaaaagtggtggaacaaataccaacatccatccaaaatgaaaaagaacaggaaattctgaatagaattgcactcagaacttatattaaaaattccatttggttaatgacattaaatttggtacatttcaaaacttctaggtcctccaaagattgaaagcttaataatctcctacctaaaaagataaaattaattgcaatctaccatatcttaagtataggaaatttggtgtccaacctggagatgattatatatttgaaatatttcctagagaatagtaaccaggttttgtttttaactttaaaacctaattacttttgtgcctctcagccgttgattgtaactttaaagtcccatggttttggagtgttattaatagattttgttatcggtgggcatgcactgcaagaattaagtatctcagactgaaataaaaccgtcataattaaagtattattttgttttgccaacatgaaaactgttataaggaaacaattatgtaaaactgtttaattcacgtttgggaatattgaatgaatccattttaacataaaa

SEQ ID NO: 276496 - DNA, 1908 bp, Homo sapiens
atggctccaggcccacctggcgaactgactctcagcccgcgcctgggctaagcctggctaggagccgcgcaggtactcgagcagtgggcgcccagggtccgagtgctctgcgcccagcgcaccgagggagccaaggccgtcgggccggcgctttcagctgtctctcgcagcagctcagggccgcgccccctgggctggcgtcgtgccctagccaaggagaaggtgggcaccggaacgtggccgcagcgcttatctgtgaagcaagtattaaacctcagaacaggggccgcgcggcgtaaggcaggagagcagagcggaggtttcagggagcttcgtttgccctccacactcacaagagtcacgcgttagttgctacacagctttatctgttccacgccttgattggcactcctggggtaataaaagcccgcaggaaatgcttgggaagaaaagttgctggggatgaacagtgaagagaattagggagagtcgatgaagaaggaagtctgaaccataaaaggaccaataaaactcactgtctctaccctccttccttcccatgagacctttgaccttttgccttttctacttcttcctcagtttcagtcacgtgccagactttttcttaattacaaactgatagatggtccacatctcaactaacagtattgacgctgtaagagcatcagatttgaaacatatctgtattaatgaagagtgactgcatgcaaacgacaatatgtcaggaaagaaaaaaagatcccatagaaatgtttcattctggacagctggtaaaagtctgtgccccaatggttcgatattcaaagttggcttttaggacactagtaagaaaatatagttgtgatctgtgttacacaccaatgattgttgccgctgattttgtcaaatctataaaagccagagacagcgaatttaccacaaatcaaggtgggcaatggcagaaggttatggggcttgcttaataaacaagccagagcttgttcaagacatggtgaaacaagtaagaaatcaagtggaaacccctggattttcagtttctattaaaataaggatccatgatgaccttaaaagaactgtagatctttgtcaaaaggctgaagcaacaggagtttcatggattacagtccatggaagaactgctgaagaaagacatcagccagtgcactatgattccattaaaataattaaggaaaatatgtctatacctgtaattgctaatggagacatcagaagcttaaaggaagcagaaaatgtgtggcggattactgggacagatggtgtgatggttgcaagaggactcttagcaaacccggccatgtttgctggatatgaggaaaccccactgaaatgcatctgggactgggttgacattgctcttgaactcgggactccttacatgtgtttccatcaacatttaatgtacatgatggaaaagataacttcaaggcaggaaaaaagggtatttaatgctctgtcaagcacatcagcaatcatagattaccttacagaccattatggcatttgactagacttcccaaataattttaatatatacttttagacccacagtgaaaccacagaaggtcatattttgtaccttaaaccagtagctctcaaattttagtataaaaacaattcctgggagcgttttttaaaaatcagttgtagacaccaccctcagagattctgattaggtagatctggagtagacccagaaatacacagtttaaagaaaactcccagtggttcaaacatcctgatcatcctaggcaaacattgacaaatactgctctgaatcctgttctatagatattggggggatgggtagagtgggaattttttcctaatcatgtttttaacattttaaaataaaatttaatactaaga

SEQ ID NO: 276497 - DNA, 2201 bp, Homo sapiens
atggctccaggcccacctggcgaactgactctcagcccgcgcctgggctaagcctggctaggagccgcgcaggtactcgagcagtgggcgcccagggtccgagtgctctgcgcccagcgcaccgagggagccaaggccgtcgggccggcgctttcagctgtctctcgcagcagctcagggccgcgccccctgggctggcgtcgtgccctagccaaggagaaggtgggcaccggaacgtggccgcagcgcttatctgtgaagcaagtattaaacctcagaacaggggccgcgcggcgtaaggcaggagagcagagcggaggtttcagggagcttcgtttgccctccacactcacaagagtcacgcgttagttgctacacagctttatctgttccacgccttgattggcactcctggggtaataaaagcccgcaggaaatgcttgggaagaaaagttgctggggatgaacagtgaagagaattagggagagtcgatgaagaaggaagtctgaaccataaaaggaccaataaaactcactgtctctaccctccttccttcccatgagacctttgaccttttgccttttctacttcttcctcagtttcagtcacgtgccagactttttcttaattacaaactgatagatggtccacatctcaactaacagtattgacgctgtaagagcatcagatttgaaacatatctgtattaatgaagagtgactgcatgcaaacgacaatatgtcaggaaagaaaaaaagatcccatagaaatgtttcattctggacagctggtaaaagtctgtgccccaatggttcgatattcaaagttggcttttaggacactagtaagaaaatatagttgtgatctgtgttacacaccaatgattgttgccgctgattttgtcaaatctataaaagccagagacagcgaatttaccacaaatcaaggtgggcaatggcagaaggttatggggcttgcttaataaacaagccagagcttgttcaagacatggtgaaacaagtaagaaatcaagtggaaacccctggattttcagtttctattaaaataaggatccatgatgaccttaaaagaactgtagatctttgtcaaaaggctgaagcaacaggagtttcatggattacagtccatggaagaactgctgaagaaagacatcagccagtgcactatgattccattaaaataattaaggaaaatatgtctatacctgtaattgctaatggagacatcagaagcttaaaggaagcagaaaatgtgtggcggattactgggacagatggtgtgatggttgcaagaggactcttagcaaacccggccatgtttgctggatatgaggaaaccccactgaaatgcatctgggactgggttgacattgctcttgaactcgggactccttacatgtgtttccatcaacatttaatgtacatgatggaaaagataacttcaaggcaggaaaaaagggtatttaatgctctgtcaagcacatcagcaatcatagattaccttacagaccattatggcatttgactagacttcccaaataattttaatatatacttttagacccacagtgaaaccacagaaggtcatattttgtaccttaaaccagtagctctcaaattttagtataaaaacaattcctgggagcgttttttaaaaatcagttgtagacaccaccctcagagattctgattaggtagatctggagtagacccagaaatacacagtttaaagaaaactcccagtggttcaaacatcctgatcatcctaggcaaacattgacaaatactgctctgaatcctgttctatagatattggggggatgggtagagtgggaattttttcctaatcatgtttttaacattttaaaataaaatttaatactaagaaattatggcttatagtatctataaattaacaagaagtatgcaggtgcaaaaaagtggtggaacaaataccaacatccatccaaaatgaaaaagaacaggaattgatggaattgctcagaattttttaaatccttggctatgcttaattggatttcaatttagtcttaagatgaggtaaatctactaagaaatatgggtcattagtgagatgggccggggatatgatcaaaagggggttacaattgtcgcggggaacagggaaaagggcgaacaacatgtggatagtgaaaaac

SEQ ID NO: 276498 - DNA, 467 bp, Homo sapiens
  misc_feature (10)..(11): n is a, c, g, or t
atccgaggtnncatttcaccctcaggcagcacggagtgaacaagagatggggtctcactttgtcacccaggctgggctcaaactcttggcttcaagcgatcttctcgccttggtctcccaaagtgctgggattacaggcttgaactactgtactcgactgacttttcctatttctaatgtcagcatgaagaacacaagaagtcagcttcaaaggcatccagcaatatcatctattctccactttgctaaatcttacctttggcagagccttcatgaacaagattggtacccatataaaagaagcccgagagagctatcttgaccctcctaccatgtgaagacacaacaaggtaccgtctatgaaccaggaaatgggccctcaccagacacctaatctgctggtgccttgatcttggacttcccagcttctagaactgtgggaattaaatttctattgtttataagct

SEQ ID NO: 276499 - DNA, 575 bp, Homo sapiens
  misc_feature (10)..(11): n is a, c, g, or t
atccgaggtnncatttcaccctcaggcagcacggagtgaacaagagatggggtctcactttgtcacccaggctgggctcaaactcttggcttcaagcgatcttctcgccttggtctcccaaagtgctgggattacaggcttgaactactgtactcgactgacttttcctatttctaatgtcagcatgaagaacacaagaagtcagcttcaaagagtctagaagagcaaacattcactttgcagcctcccttgtaccaaggagtggccatgagacaattctgcccaatgaatcagaagaggaattgtgttgaggatttctggaaagactacttcttttcccaagaaaaagtgacagatgcagtaggggctgagcaacttccgtgcctcttccagccttacggatgtgctgttggtagctgtgactgccttgctactacgaggaaaaggaaggccaagagaatagcagagacactcgctctgatgcctttgagccaatgaatcaatgccagaagcagctgacctccagagttcttgttacaggattaaaataaatctctacttatttgccattgtca

SEQ ID NO: 276500 - DNA, 384 bp, Homo sapiens
cccattttcaaaagaagtgatgctgtcataacctgctcctagggttccaacaggacttcctgtcattctacaagattccagggataggttcataatgattgcttaggtgtgcaggctgacattataaagctaggggatagtgcagtgtagtggggaacagcaagagttctggagttagacgaaactaggcagactcttactttgctgtttactgcttgtgtgatgtggtcaagtcttgtacctacattgagttcatttggacctacatcaacatgtttgtatttttttaaactagaatttcccaaatgaaaatcatttagtattcttgaaatgacttgaaactggtttctctgacagtagactcttatcatcaaaatctctaag

SEQ ID NO: 276501 - DNA, 1741 bp, Homo sapiens
tacaggcagttgtaaagtcgctggccagctagtggagtggagactgcagagggagataaagagagagggcaaagaggcagcaagagatttgtcctggggatccagaaacccatgataccctactgaacaccgaatcccctggaagcccacagagacagagacagcaagagaagcagagataaatacactcacgccaggagctcgctcgctctctctctctctctctcactcctccctccctctctctctgcctgtcctagtcctctagtcctcaaattcccagtcccctgcaccccttcctgggacactatgttgttctccgccctcctgctggaggtgatttggatcctggctgcagatgggggtcaacactggacgtatgagggcccacatggtcaggaccattggccagcctcttaccctgagtgtggaaacaatgcccagtcgcccatcgatattcagacagacagtgtgacatttgaccctgatttgcctgctctgcagccccacggatatgaccagcctggcaccgagcctttggacctgcacaacaatggccacacagtgcaactctctctgccctctaccctgtatctgggtggacttccccgaaaatatgtagctgcccagctccacctgcactggggtcagaaaggatccccaggggggtcagaacaccagatcaacagtgaagccacatttgcagagctccacattgtacattatgactctgattcctatgacagcttgagtgaggctgctgagaggcctcagggcctggctgtcctgggcatcctaattgaggtgggtgagactaagaatatagcttatgaacacattctgagtcacttgcatgaagtcaggcataaagatcagaagacctcagtgcctcccttcaacctaagagagctgctccccaaacagctggggcagtacttccgctacaatggctcgctcacaactcccccttgctaccagagtgtgctctggacagttttttatagaaggtcccagatttcaatggaacagctggaaaagcttcaggggacattgttctccacagaagaggagccctctaagcttctggtacagaactaccgagcccttcagcctctcaatcagcgcatggtctttgcttctttcatccaagcaggatcctcgtataccacaggtgaaatgctgagtctaggtgtaggaatcttggttggctgtctctgccttctcctggctgtttatttcattgctagaaagattcggaagaagaggctggaaaaccgaaagagtgtggtcttcacctcagcacaagccacgactgaggcataaattccttctcagataccatggatgtggatgacttcccttcatgcctatcaggaagcctctaaaatggggtgtaggatctggccagaaacactgtaggagtagtaagcagatgtcctccttcccctggacatctcctagagaggaatggacccaggctgtcattccaggaagaactgcagagccttcagcctctccaaacatgtaggaggaaatgaggaaatcgctgtgttgttaatgcagagaacaaactctgtttagttgcaggggaagtttgggatataccccaaagtcctctaccccctcacttttatggccctttccctagatatactgcgggatctctccttaggataaagagttgctgttgaagttgtatatttttgatcaatatatttggaaattaaagtttctgacttta

SEQ ID NO: 276502 - DNA, 2071 bp, Homo sapiens
tacaggcagttgtaaagtcgctggccagctagtggagtggagactgcagagggagataaagagagagggcaaagaggcagcaagagatttgtcctggggatccagaaacccatgataccctactgaacaccgaatcccctggaagcccacagagacagagacagcaagagaagcagagataaatacactcacgccaggagctcgctcgctctctctctctctctctcactcctccctccctctctctctgcctgtcctagtcctctagtcctcaaattcccagtcccctgcaccccttcctgggacactatgttgttctccgccctcctgctggaggtgatttggatcctggctgcagatgggggtcaacactggacgtatgagggcccacatggtcaggaccattggccagcctcttaccctgagtgtggaaacaatgcccagtcgcccatcgatattcagacagacagtgtgacatttgaccctgatttgcctgctctgcagccccacggatatgaccagcctggcaccgagcctttggacctgcacaacaatggccacacagtgcaactctctctgccctctaccctgtatctgggtggacttccccgaaaatatgtagctgcccagctccacctgcactggggtcagaaaggatccccaggggggtcagaacaccagatcaacagtgaagccacatttgcagagctccacattgtacattatgactctgattcctatgacagcttgagtgaggctgctgagaggcctcagggcctggctgtcctgggcatcctaattgaggtgggtgagactaagaatatagcttatgaacacattctgagtcacttgcatgaagtcaggcataaagatcagaagacctcagtgcctcccttcaacctaagagagctgctccccaaacagctggggcagtacttccgctacaatggctcgctcacaactcccccttgctaccagagtgtgctctggacagttttttatagaaggtcccagatttcaatggaacagctggaaaagcttcaggggacattgttctccacagaagaggagccctctaagcttctggtacagaactaccgagcccttcagcctctcaatcagcgcatggtctttgcttctttcatccaagcaggatcctcgtataccacaggtgaaatgctgagtctaggtgtaggaatcttggttggctgtctctgccttctcctggctgtttatttcattgctagaaagattcggaagaagaggctggaaaaccgaaagagtgtggtcttcacctcagcacaagccacgactgaggcataaattccttctcagataccatggatgtggatgacttcccttcatgcctatcaggaagcctctaaaatggggtgtaggatctggccagaaacactgtaggagtagtaagcagatgtcctccttcccctggacatctcctagagaggaatggacccaggctgtcattccaggaagaactgcagagccttcagcctctccaaacatgtaggaggaaatgaggaaatcgctgtgttgttaatgcagagaacaaactctgtttagttgcaggggaagtttgggatataccccaaagtcctctaccccctcacttttatggccctttccctagatatactgcgggatctctccttaggataaagagttgctgttgaagttgtatatttttgatcaatatatttggaaattaaagtttctgactttaattctggcctatcctttgaggctcttgagggtgggcaagttcctgaatccctcaggtggtaaagatgggcaaaggatggggaaaagaagcatgggtgattaactccttttatcccacccctggaaggaaagataagcttctgggaaaacacttaacccaaagtttcagacatgttaaaccactagcccagatttctgcccttgcaccaaggctatgcttggaaatcagtggttgccaggttaggaaagtggctggatgagagatctgaggacagaaatctcaattaacatgctatcccctcccttaaaagccaagttcccccacaattac

SEQ ID NO: 276503 - DNA, 843 bp, Homo sapiens
cacaggtaaaagcacaggctccaaggagttgtaggctccagctcagatcttaggagtcagatccttttgtagttcatgggcatgatgatggggtgttcctgagcatgcgtaagatgtgccgccctcaaatcttgtcaagatgttggcacattacccatctgacataaataaacaaacaaataacctcaggagtcagaggaaagcagcattttcctaacctacgaattctcaaaaacctttgtccatgaatttggagatatgagaatggggatcaggatcctgtagccaaagcgggaatcgaaatgtttataaccaagctcagtaggtaggtatcattgcactgacttggtcttcaccaagaaaaaggaagatatgctagaaaagcactggcctatgggaggaactgggtgctactgggggagaaaactggaagagggccaagtctcccaagaagtggtggcaacccaggagtgggaatgtatccacatgcctccaccaatccgagtttgctcttttcctcacagtgcaactctctctgccctctaccctgtatctgggtggacttccccgaaaatatgtagctgcccagctccacctgcactggggtcagaaaggatccccaggggggtcagaacaccagatcaacagtgaagccacatttgcagaggtaccagggaacaaagagctgggactcagacaaagtaacagggatgggtggtcctggggaaaggatctggaccttaggaaaagtcatgctggggggataaggccaatctctgagggacagacttagtgcctgccggggacagcggggggatggtggcagctaggatcaaggccttg

SEQ ID NO: 276504 - DNA, 585 bp, Homo sapiens
ccaggctggtctccaactcctgacctcaagtgatccgcccgcctcagcctcccaaagtgctgggattataggtgtgaaacaccttgcccagccctcttttctgttaaaaagcattctcctatttcacctctaatctgcttcacttagatagcagtcattctcatgagccattcccctttccaggaagaagaggctggaaaaccgaaagagtgtggtcttcacctcagcacaagccacgactgaggcataaattccttctcagataccatggatgtggatgacttcccttcatgcctatcaggaagcctctaaaatggggtgtaggatctggccagaaacactgtaggagtagtaagcagatgtcctccttcccctggacatctcctagagaggaatggacccaggctgtcattccaggaagaactgcagagccttcagcctctccaaacatgtaggaggaaatgaggaaatcgctgtgttgttaatgcagagaacaaactctgtttagttgcaggggaagtttgggatataccccaaagtcctctaccccctcacttttatggccctttccctagatatactgcg

SEQ ID NO: 276505 - DNA, 729 bp, Homo sapiens
ctccacattgtacattatgactctgattcctatgacagcttgagtgaggctgctgagaggcctcagggcctggctgtcctgggcatcctaattgaggtcagtagcccccagtcccttccaggtttctctccacttcctctgcaaccctcaaacctatttctgttgctggcctccttcctatggcaggcagcagcccaccctgaccatttattctgtacataaatttcttattccaaacatggactcattccaaactctctccctttccttctcttccaggtgggtgagactaagaatatagcttatgaacacattctgagtcacttgcatgaagtcaggcataaaggtgagccttaaaaatctatagcaggaagtaagattagactttcaaaaactatccttaaaagccttgggatgaagcaattacatagagccaaggaattttgcttctgggagccctatctaggtaagctagggcacactgaaaggaagatgagtcccagtctgttctccccagatcagaagacctcagtgcctcccttcaacctaagagagctgctccccaaacagctggggcagtacttccgctacaatggctcgctcacaactcccccttgctaccagagtgtgctctggacagttttttatagaaggtcccagatttcaatggaacaggtaagtggtggagaaacgaggtgaggtgagacacagttgtaacttcagacccct

SEQ ID NO: 276506 - DNA, 324 bp, Homo sapiens
ctccagatacttactgaggcagaggagagtgggtggtgggaaaaaagagtgggttgggggtaaggagggaatcttttttttgacgcttttgctttaaaattcagagttggattggtcaggatttatgggctctttgccatgtaaatttttctcattctccaggttctagcttgccaggttctagcctgccgggttctagctctccatgttctagctctacaggttctagcccttccaggttctagccctccaggttctggctctccaggttctagcccttctaggttctaacctgccaggttctagccctccaggttctagccc

SEQ ID NO: 276507 - DNA, 1580 bp, Homo sapiens
tcgatgtttgaatggaggagccacagctcctccgtattgtcctgccgggaggacaggatcaagtggtggcccgtcaggcacagggtgccctcgacagccgggtagaaaggccggtgcagcaccacattgtccacccgcggggtcttaatcagctccgcaaactccatgctccccccgcggccggagccagggaaccgagcccggtaggtgcgaggcggttaccccgccgcagggaagtagcggaaacacccggcgcggggctggcccgtggggcggggcgggccgggcggtgaggctgggcccgccccaggctgggtgggcgcggcgaggcctacagccgccggcaccggccgcggggagacaggggctggggctggacgaggcccaagcgcctctcccgcaccgcgcggttcaccaggcctaggactcggccacagagaacccctctccacaggcccaaggaccgccgctgccgttgggctccgggtcccgcgttggcaagcggagggcagtaggagaaagccgcctcagaatccgcttccacgccctggccgctagggactcctagcggaagtggctactcgctgctggagcccacaacaactccgggcggaagcagcaggtctcgaaactcggaagacgcggaagtcgcagccggaagttggtcctcgctaggtcctctggaaatgcctccggaaacacagccagaccagaagatgtgtgttcctacgagaaaaaaagcttgtctttgccttcacgccctcccgctgcctttcttaaccacctacaaatattccttatcagaagaggtccgggaagagggaggaggtccctgtcttgccttcctccgcttgagtagtatcccctccagaagctcttcagagcgtggggctgctgtaaattgtgataattgttatgcattagccctgaagacatggcaagtaggggatggaggcggtgactgtgaccttacggaatcctccaggggtcagggagggacacagggccactccacaggctctccgagagcgccgcgccacgaggtgtaacctggagcaagaaagaggaaaaacaggaatacctgtgagaggaacccaagtacatgcagtgcacagaagagcaagtcacttgacttgctggcggccaccccgttaatctgcagcagagcctggacttcagtctgcatctgtgaaacccagcgcatgggtgcgttggtcaccaccgcacagcctccccgtcagacacccacgtttcgccaaaaatttattcaaataattactcctttgcttgttcctttcccaccgcccacttctgacatttttattcaaaagtaggaaatagaagagaaatatgtttgagtgctggtctgctgtgacttcattgaccttttaaatcctcaccatctagtacctaagcacagcgagttggacaaactctcacagtattcacaaagtaaattgccacaacctcatcagctcatccaacacttgtccatgcttttgattttgtccttcttaaaatgtacccttcttaaaataaaccactttatagacttgttttaagtgagatacgtaaatgcc

SEQ ID NO: 276508 - DNA, 1329 bp, Homo sapiens
tcgatgtttgaatggaggagccacagctcctccgtattgtcctgccgggaggacaggatcaagtggtggcccgtcaggcacagggtgccctcgacagccgggtagaaaggccggtgcagcaccacattgtccacccgcggggtcttaatcagctccgcaaactccatgctccccccgcggccggagccagggaaccgagcccggcccaaggaccgccgctgccgttgggctccgggtcccgcgttggcaagcggagggcagtaggagaaagccgcctcagaatccgcttccacgccctggccgctagggactcctagcggaagtggctactcgctgctggagcccacaacaactccgggcggaagcagcaggtctcgaaactcggaagacgcggaagtcgcagccggaagttggtcctcgctaggtcctctggaaatgcctccggaaacacagccagaccagaagatgtgtgttcctacgagaaaaaaagcttgtctttgccttcacgccctcccgctgcctttcttaaccacctacaaatattccttatcagaagaggtccgggaagagggaggaggtccctgtcttgccttcctccgcttgagtagtatcccctccagaagctcttcagagcgtggggctgctgtaaattgtgataattgttatgcattagccctgaagacatggcaagtaggggatggaggcggtgactgtgaccttacggaatcctccaggggtcagggagggacacagggccactccacaggctctccgagagcgccgcgccacgaggtgtaacctggagcaagaaagaggaaaaacaggaatacctgtgagaggaacccaagtacatgcagtgcacagaagagcaagtcacttgacttgctggcggccaccccgttaatctgcagcagagcctggacttcagtctgcatctgtgaaacccagcgcatgggtgcgttggtcaccaccgcacagcctccccgtcagacacccacgtttcgccaaaaatttattcaaataattactcctttgcttgttcctttcccaccgcccacttctgacatttttattcaaaagtaggaaatagaagagaaatatgtttgagtgctggtctgctgtgacttcattgaccttttaaatcctcaccatctagtacctaagcacagcgagttggacaaactctcacagtattcacaaagtaaattgccacaacctcatcagctcatccaacacttgtccatgcttttgattttgtccttcttaaaatgtacccttcttaaaataaaccactttatagacttgttttaagtgagatacgtaaatgcc

SEQ ID NO: 276509 - DNA, 1475 bp, Homo sapiens
tcgatgtttgaatggaggagccacagctcctccgtattgtcctgccgggaggacaggatcaagtggtggcccgtcaggcacagggtgccctcgacagccgggtagaaaggccggtgcagcaccacattgtccacccgcggggtcttaatcagctccgcaaactccatgctccccccgcggccggagccagggaaccgagcccggtaggtgcgaggcggttaccccgccgcagggaagtagcggaaacacccggcgcggggctggcccgtggggcggggcgggccgggcggtgaggctgggcccgccccaggctgggtgggcgcggcgaggcctacagccgccggcaccggccgcggggagacaggggctggggctggacgaggcccaagcgcctctcccgcaccgcgcggttcaccaggcctaggactcggccacagagaacccctctccacaggcccaaggaccgccgctgccgttgggctccgggtcccgcgttggcaagcggagggcagtaggagaaagccgcctcagaatccgcttccacgccctggccgctagggactcctagcggaagtggctactcgctgctggagcccacaacaactccgggcggaagcagcaggtctcgaaactcggaagacgcggaagtcgcagccggaagttggtcctcgctaggtcctctggaaatgcctccggaaacacagccagaccagaagatgtgtgttcctacgagaaaaaaagcttgtctttgccttcacgccctcccgctgcctttcttaaccacctacaaatattccttatcagaagaggtccgggaagagggaggaggtccctgtcttgccttcctccgcttgagtagtatcccctccagaagctcttcagagcgtggggctgctgtaaattgtgataattgttatgcattagccctgaagacatggcaagtaggggatggaggcggtgactgtgaccttacggaatcctccaggggtcagggagggacacagggccactccacaggctctccgagagcgccgcgccacgaggtgtaacctggagcaagaaagaggaaaaacaggaatacctgtgaaacccagcgcatgggtgcgttggtcaccaccgcacagcctccccgtcagacacccacgtttcgccaaaaatttattcaaataattactcctttgcttgttcctttcccaccgcccacttctgacatttttattcaaaagtaggaaatagaagagaaatatgtttgagtgctggtctgctgtgacttcattgaccttttaaatcctcaccatctagtacctaagcacagcgagttggacaaactctcacagtattcacaaagtaaattgccacaacctcatcagctcatccaacacttgtccatgcttttgattttgtccttcttaaaatgtacccttcttaaaataaaccactttatagacttgttttaagtgagatacgtaaatgcc

SEQ ID NO: 276510 - DNA, 1159 bp, Homo sapiens
gcttcaactgtgctatattgtttattattatagaaaacctatgtcaaggcaggtattatccttacattagagataaagcaggcctcacagattttgtccaaggtcgtgaagtccaggtttgaactcacatccctctgagtcacatgttcttaacattatacccacgtgggaggtaacaaatgctaaagacatgcatatatagaaaaagataagttatttatgatttttcccctgaaattgttatttctttcttagaggctggaaaaaattcaaaaggtccagttaaattgcactaaggtgaagagtaagcaaagtgagcccagcaagcactcagggttttctacctcagacaacagcatagccaacactccccaggattacagtgggaatatgaaatcatttccatcccggagcccttcacaaggcgatgaagattctgctctgattctaacccaagacaatctgaaaagttcagatccagatctgtcagccaacagtgaccaagagtccggggtggaggatttgagctgtcggtctccaagtggtggtgagcatgcaccgagtgaagatagtggcaaggaccgggattctgatgaagccgtgtttctcactgcctgaagtttccctttggagttccaaagtaaaggacacataagcaacacttccaaaaacaagggaacaaggtggtttattgtaaaaacaggaaatggtgcatgtcattgagaactactttaatgcagctatgaaaagggaaaaaagtgcccagttcttgatttcttagatactgaagaggacgtagtcatttcatttatcaaatataaggaaaattattcaccattttgaagctcaccctagactatgaaaattatattcactgcagagcaattacttctgtcattacctgaagtgatcagtatctatcttccttgtcatagcatgcatctctcaaaaagcctccactcctttccctcacatctgtgatcatcatgattcttttagttcacttctagatgcatattttgtgttttctaaagcatctgacattatcctcctttccgaccctcttatacatatttctaaaaacaggcacattggtgagatgcaccctttttagttaatagatgcattcctaaggagcttttaattgcttatctttcag

SEQ ID NO: 276511 - DNA, 2137 bp, Homo sapiens
gggctgcaggattcggacgagggagcacatccgcacgccaaggttgaaaatgtccgcttggtagatcgagtgtctcctaaaaaagcagctctaggtactttgtatttgacggctacccatgtcatattcgtggaaaattcacctgacgcaagaaaagaaacatggattcttcacagtcagatttccaccattgagaaacaggcaacaaccgctaccggatgccctctgctgattcgctgcaagaactttcagataatacagctcatcatacctcaggaaagagattgccacgacgtgtacatctccctgatacgccttgcaaggccagtgaaatatgaggagttatactgcttttcattcaaccccatgctggataaagaagaaagagagcaaggctgggtgctgatcgatcttagtgaagaatacacgcggatgggcctccctaatcattactggcagctcagcgatgtgaatagagactatagagtctgtgactcttatcctactgaactgtacgttcccaaatcggccacggcacacatcatagtggggagttccaaattccggagtagacggcgatttcctgtcctttcttactattataaagataaccacgcctccatctgccggagcagccagcccctgtccggcttcagtgcccggtgcctagaggacgagcagatgctccaggccattaggaaagccaatccaggaagtgacttcgtttatgtcgttgacacccggcctaaacttaatgcaatggcaaatcgtgctgcagggaaaggctatgagaatgaagacaattattccaatatcaagtttcagtttatcgggatagagaacatccatgtcatgaggaacagtctgcagaaaatgctggaagtgtgtgaacttaaatctccctccatgagtgatttcctgtggggtctggagaactctggctggttaaggcacattaaagccataatggatgcaggaatcttcattgcaaaggcagtgtcagaggaaggggcaagtgtgcttgttcactgttctgatggctgggacaggaccgctcaggtgtgctcggtggcaagcctgctgctggaccctcactaccggactctgaagggcttcatggtattaattgaaaaggactggatttcctttggtcataagtttaatcaccgatatggcaatctagatggtgacccaaaagaaatctctccagttattgaccagttcattgagtgtgtttggcagttaatggaacaatttccctgtgcctttgagttcaatgagaggtttttgattcacattcaacatcacatttattcctgccagtttggaaacttcctatgtaacagccaaaaggagagacgagaactcaagattcaagaaagaacatactcattatgggctcacctgtggaagaatcgggccgactacctgaatcctctgtttagagctgatcacagccagactcagggaacccttcatctccctacaacaccatgtaacttcatgtacaagttttggagtggaatgtataaccgctttgaaaaggggatgcagccccgacagtcagttacagattacctaatggcagtgaaggaagaaactcagcagctagaggaagaactagaggccctggaagaagtaagacatacttgctttgttaatctattttctgtgcttatttcttgaagagcaaggcttcatgaaagcctcttaagattcagtgcaatacaaatatttcacatttttagtcagtagaacacctgaaacacaaccccatccaggtcaggactcagataaccgaagcccaaacctaggcatttaatgcatttcacacatctggtttgtggctcagttccacaaatttttggttgttccttattttaggtcaacttgtttggttactgttatttgagagtagtaaaattaatttttttctggaaagtgtgaaaaagtaacagaataaaatcaaatatatgtacttgtaaaactctttccccacttttagaaattatgttaactatgatattaatctataattggtaaaggggagactgactgtaaagtcttatcttttggcttctatgaacttccctgtacttggacagggaggttataataaaatgcttttcctaattgg

SEQ ID NO: 276512 - DNA, 2542 bp, Homo sapiens
gggctgcaggattcggacgagggagcacatccgcacgccaaggttgaaaatgtccgcttggtagatcgagtgtctcctaaaaaagcagctctaggtactttgtatttgacggctacccatgtcatattcgtggaaaattcacctgacgcaagaaaagaaacatggattcttcacagtcagatttccaccattgagaaacaggcaacaaccgctaccggatgccctctgctgattcgctgcaagaactttcagataatacagctcatcatacctcaggaaagagattgccacgacgtgtacatctccctgatacgccttgcaaggccagtgaaatatgaggagttatactgcttttcattcaaccccatgctggataaagaagaaagagagcaaggctgggtgctgatcgatcttagtgaagaatacacgcggatgggcctccctaatcattactggcagctcagcgatgtgaatagagactatagagtctgtgactcttatcctactgaactgtacgttcccaaatcggccacggcacacatcatagtggggagttccaaattccggagtagacggcgatttcctgtcctttcttactattataaagataaccacgcctccatctgccggagcagccagcccctgtccggcttcagtgcccggtgcctagaggacgagcagatgctccaggccattaggaaagccaatccaggaagtgacttcgtttatgtcgttgacacccggcctaaacttaatgcaatggcaaatcgtgctgcagggaaaggctatgagaatgaagacaattattccaatatcaagtttcagtttatcgggatagagaacatccatgtcatgaggaacagtctgcagaaaatgctggaagtgtgtgaacttaaatctccctccatgagtgatttcctgtggggtctggagaactctggctggttaaggcacattaaagccataatggatgcaggaatcttcattgcaaaggcagtgtcagaggaaggggcaagtgtgcttgttcactgttctgatggctgggacaggaccgctcaggtgtgctcggtggcaagcctgctgctggaccctcactaccggactctgaagggcttcatggtattaattgaaaaggactggatttcctttggtcataagtttaatcaccgatatggcaatctagatggtgacccaaaagaaatctctccagttattgaccagttcattgagtgtgtttggcagttaatggaacaatttccctgtgcctttgagttcaatgagaggtttttgattcacattcaacatcacatttattcctgccagtttggaaacttcctatgtaacagccaaaaggagagacgagaactcaagattcaagaaagaacatactcattatgggctcacctgtggaagaatcgggccgactacctgaatcctctgtttagagctgatcacagccagactcagggaacccttcatctccctacaacaccatgtaacttcatgtacaagttttggagtggaatgtataaccgctttgaaaaggggatgcagccccgacagtcagttacagattacctaatggcagtgaaggaagaaactcagcagctagaggaagaactagaggccctggaagaaaggctggaaaaaattcaaaaggtccagttaaattgcactaaggtgaagagtaagcaaagtgagcccagcaagcactcagggttttctacctcagacaacagcatagccaacactccccaggattacagtgggaatatgaaatcatttccatcccggagcccttcacaaggcgatgaagattctgctctgattctaacccaagacaatctgaaaagttcagatccagatctgtcagccaacagtgaccaagagtccggggtggaggatttgagctgtcggtctccaagtggtggtgagcatgcaccgagtgaagatagtggcaaggaccgggattctgatgaagccgtgtttctcactgcctgaagtttccctttggagttccaaagtaaaggacacataagcaacacttccaaaaacaagggaacaaggtggtttattgtaaaaacaggaaatggtgcatgtcattgagaactactttaatgcagctatgaaaagggaaaaaagtgcccagttcttgatttcttagatactgaagaggacgtagtcatttcatttatcaaatataaggaaaattattcaccattttgaagctcaccctagactatgaaaattatattcactgcagagcaattacttctgtcattacctgaagtgatcagtatctatcttccttgtcatagcatgcatctctcaaaaagcctccactcctttccctcacatctgtgatcatcatgattcttttagttcacttctagatgcatattttgtgttttctaaagcatctgacattatcctcctttccgaccctcttatacatatttctaaaaacaggcacattggtgagatgcaccctttttagttaatagatgcattcctaaggagcttttaattgcttatctttcag

SEQ ID NO: 276513 - DNA, 793 bp, Homo sapiens
tttgacttttctgctcttattttactgtttactattattcttttgaattatatgtgagttacatgagtaattacattttcaattttcaatgcttatggtctcttaaagtcttgccctggccctgatcctatctccattctcagccagggcacttcctgcatgtttctgccctagacagaaaggctctgtgaggacagcaactgtgcctctgctcccagagggaaggctccctgggggtggacctggtgtcctctggttttctctccttaatcttgtaccagaggcaagactcaaccaaatggtgctgcatcctgaccataccctcccttctccggctgcaacactgcctatctctccccagacaaaggtgactgtcgcatcttcaccaggtgcatccaagtggaaggacaaggctttgagtatgtcatctttttccagccaacccagaagaagtcggtctgtcttttccaaccaggctcctacctggaggggcccccagggtaaggtcactggtaggaccttggctgcctcctgggcttggctcagcagggcaggttcagcacccaccaggctggccctggagtctctatctttctctaaggggtgaggaagggagtgtggggcactaggcttcagcctcacaataccaggcctggaaggacacacagggttatctggcctaatccccagtgtgcagatatgggcttctcatcaaagtctcaaaattttctggacaaaagacctgagaggccactttgagaagaatgtggtacacttggaagagggcaagatc

SEQ ID NO: 276514 - DNA, 482 bp, Homo sapiens
tttgacttttctgctcttattttactgtttactattattcttttgaattatatgtgagttacatgagtaattacattttcaattttcaatgcttatggtctcttaaagtcttgccctggccctgatcctatctccattctcagccagggcacttcctgcatgtttctgccctagacagaaaggctctgtgaggacagcaactgtgcctctgctcccagaggggctgttcacactaagtctcaacatcaggttcaaaaagtaagtatgggcccctggggcattggccaaagtcacagaccttttcatccctggaagtggccatcctcggcagctggggtgtaggagccctgcctgccactctccttccccagcccactcccaagcaattcctctagtccctggccaggacacagcctctgctgtccaactttgggagctgacaaaaaggccctgagcccagggccacttctgagtcctcgagg

SEQ ID NO: 276515 - DNA, 950 bp, Homo sapiens
tttgacttttctgctcttattttactgtttactattattcttttgaattatatgtgagttacatgagtaattacattttcaattttcaatgcttatggtctcttaaagtcttgccctggccctgatcctatctccattctcagccagggcacttcctgcatgtttctgccctagacagaaaggctctgtgaggacagcaactgtgcctctgctcccagagggaaggctccctgggggtggacctggtgtcctctggttttctctccttaatcttgtaccagaggcaagactcaaccaaatggtgctgcatcctgaccataccctcccttctccggctgcaacactgcctatctctccccagacaaaggtgactgtcgcatcttcaccaggtgcatccaagtggaaggacaaggctttgagtatgtcatctttttccagccaacccagaagaagtcggtctgtcttttccaaccaggctcctacctggaggggcccccagggtttgctcacggcgggtccctggcagccatgatggacgagaccttttctaaaactgccttcctggctggagaggggctgttcacactaagtctcaacatcaggttcaaaaacttgatccccgtggactctctggttgtaatggacgtagaactggacaagattgaggaccagaagctttacatgtcctgcatcgcccacagcagttggaagaagagtctccccagtaacagtcactgtgcctgcaggagagccactgcctcccctgcctgcctcctgcctcctgcctcccctgcctgcctcctgcctcctgcctcccctgcctgcctcctgcctcctgcctcccctgcctgcctgggacccatcaaagagcagggaggggtcctcaagcagcaattggtgaggcgagggaaaggacccttttctctgagtaaataaagtctcacagtccc

SEQ ID NO: 276516 - DNA, 1001 bp, Homo sapiens
gaagcggccccaagtgcagctgaaagcactccttgggagtcagccaagaccctccatccaagcagggctggatccttgcacttggccatgataaggagatgcttccaggtggcagcaagacttggccaccacagaggccttcttgaggccccccgtatcctgcccagactcaaccctgcctcagcatttggatcctccacagactccatgttctcaagattcttgccagagaagacagacttgaaggattatgctcttcccaatgccagctggtgttcggacatgctgagcctgtaccaagaatttctggagaagactaagtctagcggctggatcaagctgccctccttcaagtccaacagagaccacatccggggactcaagctcccatctggactggcagtttcctcagacaaaggtgactgtcgcatcttcaccaggtgcatccaagtggaaggacaaggctttgagtatgtcatctttttccagccaacccagaagaagtcggtctgtcttttccaaccaggctcctacctggaggggcccccagggtttgctcacggcgggtccctggcagccatgatggacgagaccttttctaaaactgccttcctggctggagaggggctgttcacactaagtctcaacatcaggttcaaaaacttgatccccgtggactctctggttgtaatggacgtagaactggacaagattgaggaccagaagctttacatgtcctgcatcgcccacagcagttggaagaagagtctccccagtaacagtcactgtgcctgcaggagagccactgcctcccctgcctgcctcctgcctcctgcctcccctgcctgcctcctgcctcctgcctcccctgcctgcctcctgcctcctgcctcccctgcctgcctgggacccatcaaagagcagggaggggtcctcaagcagcaattggtgaggcgagggaaaggacccttttctctgagtaaataaagtctcacagtccc

SEQ ID NO: 276517 - DNA, 1626 bp, Homo sapiens
aaatccgtcccattctggatccttattccagctcctttccctctgcgaatcgcacttggtgggtcgcggggccctcagtaattagggatcacggatcagccaagaaaaatacaggttttcttaagcctgaagccactgacttgaggagggagcgtgggagtaatgtcagtagcagttttttatttcgttttcgtttttattttctagtcactaggccaccaaagaaagttccacccaacggccagtcgatccgtcgcagcgactctcttttccctgaacggagggtttatggctgacacctccacttgtttctcagagccggggctgactgccggctgcatctttgaatggcgaccaaaaaagacatgcatttgtctggcaaagtcgctggcgttcgcctggtgcccgcgcttgccgggtcctagagcagccagattttcacaccagcgagtccagcgcccagcgccactcctccttcggatcaccggtttctcacatccgcagcagcactggcctgacagttttccggttgcgacagcgctagttgagccaaacaaaacgttttcctgcttgctctgggcgtcccattctccatccgaggccttctagtcccggtgtcactgtcgcagcacctggcgttcgttagctctttcaccagcggcgcggagcgggcggttttgctgtcacggcacatgtggcacggagtttctcggtggccgaaaccctcttttttctcagagtccagtttcttggtgacagcgctgttggttgcgccataaggaatgttgtccttgacaacccgccggccgcagtcattcgcaagctccaggcaccgacatttcgcagaactgaggtctctcggtctcagcacagctcgttgctcgatgcctccattttctcggggcgacagcaatcaggtcgccgatctgagggattcggagcttccccagctggggtgagcctggcgttcccgggcggcggcggcggcgctgggctaggggagcccgccgctcctccaagccggtgacaggggagctgcccgggcgccgtctcttcccagcgccgccgcagaacccgcagaacagctcgacctccagaaccctgtgctgtggcggcggggctggtgtgtctgtcgcaggaccccgcagattcgtctgtcgttggcttgttggtcctaacaagtttcgatttcagggtgcctgcgtttctttttcttttctcttcttttccttttgttttgttttgagacagagtctcgccgtgtcgcccagcctggagtgcagtggcgcgatcttggctcactgcaacctccgcaccccaggttcaagggattctactgcctcagcctcctgagtagctgggattacaggcgctcgccaccacgcccggataatttttgtatttttactagaggcggtgtttcatcatattgaccaggctggtctcgaactcctaacctcaataatctgcccgcctcggcctcccaaactgccaggattacagcatgagccgctgcgcccagccggtgactacgatttctatcccctggttcaagtcggggaatagccaaaatgtgatttctcaacccaagcaagtacccacttaggacaaacaccagcctagccc

SEQ ID NO: 276518 - DNA, 342 bp, Homo sapiens
aaatccgtcccattctggatccttattccagctcctttccctctgcgaatcgcacttggtgggtcgcggggccctcagtaattagggatcacggatcagccaagaaaaatacaggttttcttaagcctgaagccactgacttgaggagggagcgtgggagtaatgtcagtagcagttttttatttcgttttcgtttttattttctagtcactaggccaccaaagaaagttccacccaacggccagtcgatccgtcgcagcgactctcttttccctgaacggagggtttagcgatgaccagtttagcagtgcctgggagctcttacaccaaggctagctgcgc

SEQ ID NO: 276519 - DNA, 386 bp, Homo sapiens
ttaaaatagaagcctgatcatatgcctctcctatgtattggtcctttatcaccttggcatggcatagaaggcctctacttgctttgcctcagtttccagtctccactatgctgcatcccatgctccagacatttggaattacttgctgtcatattagcctctgtggattgacaaagactgttgccttcacctgaaattatgtgaccacacttgttttactcagcatcccaaatgcagcccttgtattgaccccttttgttgacaccaccttcagcaagcacagctgatcattcctagttttttttttcctccataagtaacctttcaatagatgtgcctctactggggaatttctattgggtttatttattccacagtgccttccc

SEQ ID NO: 276520 - DNA, 150 bp, Homo sapiens
tcctgcctcagcctcccaaagtggtgggataacacgcatgagccgctgccccaaaagttttatatagtcctttatctttgtcagataagtgatttacgaaggttttcttccactctggcttgccttttcatcctcataacttctatactt

SEQ ID NO: 276521 - DNA, 671 bp, Homo sapiens
aagcctgcagaataaatgaaaacaacaataacaaaaactgggggtcagtcccacaccactattcactgcatctctggaattcagcttttgggattttttttctataaaatgaagttgatattttcccacttcctaaacagaatgaatgttttaaggaacaaggaaagagcatttgctttgaatttctaatattaaaaggaactataagaatagaaatacagttaaccactattttcttaactctcaacgaacagatatatttctgctttaaatgagtgttgtctatcacggccaatcagctgctagcaaactcttaccatttatccaaactctgccctgaggcacttgctgtcttatccaaccaaccatgtacaactctacctccaccctttagctatatacaaggatttcctgtgtcaaagaataatgagtgggcctggcacggtggctcacacctgtaatcccagcactatgggaggccgaggctggtgcatgacctgaggtcaggagttccagaccagcctgaccaagatggtgaaaccctgtctctgctaaaaacacaaaattagctgggtatggtggtgcatgcctgtaatcccaagctacttgggaggctaaggcaggagaatcgcttgaacccaggcagcagagattgcagtgagccgagatca

SEQ ID NO: 276522 - DNA, 517 bp, Homo sapiens
tacactgtagatagttttggaatttcatataaatgattataccgtatgcattatttaagtttggcttcttttgctgtcattatatgagatccatattgtgagtagcagcagttctttttcattgctgaccagaattccttgtgtggatgtctcaatttttgtgtccattctcttattgataatacttttgtattgttggcggtttggggctatgatgaataaacctgctgtgaacattcttgtatttgtcttttggtggatataagcaccctagaggggatttgctgggtcatagtttataaatacatgtagttttagaaaatactgtcaaacagttttccaaattatttgtgtggtatttttcttaataaaactaaggctaattaaaagagcgctgggacttttatttagtttgccatctgcttcaggattgtcccaatataagagaggtaaaattttgagtcttgaatttatcactgttggaactactttctgaaaatagaatttattctcaagt

SEQ ID NO: 276523 - DNA, 714 bp, Homo sapiens
cctcaccctgctcgtctatacttactgccagcggtaccagcagcaatcccacgatgcgactgtcatccaccccgtctcacctgccccccttaataccagcataaccaaccacatcaacaaactggacaagtacgactcggtggaggccatcaaggcatttaacaaaaacaacttgatcctagaggaaagaaacaaatacttcaacccacatctcactgggaagacctattctaatgcctactttacagatctcaataattatgatgagtactaacagctttcatgtttttggcttcttgtaaatccccagttcctcaaggcctgtgccccatgactgcccatgtttctgaggcttcagagtcgaagtttggatacatttcaagtgcatttcaagccaccagagtgtcccattgctgccaaaaatacacgtctttaaaagcaacaaaaattgaaataagacatcgtgaaaatcttgaccattgttgaatgagccagggtgtgaagtttttaattgtgttcatcctatttttctgacaagtccattggtttgttttttgagcattattttataaatgtgccacccacattggaaggagtctttctttagaactttggagtgtaaatcttcatgatgttgtaattcaagaaaataggcactttctctgaaagacctgctccttccacaagaagtgcataggtccataatatttcata

SEQ ID NO: 276524 - DNA, 222 bp, Homo sapiens
acaaaaggaaaagaacactgagagaaaagtctttgatttctttttgaaaagttcatggttatatatcacagtatgtggataattttttggatcctatttaaaaaaaaaaaaaactggctgggcgtggtggctcacgcctataatcgcagcactttgggtgctgcggtaggcggatcatgaagtcaagagatcaagaccagcctgaccaacacggtgaaaccc

SEQ ID NO: 276525 - DNA, 276 bp, Homo sapiens
accaaccagtttctgcctctcgtagagctgacattctgattggggataagtttcacatttttgtgtcatatccttcaaaatagtcaactccttaggtttaatgtctttttatcaacatggagattttgaatgaaattcagccatgagtgtgtgtttgttttcccatgctatctcaatcgtattacagagcagtgttgtggaaacatttaaaaaacaatctctgacatgagtaggaatgtggtcttctaccaggaactttaccgattgcagagaatt

SEQ ID NO: 276526 - DNA, 451 bp, Homo sapiens
aatcccacctcaaagccatagctacattttgatgtatttccttcctgtcattatatacaaacctttaattttttttcattatgaaatatttcagacatacaaatggtataaagataatagaaaaccccatgtagctaccaatgcaactgaagaaatacgccctaaacagtgatgccaaagacccttgcaaaaacctttgctttgcggagtttgatgtttatttctgctttgcatgtccataaatttgctatggacatgtatccctaaagagcatatatatttttaaccagcttttaacatttatataagcatacacagtttttaaaaattgagatcgggcaggcatagtgggcctataatcccagcactttgggaggccgaggcgagaggatcacttgagcccagaagttcgagaccagtctgggcaacacagggagatcctgtttctaca

SEQ ID NO: 276527 - DNA, 2908 bp, Homo sapiens
atgagtgtcagaagtgtgaagggtgcctgttctgaatcccagagcctcctctccctctgtgaggctggcaggtgaggaagggtttaacctcactggaaggaatccctggagctagcggctgctgaaggcgtcgaggtgtgggggcacttggacagaacagtcaggcagccgggagctctgccagctttggtgaccttgggccgggctgggagcgctgcggcgggagccggaggactatgagctgccgcgcgttgtccagagcccagcccagccctaccgcgcgcggcccggagctctgttccctggaactttgggcactgcctctgggacccctgccggccagcaggcaggatggtgcttgcctcgtgccccttggtgcccgtctgctgatgtgcccagcctgtgcccgccatgccgccctccatctcagctttccaggccgcctacatcggcatcgaggtgctcatcgccctggtctctgtgcccgggaacgtgctggtgatctgggcggtgaaggtgaaccaggcgctgcgggatgccaccttctgcttcatcgtgtcgctggcggtggctgatgtggccgtgggtgccctggtcatccccctcgccatcctcatcaacattgggccacagacctacttccacacctgcctcatggttgcctgtccggtcctcatcctcacccagagctccatcctggccctgctggcaattgctgtggaccgctacctccgggtcaagatccctctccggtacaagatggtggtgaccccccggagggcggcggtggccatagccggctgctggatcctctccttcgtggtgggactgacccctatgtttggctggaacaatctgagtgcggtggagcgggcctgggcagccaacggcagcatgggggagcccgtgatcaagtgcgagttcgagaaggtcatcagcatggagtacatggtctacttcaacttctttgtgtgggtgctgcccccgcttctcctcatggtcctcatctacctggaggtcttctacctaatccgcaagcagctcaacaagaaggtgtcggcctcctccggcgacccgcagaagtactatgggaaggagctgaagatcgccaagtcgctggccctcatcctcttcctctttgccctcagctggctgcctttgcacatcctcaactgcatcaccctcttctgcccgtcctgccacaagcccagcatccttacctacattgccatcttcctcacgcacggcaactcggccatgaaccccattgtctatgccttccgcatccagaagttccgcgtcaccttccttaagatttggaatgaccatttccgctgccagcctgcacctcccattgacgaggatctcccagaagagaggcctgatgactagaccccgccttccgctcccaccagcccacatccagtggggtctcagtccagtcctcacatgcccgctgtcccaggggtctccctgagcctgccccagctgggctgttggctgggggcatgggggaggctctgaagagatacccacagagtgtggtccctccactaggagttaactaccctacacctctgggccctgcaggaggcctgggagggcaagggtcctacggagggaccaggtgtctagaggcaacagtgttctgagcccccacctgcctgaccatcccatgagcagtccagcgcttcagggctgggcaggtcctggggaggctgagactgcagaggagccacctgggctgggagaaggtgcttgggcttctgcggtgaggcaggggagtctgcttgtcttagatgttggtggtgcagccccaggaccaagcttaaggagaggagagcatctgctctgagacggatggaaggagagaggttgaggatgcactggcctgttctgtaggagagactggccagaggcagctaaggggcaggaatcaaggagcctccgttcccacctctgaggactctggaccccaggccataccaggtgctagggtgcctgctctccttgccctgggccagcccaggattgtacgtgggagaggcagaaagggtaggttcagtaatcatttctgatatttgctggagtgctggctccacgccctggggagtgagcttggtgcggtaggtgctggcctcaaacagccacgaggtggtagctctgagccctccttcttgccctgagctttccggggaggagcctggagtgtaattacctgtcatctgggccaccagctccactggcctgcccgttgccgggcctggactgtcctaggtgaccccatctctgctgcttctgggcctgatggagaggagaacactagacatgccaactcgggagcattctgcctgcctgggaacggggtggacgagggagtgtctgtaaggactcagtgttgactgtaggcgcccctggggtgggtttagcaggctgcagcaggcagaggagagtacccccctgagagcatgtgggggaaggccttgctgtcatgtgaatccctcaatacccctagtatctggctgggttttcaggggctttggaagctctgttgcaggtgtccgggggtctaggactttagggggatctggggaaggaccaacccatgccctgccaagcctggagcccctgtgttggggggcaaggtgggggagcctggagcccctgtgtgggagggcgaggcgggggagcctggagcccctgtgtgggagggcgaggcgggggatcctggagcccctgtgtcggggggcgagggaggggaggtggccgtcgagttgaccttctgaacatgagtgtcaactccaggacttgcttccaagcccttccctctgttggaaattgggtgtgccctggctcccaagggaggcccatgtgactaataaaaaactgtgaaccctgaaaaagcaca

SEQ ID NO: 276528 - DNA, 2899 bp, Homo sapiens
cgcatttgtgttttaataaaagaatctggaagataaatagtcttgaagagagacaaaggaaggaaaatttaaatccttagattcaagcagaagaattccatgtggaaggtttgggttgttgttgttgttgtttggtgtgttttttgtttttttgtttttttgtttttttttgagatggagtctcgctgtgttaccgggggcgacagagccgcaggcgcccgagtcgagtcccagccagctaccatccctctggagcttaccggccggccttggcttccccaggaatccctggagctagcggctgctgaaggcgtcgaggtgtgggggcacttggacagaacagtcaggcagccgggagctctgccagctttggtgaccttgggtgcttgcctcgtgccccttggtgcccgtctgctgatgtgcccagcctgtgcccgccatgccgccctccatctcagctttccaggccgcctacatcggcatcgaggtgctcatcgccctggtctctgtgcccgggaacgtgctggtgatctgggcggtgaaggtgaaccaggcgctgcgggatgccaccttctgcttcatcgtgtcgctggcggtggctgatgtggccgtgggtgccctggtcatccccctcgccatcctcatcaacattgggccacagacctacttccacacctgcctcatggttgcctgtccggtcctcatcctcacccagagctccatcctggccctgctggcaattgctgtggaccgctacctccgggtcaagatccctctccggtacaagatggtggtgaccccccggagggcggcggtggccatagccggctgctggatcctctccttcgtggtgggactgacccctatgtttggctggaacaatctgagtgcggtggagcgggcctgggcagccaacggcagcatgggggagcccgtgatcaagtgcgagttcgagaaggtcatcagcatggagtacatggtctacttcaacttctttgtgtgggtgctgcccccgcttctcctcatggtcctcatctacctggaggtcttctacctaatccgcaagcagctcaacaagaaggtgtcggcctcctccggcgacccgcagaagtactatgggaaggagctgaagatcgccaagtcgctggccctcatcctcttcctctttgccctcagctggctgcctttgcacatcctcaactgcatcaccctcttctgcccgtcctgccacaagcccagcatccttacctacattgccatcttcctcacgcacggcaactcggccatgaaccccattgtctatgccttccgcatccagaagttccgcgtcaccttccttaagatttggaatgaccatttccgctgccagcctgcacctcccattgacgaggatctcccagaagagaggcctgatgactagaccccgccttccgctcccaccagcccacatccagtggggtctcagtccagtcctcacatgcccgctgtcccaggggtctccctgagcctgccccagctgggctgttggctgggggcatgggggaggctctgaagagatacccacagagtgtggtccctccactaggagttaactaccctacacctctgggccctgcaggaggcctgggagggcaagggtcctacggagggaccaggtgtctagaggcaacagtgttctgagcccccacctgcctgaccatcccatgagcagtccagcgcttcagggctgggcaggtcctggggaggctgagactgcagaggagccacctgggctgggagaaggtgcttgggcttctgcggtgaggcaggggagtctgcttgtcttagatgttggtggtgcagccccaggaccaagcttaaggagaggagagcatctgctctgagacggatggaaggagagaggttgaggatgcactggcctgttctgtaggagagactggccagaggcagctaaggggcaggaatcaaggagcctccgttcccacctctgaggactctggaccccaggccataccaggtgctagggtgcctgctctccttgccctgggccagcccaggattgtacgtgggagaggcagaaagggtaggttcagtaatcatttctgatatttgctggagtgctggctccacgccctggggagtgagcttggtgcggtaggtgctggcctcaaacagccacgaggtggtagctctgagccctccttcttgccctgagctttccggggaggagcctggagtgtaattacctgtcatctgggccaccagctccactggcctgcccgttgccgggcctggactgtcctaggtgaccccatctctgctgcttctgggcctgatggagaggagaacactagacatgccaactcgggagcattctgcctgcctgggaacggggtggacgagggagtgtctgtaaggactcagtgttgactgtaggcgcccctggggtgggtttagcaggctgcagcaggcagaggagagtacccccctgagagcatgtgggggaaggccttgctgtcatgtgaatccctcaatacccctagtatctggctgggttttcaggggctttggaagctctgttgcaggtgtccgggggtctaggactttagggggatctggggaaggaccaacccatgccctgccaagcctggagcccctgtgttggggggcaaggtgggggagcctggagcccctgtgtgggagggcgaggcgggggagcctggacccctgtgtcggggggcgagggaggggaggtggccgtcgagttgaccttctgaacatgagtgtcaactccaggacttgcttccaagcccttccctctgttggaaattgggtgtgccctggctcccaagggaggcccatgtgactaataaaaaactgtgaaccctgaaaaagcaca

SEQ ID NO: 276529 - DNA, 2426 bp, Homo sapiens
gctgcttctccagccagaccacggcaggcttcccaaaggcacgctttggctctctcattcaccaggagaataagccaatgcatggcaagcactaaatcttagatcctgaagactcagccctcgagcaaaagacatgcacctccccactcaccgggccctggaagaggagggtgctcctcttagaggcccctggaggccaggcgtgcctcagaggggcctttcgaggcagctgggaggcagatcctcacactctgccctcctctcccccaggtacaagatggtggtgaccccccggagggcggcggtggccatagccggctgctggatcctctccttcgtggtgggactgacccctatgtttggctggaacaatctgagtgcggtggagcgggcctgggcagccaacggcagcatgggggagcccgtgatcaagtgcgagttcgagaaggtcatcagcatggagtacatggtctacttcaacttctttgtgtgggtgctgcccccgcttctcctcatggtcctcatctacctggaggtcttctacctaatccgcaagcagctcaacaagaaggtgtcggcctcctccggcgacccgcagaagtactatgggaaggagctgaagatcgccaagtcgctggccctcatcctcttcctctttgccctcagctggctgcctttgcacatcctcaactgcatcaccctcttctgcccgtcctgccacaagcccagcatccttacctacattgccatcttcctcacgcacggcaactcggccatgaaccccattgtctatgccttccgcatccagaagttccgcgtcaccttccttaagatttggaatgaccatttccgctgccagcctgcacctcccattgacgaggatctcccagaagagaggcctgatgactagaccccgccttccgctcccaccagcccacatccagtggggtctcagtccagtcctcacatgcccgctgtcccaggggtctccctgagcctgccccagctgggctgttggctgggggcatgggggaggctctgaagagatacccacagagtgtggtccctccactaggagttaactaccctacacctctgggccctgcaggaggcctgggagggcaagggtcctacggagggaccaggtgtctagaggcaacagtgttctgagcccccacctgcctgaccatcccatgagcagtccagcgcttcagggctgggcaggtcctggggaggctgagactgcagaggagccacctgggctgggagaaggtgcttgggcttctgcggtgaggcaggggagtctgcttgtcttagatgttggtggtgcagccccaggaccaagcttaaggagaggagagcatctgctctgagacggatggaaggagagaggttgaggatgcactggcctgttctgtaggagagactggccagaggcagctaaggggcaggaatcaaggagcctccgttcccacctctgaggactctggaccccaggccataccaggtgctagggtgcctgctctccttgccctgggccagcccaggattgtacgtgggagaggcagaaagggtaggttcagtaatcatttctgatatttgctggagtgctggctccacgccctggggagtgagcttggtgcggtaggtgctggcctcaaacagccacgaggtggtagctctgagccctccttcttgccctgagctttccggggaggagcctggagtgtaattacctgtcatctgggccaccagctccactggcctgcccgttgccgggcctggactgtcctaggtgaccccatctctgctgcttctgggcctgatggagaggagaacactagacatgccaactcgggagcattctgcctgcctgggaacggggtggacgagggagtgtctgtaaggactcagtgttgactgtaggcgcccctggggtgggtttagcaggctgcagcaggcagaggagagtacccccctgagagcatgtgggggaaggccttgctgtcatgtgaatccctcaatacccctagtatctggctgggttttcaggggctttggaagctctgttgcaggtgtccgggggtctaggactttagggggatctggggaaggaccaacccatgccctgccaagcctggagcccctgtgttggggggcaaggtgggggagcctggagcccctgtgtgggagggcgaggcgggggagcctggagcccctgtgtgggagggcgaggcgggggatcctggagcccctgtgtcggggggcgagggaggggaggtggccgtcgagttgaccttctgaacatgagtgtcaactccaggacttgcttccaagcccttccctctgttggaaattgggtgtgccctggctcccaagggaggcccatgtgactaataaaaaactgtgaaccctgaaaaagcaca

SEQ ID NO: 276530 - DNA, 1965 bp, Homo sapiens
cgcatttgtgttttaataaaagaatctggaagataaatagtcttgaagagagacaaaggaaggaaaatttaaatccttagattcaagcagaagaattccatgtggaaggtttgggttgttgttgttgttgtttggtgtgttttttgtttttttgtttttttgtttttttttgagatggagtctcgctgtgttaccgggggcgacagagccgcaggcgcccgagtcgagtcccagccagctaccatccctctggagcttaccggccggccttggcttccccaggaatccctggagctagcggctgctgaaggcgtcgaggtgtgggggcacttggacagaacagtcaggcagccgggagctctgccagctttggtgaccttgggccgggctgggagcgctgcggcgggagccggaggactatgagctgccgcgcgttgtccagagcccagcccagccctaccgcgcgcggcccggagctctgttccctggaactttgggcactgcctctgggacccctgccggccagcaggcaggatggtgcttgcctcgtgccccttggtgcccgtctgctgatgtgcccagcctgtgcccgccatgccgccctccatctcagctttccaggccgcctacatcggcatcgaggtgctcatcgccctggtctctgtgcccgggaacgtgctggtgatctgggcggtgaaggtgaaccaggcgctgcgggatgccaccttctgcttcatcgtgtcgctggcggtggctgatgtggccgtgggtgccctggtcatccccctcgccatcctcatcaacattgggccacagacctacttccacacctgcctcatggttgcctgtccggtcctcatcctcacccagagctccatcctggccctgctggcaattgctgtggaccgctacctccgggtcaagatccctctccggtacaagatggtggtgaccccccggagggcggcggtggccatagccggctgctggatcctctccttcgtggtgggactgacccctatgtttggctggaacaatctgagtgcggtggagcgggcctgggcagccaacggcagcatgggggagcccgtgatcaagtgcgagttcgagaaggtcatcagcatggagtacatggtctacttcaacttctttgtgtgggtgctgcccccgcttctcctcatggtcctcatctacctggaggtcttctacctaatccgcaagcagctcaacaagaaggtgtcggcctcctccggcgacccgcagaagtactatgggaaggagctgaagatcgccaagtcgctggccctcatcctcttcctctttgccctcagctggctgcctttgcacatcctcaactgcatcaccctcttctgcccgtcctgccacaagcccagcatccttacctacattgccatcttcctcacgcacggcaactcggccatgaaccccattgtctatgccttccgcatccagaagttccgcgtcaccttccttaagatttggaatgaccatttccgctgccagcctgcacctcccattgacgaggatctcccagaagagaggcctgatgactagaccccgccttccgctcccaccagcccacatccagtggggtctcagtccagtcctcacatgcccgctgtcccaggggtctccctgagcatgccctgccaagcctggagcccctgtgttggggggcaaggtgggggagcctggagcccctgtgtgggagggcgaggcgggggagcctggagcccctgtgtgggagggcgaggcgggggatcctggagcccctgtgtcggggggcgagggaggggaggtggccgtcgagttgaccttctgaacatgagtgtcaactccaggacttgcttccaagcccttccctctgttggaaattgggtgtgccctggctcccaagggaggcccatgtgactaataaaaaactgtgaaccctgaaaaagcaca

SEQ ID NO: 276531 - DNA, 1191 bp, Homo sapiens
  misc_feature (32)..(32): n is a, c, g, or t
cctggtaggcctgctacacagtcttgcaacgnccctcgtgcttgggcttctgcggtgaggcaggggagtctgcttgtcttagatgttggtggtgcagccccaggaccaagcttaaggagaggagagcatctgctctgagacggatggaaggagagaggttgaggatgcactggcctgttctgtaggagagactggccagaggcagctaaggggcaggaatcaaggagcctccgttcccacctctgaggactctggaccccaggccataccaggtgctagggtgcctgctctccttgccctgggccagcccaggattgtacgtgggagaggcagaaagggtaggttcagtaatcatttctgatatttgctggagtgctggctccacgccctggggagtgagcttggtgcggtaggtgctggcctcaaacagccacgaggtggtagctctgagccctccttcttgccctgagctttccggggaggagcctggagtgtaattacctgtcatctgggccaccagctccactggcctgcccgttgccgggcctggactgtcctaggtgaccccatctctgctgcttctgggcctgatggagaggagaacactagacatgccaactcgggagcattctgcctgcctgggaacggggtggacgagggagtgtctgtaaggactcagtgttgactgtaggcgcccctggggtgggtttagcaggctgcagcaggcagaggagagtacccccctgagagcatgtgggggaaggccttgctgtcatgtgaatccctcaatacccctagtatctggctgggttttcaggggctttggaagctctgttgcaggtgtccgggggtctaggactttagggggatctggggaaggaccaacccatgccctgccaagcctggagcccctgtgttggggggcaaggtgggggagcctggagcccctgtgtgggagggcgaggcgggggagcctggagcccctgtgtgggagggcgaggcgggggatcctggagcccctgtgtcggggggcgagggaggggaggtggccgtcgagttgaccttctgaacatgagtgtcaactccaggacttgcttccaagcccttccctctgttggaaattgggtgtgccctggctcccaagggaggcccatgtgactaataaaaaactgtgaaccctgaaaaagcaca

SEQ ID NO: 276532 - DNA, 2936 bp, Homo sapiens
cgcatttgtgttttaataaaagaatctggaagataaatagtcttgaagagagacaaaggaaggaaaatttaaatccttagattcaagcagaagaattccatgtggaaggtttgggttgttgttgttgttgtttggtgtgttttttgtttttttgtttttttgtttttttttgagatggagtctcgctgtgttaccgggggcgacagagccgcaggcgcccgagtcgagtcccagccagctaccatccctctggagcttaccggccggccttggcttccccaggaatccctggagctagcggctgctgaaggcgtcgaggtgtgggggcacttggacagaacagtcaggcagccgggagctctgccagctttggtgaccttgggtgcttgcctcgtgccccttggtgcccgtctgctgatgtgcccagcctgtgcccgccatgccgccctccatctcagctttccaggccgcctacatcggcatcgaggtgctcatcgccctggtctctgtgcccgggaacgtgctggtgatctgggcggtgaaggtgaaccaggcgctgcgggatgccaccttctgcttcatcgtgtcgctggcggtggctgatgtggccgtgggtgccctggtcatccccctcgccatcctcatcaacattgggccacagacctacttccacacctgcctcatggttgcctgtccggtcctcatcctcacccagagctccatcctggccctgctggcaattgctgtggaccgctacctccgggtcaagatccctctccggtacaagatggtggtgaccccccggagggcggcggtggccatagccggctgctggatcctctccttcgtggtgggactgacccctatgtttggctggaacaatctgagtgcggtggagcgggcctgggcagccaacggcagcatgggggagcccgtgatcaagtgcgagttcgagaaggtcatcagcatggagtacatggtctacttcaacttctttgtgtgggtgctgcccccgcttctcctcatggtcctcatctacctggaggtcttctacctaatccgcaagcagctcaacaagaaggtgtcggcctcctccggcgacccgcagaagtactatgggaaggagctgaagatcgccaagtcgctggccctcatcctcttcctctttgccctcagctggctgcctttgcacatcctcaactgcatcaccctcttctgcccgtcctgccacaagcccagcatccttacctacattgccatcttcctcacgcacggcaactcggccatgaaccccattgtctatgccttccgcatccagaagttccgcgtcaccttccttaagatttggaatgaccatttccgctgccagcctgcacctcccattgacgaggatctcccagaagagaggcctgatgactagaccccgccttccgctcccaccagcccacatccagtggggtctcagtccagtcctcacatgcccgctgtcccaggggtctccctgagcctgccccagctgggctgttggctgggggcatgggggaggctctgaagagatacccacagagtgtggtccctccactaggagttaactaccctacacctctgggccctgcaggaggcctgggagggcaagggtcctacggagggaccaggtgtctagaggcaacagtgttctgagcccccacctgcctgaccatcccatgagcagtccagcgcttcagggctgggcaggtcctggggaggctgagactgcagaggagccacctgggctgggagaaggtgcttgggcttctgcggtgaggcaggggagtctgcttgtcttagatgttggtggtgcagccccaggaccaagcttaaggagaggagagcatctgctctgagacggatggaaggagagaggttgaggatgcactggcctgttctgtaggagagactggccagaggcagctaaggggcaggaatcaaggagcctccgttcccacctctgaggactctggaccccaggccataccaggtgctagggtgcctgctctccttgccctgggccagcccaggattgtacgtgggagaggcagaaagggtaggttcagtaatcatttctgatatttgctggagtgctggctccacgccctggggagtgagcttggtgcggtaggtgctggcctcaaacagccacgaggtggtagctctgagccctccttcttgccctgagctttccggggaggagcctggagtgtaattacctgtcatctgggccaccagctccactggcctgcccgttgccgggcctggactgtcctaggtgaccccatctctgctgcttctgggcctgatggagaggagaacactagacatgccaactcgggagcattctgcctgcctgggaacggggtggacgagggagtgtctgtaaggactcagtgttgactgtaggcgcccctggggtgggtttagcaggctgcagcaggcagaggagagtacccccctgagagcatgtgggggaaggccttgctgtcatgtgaatccctcaatacccctagtatctggctgggttttcaggggctttggaagctctgttgcaggtgtccgggggtctaggactttagggggatctggggaaggaccaacccatgccctgccaagcctggagcccctgtgttggggggcaaggtgggggagcctggagcccctgtgtgggagggcgaggcgggggagcctggagcccctgtgtgggagggcgaggcgggggatcctggagcccctgtgtcggggggcgagggaggggaggtggccgtcgagttgaccttctgaacatgagtgtcaactccaggacttgcttccaagcccttccctctgttggaaattgggtgtgccctggctcccaagggaggcccatgtgactaataaaaaactgtgaaccctgaaaaagcaca

SEQ ID NO: 276533 - DNA, 2768 bp, Homo sapiens
gcccgattgtcactcagctcctgcgccgggggcgacagagccgcaggcgcccgagtcgagtcccagccagctaccatccctctggagcttaccggccggccttggcttccccaggaatccctggagctagcggctgctgaaggcgtcgaggtgtgggggcacttggacagaacagtcaggcagccgggagctctgccagctttggtgaccttgggtgcttgcctcgtgccccttggtgcccgtctgctgatgtgcccagcctgtgcccgccatgccgccctccatctcagctttccaggccgcctacatcggcatcgaggtgctcatcgccctggtctctgtgcccgggaacgtgctggtgatctgggcggtgaaggtgaaccaggcgctgcgggatgccaccttctgcttcatcgtgtcgctggcggtggctgatgtggccgtgggtgccctggtcatccccctcgccatcctcatcaacattgggccacagacctacttccacacctgcctcatggttgcctgtccggtcctcatcctcacccagagctccatcctggccctgctggcaattgctgtggaccgctacctccgggtcaagatccctctccggtacaagatggtggtgaccccccggagggcggcggtggccatagccggctgctggatcctctccttcgtggtgggactgacccctatgtttggctggaacaatctgagtgcggtggagcgggcctgggcagccaacggcagcatgggggagcccgtgatcaagtgcgagttcgagaaggtcatcagcatggagtacatggtctacttcaacttctttgtgtgggtgctgcccccgcttctcctcatggtcctcatctacctggaggtcttctacctaatccgcaagcagctcaacaagaaggtgtcggcctcctccggcgacccgcagaagtactatgggaaggagctgaagatcgccaagtcgctggccctcatcctcttcctctttgccctcagctggctgcctttgcacatcctcaactgcatcaccctcttctgcccgtcctgccacaagcccagcatccttacctacattgccatcttcctcacgcacggcaactcggccatgaaccccattgtctatgccttccgcatccagaagttccgcgtcaccttccttaagatttggaatgaccatttccgctgccagcctgcacctcccattgacgaggatctcccagaagagaggcctgatgactagaccccgccttccgctcccaccagcccacatccagtggggtctcagtccagtcctcacatgcccgctgtcccaggggtctccctgagcctgccccagctgggctgttggctgggggcatgggggaggctctgaagagatacccacagagtgtggtccctccactaggagttaactaccctacacctctgggccctgcaggaggcctgggagggcaagggtcctacggagggaccaggtgtctagaggcaacagtgttctgagcccccacctgcctgaccatcccatgagcagtccagcgcttcagggctgggcaggtcctggggaggctgagactgcagaggagccacctgggctgggagaaggtgcttgggcttctgcggtgaggcaggggagtctgcttgtcttagatgttggtggtgcagccccaggaccaagcttaaggagaggagagcatctgctctgagacggatggaaggagagaggttgaggatgcactggcctgttctgtaggagagactggccagaggcagctaaggggcaggaatcaaggagcctccgttcccacctctgaggactctggaccccaggccataccaggtgctagggtgcctgctctccttgccctgggccagcccaggattgtacgtgggagaggcagaaagggtaggttcagtaatcatttctgatatttgctggagtgctggctccacgccctggggagtgagcttggtgcggtaggtgctggcctcaaacagccacgaggtggtagctctgagccctccttcttgccctgagctttccggggaggagcctggagtgtaattacctgtcatctgggccaccagctccactggcctgcccgttgccgggcctggactgtcctaggtgaccccatctctgctgcttctgggcctgatggagaggagaacactagacatgccaactcgggagcattctgcctgcctgggaacggggtggacgagggagtgtctgtaaggactcagtgttgactgtaggcgcccctggggtgggtttagcaggctgcagcaggcagaggagagtacccccctgagagcatgtgggggaaggccttgctgtcatgtgaatccctcaatacccctagtatctggctgggttttcaggggctttggaagctctgttgcaggtgtccgggggtctaggactttagggggatctggggaaggaccaacccatgccctgccaagcctggagcccctgtgttggggggcaaggtgggggagcctggagcccctgtgtgggagggcgaggcgggggagcctggagcccctgtgtgggagggcgaggcgggggatcctggagcccctgtgtcggggggcgagggaggggaggtggccgtcgagttgaccttctgaacatgagtgtcaactccaggacttgcttccaagcccttccctctgttggaaattgggtgtgccctggctcccaagggaggcccatgtgactaataaaaaactgtgaaccctgaaaaagcaca

SEQ ID NO: 276534 - DNA, 1883 bp, Homo sapiens
cgcatttgtgttttaataaaagaatctggaagataaatagtcttgaagagagacaaaggaaggaaaatttaaatccttagattcaagcagaagaattccatgtggaaggtttgggttgttgttgttgttgtttggtgtgttttttgtttttttgtttttttgtttttttttgagatggagtctcgctgtgttaccgggggcgacagagccgcaggcgcccgagtcgagtcccagccagctaccatccctctggagcttaccggccggccttggcttccccaggaatccctggagctagcggctgctgaaggcgtcgaggtgtgggggcacttggacagaacagtcaggcagccgggagctctgccagctttggtgaccttgggccgggctgggagcgctgcggcgggagccggaggactatgagctgccgcgcgttgtccagagcccagcccagccctaccgcgcgcggcccggagctctgttccctggaactttgggcactgcctctgggacccctgccggccagcaggcaggatggtgcttgcctcgtgccccttggtgcccgtctgctgatgtgcccagcctgtgcccgccatgccgccctccatctcagctttccaggccgcctacatcggcatcgaggtgctcatcgccctggtctctgtgcccgggaacgtgctggtgatctgggcggtgaaggtgaaccaggcgctgcgggatgccaccttctgcttcatcgtgtcgctggcggtggctgatgtggccgtgggtgccctggtcatccccctcgccatcctcatcaacattgggccacagacctacttccacacctgcctcatggttgcctgtccggtcctcatcctcacccagagctccatcctggccctgctggcaattgctgtggaccgctacctccgggtcaagatccctctccggtacaagatggtggtgaccccccggagggcggcggtggccatagccggctgctggatcctctccttcgtggtgggactgacccctatgtttggctggaacaatctgagtgcggtggagcgggcctgggcagccaacggcagcatgggggagcccgtgatcaagtgcgagttcgagaaggtcatcagcatggagtacatggtctacttcaacttctttgtgtgggtgctgcccccgcttctcctcatggtcctcatctacctggaggtcttctacctaatccgcaagcagctcaacaagaaggtgtcggcctcctccggcgacccgcagaagtactatgggaaggagctgaagatcgccaagtcgctggccctcatcctcttcctctttgccctcagctggctgcctttgcacatcctcaactgcatcaccctcttctgcccgtcctgccacaagcccagcatccttacctacattgccatcttcctcacgcacggcaactcggccatgaaccccattgtctatgccttccgcatccagaagttccgcgtcaccttccttaagatttggaatgaccatttccgctgccagcctgcacctcccattgacgaggatctcccagaagagaggcctgatgactagaccccgccttccgctcccaccagcccacatccagtggggtctcagtccagtcctcacatgcccgctgtgtgggagggcgaggcgggggagcctggagcccctgtgtgggagggcgaggcgggggatcctggagcccctgtgtcggggggcgagggaggggaggtggccgtcgagttgaccttctgaacatgagtgtcaactccaggacttgcttccaagcccttccctctgttggaaattgggtgtgccctggctcccaagggaggcccatgtgactaataaaaaactgtgaaccctgaaaaagcaca

SEQ ID NO: 276535 - DNA, 865 bp, Homo sapiens
gctccctccccgcagagcagagccagcggcccgagccgaatccccggagccgcgcctcgattcccctccagcagctgctctgggctgcgcagggttcttgcgctcggcactggagcctcagccgcggccgcagctgtccgacgtgtcactgcaagggccccgcccccggggtggggtctcgggctctcgctaccggagagggaggagaagggggaggttaaaggggaaggacccccggaagtgccccctcctcagtgcgggagagggagacgccgggggcggagtcccctgcctcccgcggcgtggttggtgcgtcccaggtgacgtcagaagcagcccgcccctgcctggatggcccagcccgagttcccggacgccgcgggactggagtgccagccggtgttggacgtggagcggcgccgccaccgcgccgacaccattctctccggcccagcagcccccttcctcgcacgacggactttccctggaccccagtcagttggagcctctggcgccccgcaaccccggcccctcgggcctctgcacagcctctttcactcagaagctcaggtcgcctccagcccagcactatgccggggactgtggcaacactgcggttccagctgctgccccctgagccagatgatgccttctggggtgcaccttgtgaacagcccctggagcgcaggtaccaggcactgccggccctcgtctgcatcatgtgctgtttgtttggagtcgtctactgcttcttcggtgagatccccatctcatccctcacctgggctccccagtgtttccccgagttctttttctgggcccccaagtcttctctgaatccctctaccatcatgaataattcttc

SEQ ID NO: 276536 - DNA, 2552 bp, Homo sapiens
gctccctccccgcagagcagagccagcggcccgagccgaatccccggagccgcgcctcgattcccctccagcagctgctctgggctgcgcagggttcttgcgctcggcactggagcctcagccgcggccgcagctgtccgacgtgtcactgcaagggccccgcccccggggtggggtctcgggctctcgctaccggagagggaggagaagggggaggttaaaggggaaggacccccggaagtgccccctcctcagtgcgggagagggagacgccgggggcggagtcccctgcctcccgcggcgtggttggtgcgtcccaggtgacgtcagaagcagcccgcccctgcctggatggtgcgccctgagtgacgtcaggagcagaggccggagctgtccatcagcaccaaaggccgcgggcgggctcagggcatggggccgcggttctggggcggcccgagccccggctcctgcgccttccccttcctcaggcccagcccgagttcccggacgccgcgggactggagtgccagccggtgttggacgtggagcggcgccgccaccgcgccgacaccattctctccggcccagcagcccccttcctcgcacgacggactttccctggaccccagtcagttggagcctctggcgccccgcaaccccggcccctcgggcctctgcacagcctctttcactcagaagctcaggtcgcctccagcccagcactatgccggggactgtggcaacactgcggttccagctgctgccccctgagccagatgatgccttctggggtgcaccttgtgaacagcccctggagcgcaggtaccaggcactgccggccctcgtctgcatcatgtgctgtttgtttggagtcgtctactgcttcttcggttaccgctgcttcaaggcagtgctcttcctcactgggttgctgtttggctcggtggtcatcttcctcctctgctaccgagagcgggtgctagagacacagctgagtgctggggcgagcgcgggcatcgctctgggcatcgggctgctctgcgggctggtggccatgctagtgcgcagcgtgggcctcttcctggtggggctgctgctcggcctgctgctcgcagctgctgccctgctgggctccgcaccctactaccagccaggctccgtgtggggtccactggggctgttgctggggggcggcctgctctgtgccctgctcactctgcgctggccccgcccactcaccaccctggccaccgccgtgactggtgctgcgctgatcgccactgccgctgactacttcgccgagctgctactgctggggcgctacgtggtggagcgactccgggctgctcctgtgcccccactctgctggcgaagctgggccctgctggcactctggcccctgctcagcctgatgggcgttctggtgcagtggagggtgacagctgagggggactcccacacggaagtggtcatcagccggcagcgccgacgcgtgcaactgatgcggattcggcagcaggaagatcgcaaggagaaaaggcggaaaaagagacctcctcgggctcccctcagaggtccccgggctcctcccaggcctgggccaccagatcctgcttatcggcgcaggccagtgcccatcaaacgcttcaatggagacgtcctctccccgagctatatccagagcttccgagaccggcagaccgggagctccctgagctccttcatggcctcacccacagatgcggactatgagtatgggtcccggggacctctgacagcctgctcaggccccccagtgcgggtatagccatatctgtctgtctagactctgcagtcaccagctctgccagctcgaggaggcctgctaggctgccactcagcctcctggctttggctgtccctctccccagcctggagagggctggcctggtcactagaagggaggattgtctcaggcgagtcttggcctgagaggaaagccccctcccaagctcccaagaggctcctgaggaactcggggtgtgaaccccattggggtgtgctcagggttgtgagtgtgttgcccgtgtgtctgtgtgtatgtgtgtgggggtgggcaggcttggaggggacgctgggacccttgccttagatttctgactggtagggtttctccaggctcagccccacctcttcactccctgccaaggtcccatgggccacctcctgcatgtctccgcggaggggctaccttccttcccatcgccctgcctcgcagccagactcatctaagggttcttgtccttgtctatggggcaaactgtagcatccctcaccctggtcccctggcctctgtaaagccaccagcctgagggcagtggcaggagatgggggtgggggggtgctgctctgggctgggttgggaagggagttggggaggggtttaaatgcacggtgcatgtctggtgtctgtcatgccaacctagacacctcatgcttctgtctcccccaccccactctgttttacatcttttataaatgtgccaaactgtgtggcctctgccaggaatggt

SEQ ID NO: 276537 - DNA, 2519 bp, Homo sapiens
gctccctccccgcagagcagagccagcggcccgagccgaatccccggagccgcgcctcgattcccctccagcagctgctctgggctgcgcagggttcttgcgctcggcactggagcctcagccgcggccgcagctgtccgacgtgtcactgcaagggccccgcccccggggtggggtctcgggctctcgctaccggagagggaggagaagggggaggttaaaggggaaggacccccggaagtgccccctcctcagtgcgggagagggagacgccgggggcggagtcccctgcctcccgcggcgtggttggtgcgtcccaggtgacgtcagaagcagcccgcccctgcctggatggtgcgccctgagtgacgtcaggagcagaggccggagctgtccatcagcaccaaaggccgcgggcgggctcagggcatggggccgcggttctggggcggcccgagccccggctcctgcgccttccccttcctcaggcccagcccgagttcccggacgccgcgggactggagtgccagccggtgttggacgtggagcggcgccgccaccgcgccgacaccattctctccggcccagcagcccccttcctcgcacgacggactttccctggaccccagtcagttggagcctctggcgccccgcaaccccggcccctcgggcctctgcacagcctctttcactcagaagctcaggtcgcctccagcccaggttaacttgggagggtgactcccttctattcccagcactatgccggggactgtggcaacactgcggttccagctgctgccccctgagccagatgatgccttctggggtgcaccttgtgaacagcccctggagcgcaggttaccgctgcttcaaggcagtgctcttcctcactgggttgctgtttggctcggtggtcatcttcctcctctgctaccgagagcgggtgctagagacacagctgagtgctggggcgagcgcgggcatcgctctgggcatcgggctgctctgcgggctggtggccatgctagtgcgcagcgtgggcctcttcctggtggggctgctgctcggcctgctgctcgcagctgctgccctgctgggctccgcaccctactaccagccaggctccgtgtggggtccactggggctgttgctggggggcggcctgctctgtgccctgctcactctgcgctggccccgcccactcaccaccctggccaccgccgtgactggtgctgcgctgatcgccactgccgctgactacttcgccgagctgctactgctggggcgctacgtggtggagcgactccgggctgctcctgtgcccccactctgctggcgaagctgggccctgctggcactctggcccctgctcagcctgatgggcgttctggtgcagtggagggtgacagctgagggggactcccacacggaagtggtcatcagccggcagcgccgacgcgtgcaactgatgcggattcggcagcaggaagatcgcaaggagaaaaggcggaaaaagagacctcctcgggctcccctcagaggtccccgggctcctcccaggcctgggccaccagatcctgcttatcggcgcaggccagtgcccatcaaacgcttcaatggagacgtcctctccccgagctatatccagagcttccgagaccggcagaccgggagctccctgagctccttcatggcctcacccacagatgcggactatgagtatgggtcccggggacctctgacagcctgctcaggccccccagtgcgggtatagccatatctgtctgtctagactctgcagtcaccagctctgccagctcgaggaggcctgctaggctgccactcagcctcctggctttggctgtccctctccccagcctggagagggctggcctggtcactagaagggaggattgtctcaggcgagtcttggcctgagaggaaagccccctcccaagctcccaagaggctcctgaggaactcggggtgtgaaccccattggggtgtgctcagggttgtgagtgtgttgcccgtgtgtctgtgtgtatgtgtgtgggggtgggcaggcttggaggggacgctgggacccttgccttagatttctgactggtagggtttctccaggctcagccccacctcttcactccctgccaaggtcccatgggccacctcctgcatgtctccgcggaggggctaccttccttcccatcgccctgcctcgcagccagactcatctaagggttcttgtccttgtctatggggcaaactgtagcatccctcaccctggtcccctggcctctgtaaagccaccagcctgagggcagtggcaggagatgggggtgggggggtgctgctctgggctgggttgggaagggagttggggaggggtttaaatgcacggtgcatgtctggtgtctgtcatgccaacctagacacctcatgcttctgtctcccccaccccactctgttttacatcttttataaatgtgccaaactgtgtggcctctgccaggaatggt

SEQ ID NO: 276538 - DNA, 2418 bp, Homo sapiens
gctccctccccgcagagcagagccagcggcccgagccgaatccccggagccgcgcctcgattcccctccagcagctgctctgggctgcgcagggttcttgcgctcggcactggagcctcagccgcggccgcagctgtccgacgtgtcactgcaagggccccgcccccggggtggggtctcgggctctcgctaccggagagggaggagaagggggaggttaaaggggaaggacccccggaagtgccccctcctcagtgcgggagagggagacgccgggggcggagtcccctgcctcccgcggcgtggttggtgcgtcccaggtgacgtcagaagcagcccgcccctgcctggatggcccagcccgagttcccggacgccgcgggactggagtgccagccggtgttggacgtggagcggcgccgccaccgcgccgacaccattctctccggcccagcagcccccttcctcgcacgacggactttccctggaccccagtcagttggagcctctggcgccccgcaaccccggcccctcgggcctctgcacagcctctttcactcagaagctcaggtcgcctccagcccagcactatgccggggactgtggcaacactgcggttccagctgctgccccctgagccagatgatgccttctggggtgcaccttgtgaacagcccctggagcgcaggtaccaggcactgccggccctcgtctgcatcatgtgctgtttgtttggagtcgtctactgcttcttcggttaccgctgcttcaaggcagtgctcttcctcactgggttgctgtttggctcggtggtcatcttcctcctctgctaccgagagcgggtgctagagacacagctgagtgctggggcgagcgcgggcatcgctctgggcatcgggctgctctgcgggctggtggccatgctagtgcgcagcgtgggcctcttcctggtggggctgctgctcggcctgctgctcgcagctgctgccctgctgggctccgcaccctactaccagccaggctccgtgtggggtccactggggctgttgctggggggcggcctgctctgtgccctgctcactctgcgctggccccgcccactcaccaccctggccaccgccgtgactggtgctgcgctgatcgccactgccgctgactacttcgccgagctgctactgctggggcgctacgtggtggagcgactccgggctgctcctgtgcccccactctgctggcgaagctgggccctgctggcactctggcccctgctcagcctgatgggcgttctggtgcagtggagggtgacagctgagggggactcccacacggaagtggtcatcagccggcagcgccgacgcgtgcaactgatgcggattcggcagcaggaagatcgcaaggagaaaaggcggaaaaagagacctcctcgggctcccctcagaggtccccgggctcctcccaggcctgggccaccagatcctgcttatcggcgcaggccagtgcccatcaaacgcttcaatggagacgtcctctccccgagctatatccagagcttccgagaccggcagaccgggagctccctgagctccttcatggcctcacccacagatgcggactatgagtatgggtcccggggacctctgacagcctgctcaggccccccagtgcgggtatagccatatctgtctgtctagactctgcagtcaccagctctgccagctcgaggaggcctgctaggctgccactcagcctcctggctttggctgtccctctccccagcctggagagggctggcctggtcactagaagggaggattgtctcaggcgagtcttggcctgagaggaaagccccctcccaagctcccaagaggctcctgaggaactcggggtgtgaaccccattggggtgtgctcagggttgtgagtgtgttgcccgtgtgtctgtgtgtatgtgtgtgggggtgggcaggcttggaggggacgctgggacccttgccttagatttctgactggtagggtttctccaggctcagccccacctcttcactccctgccaaggtcccatgggccacctcctgcatgtctccgcggaggggctaccttccttcccatcgccctgcctcgcagccagactcatctaagggttcttgtccttgtctatggggcaaactgtagcatccctcaccctggtcccctggcctctgtaaagccaccagcctgagggcagtggcaggagatgggggtgggggggtgctgctctgggctgggttgggaagggagttggggaggggtttaaatgcacggtgcatgtctggtgtctgtcatgccaacctagacacctcatgcttctgtctcccccaccccactctgttttacatcttttataaatgtgccaaactgtgtggcctctgccaggaatggt

SEQ ID NO: 276539 - DNA, 1959 bp, Homo sapiens
actcttgactcaaaagatttatcctaactcctgtgatcctcaaatacatcaaccctcatgatctcaatggttatgtttgccttcccattgaccaccaacagccatatctctctaacctcccctgacctcaatggccccatcactgatgccgtcatgactccagtgaccctcaattctctgatcttagtgtctttgtctctggttcccctgggatcccatgtccttgaccccttggacctgctccctccagcctggtgccctcatcttggcccctcactagcccctgttcccctccaggttaccgctgcttcaaggcagtgctcttcctcactgggttgctgtttggctcggtggtcatcttcctcctctgctaccgagagcgggtgctagagacacagctgagtgctggggcgagcgcgggcatcgctctgggcatcgggctgctctgcgggctggtggccatgctagtgcgcagcgtgggcctcttcctggtggggctgctgctcggcctgctgctcgcagctgctgccctgctgggctccgcaccctactaccagccaggctccgtgtggggtccactggggctgttgctggggggcggcctgctctgtgccctgctcactctgcgctggccccgcccactcaccaccctggccaccgccgtgactggtgctgcgctgatcgccactgccgctgactacttcgccgagctgctactgctggggcgctacgtggtggagcgactccgggctgctcctgtgcccccactctgctggcgaagctgggccctgctggcactctggcccctgctcagcctgatgggcgttctggtgcagtggagggtgacagctgagggggactcccacacggaagtggtcatcagccggcagcgccgacgcgtgcaactgatgcggattcggcagcaggaagatcgcaaggagaaaaggcggaaaaagagacctcctcgggctcccctcagaggtccccgggctcctcccaggcctgggccaccagatcctgcttatcggcgcaggccagtgcccatcaaacgcttcaatggagacgtcctctccccgagctatatccagagcttccgagaccggcagaccgggagctccctgagctccttcatggcctcacccacagatgcggactatgagtatgggtcccggggacctctgacagcctgctcaggccccccagtgcgggtatagccatatctgtctgtctagactctgcagtcaccagctctgccagctcgaggaggcctgctaggctgccactcagcctcctggctttggctgtccctctccccagcctggagagggctggcctggtcactagaagggaggattgtctcaggcgagtcttggcctgagaggaaagccccctcccaagctcccaagaggctcctgaggaactcggggtgtgaaccccattggggtgtgctcagggttgtgagtgtgttgcccgtgtgtctgtgtgtatgtgtgtgggggtgggcaggcttggaggggacgctgggacccttgccttagatttctgactggtagggtttctccaggctcagccccacctcttcactccctgccaaggtcccatgggccacctcctgcatgtctccgcggaggggctaccttccttcccatcgccctgcctcgcagccagactcatctaagggttcttgtccttgtctatggggcaaactgtagcatccctcaccctggtcccctggcctctgtaaagccaccagcctgagggcagtggcaggagatgggggtgggggggtgctgctctgggctgggttgggaagggagttggggaggggtttaaatgcacggtgcatgtctggtgtctgtcatgccaacctagacacctcatgcttctgtctcccccaccccactctgttttacatcttttataaatgtgccaaactgtgtggcctctgccaggaatggt

SEQ ID NO: 276540 - DNA, 2587 bp, Homo sapiens
gctccctccccgcagagcagagccagcggcccgagccgaatccccggagccgcgcctcgattcccctccagcagctgctctgggctgcgcagggttcttgcgctcggcactggagcctcagccgcggccgcagctgtccgacgtgtcactgcaagggccccgcccccggggtggggtctcgggctctcgctaccggagagggaggagaagggggaggttaaaggggaaggacccccggaagtgccccctcctcagtgcgggagagggagacgccgggggcggagtcccctgcctcccgcggcgtggttggtgcgtcccaggtgacgtcagaagcagcccgcccctgcctggatggtgcgccctgagtgacgtcaggagcagaggccggagctgtccatcagcaccaaaggccgcgggcgggctcagggcatggggccgcggttctggggcggcccgagccccggctcctgcgccttccccttcctcaggcccagcccgagttcccggacgccgcgggactggagtgccagccggtgttggacgtggagcggcgccgccaccgcgccgacaccattctctccggcccagcagcccccttcctcgcacgacggactttccctggaccccagtcagttggagcctctggcgccccgcaaccccggcccctcgggcctctgcacagcctctttcactcagaagctcaggtcgcctccagcccaggttaacttgggagggtgactcccttctattcccagcactatgccggggactgtggcaacactgcggttccagctgctgccccctgagccagatgatgccttctggggtgcaccttgtgaacagcccctggagcgcaggtaccaggcactgccggccctcgtctgcatcatgtgctgtttgtttggagtcgtctactgcttcttcggttaccgctgcttcaaggcagtgctcttcctcactgggttgctgtttggctcggtggtcatcttcctcctctgctaccgagagcgggtgctagagacacagctgagtgctggggcgagcgcgggcatcgctctgggcatcgggctgctctgcgggctggtggccatgctagtgcgcagcgtgggcctcttcctggtggggctgctgctcggcctgctgctcgcagctgctgccctgctgggctccgcaccctactaccagccaggctccgtgtggggtccactggggctgttgctggggggcggcctgctctgtgccctgctcactctgcgctggccccgcccactcaccaccctggccaccgccgtgactggtgctgcgctgatcgccactgccgctgactacttcgccgagctgctactgctggggcgctacgtggtggagcgactccgggctgctcctgtgcccccactctgctggcgaagctgggccctgctggcactctggcccctgctcagcctgatgggcgttctggtgcagtggagggtgacagctgagggggactcccacacggaagtggtcatcagccggcagcgccgacgcgtgcaactgatgcggattcggcagcaggaagatcgcaaggagaaaaggcggaaaaagagacctcctcgggctcccctcagaggtccccgggctcctcccaggcctgggccaccagatcctgcttatcggcgcaggccagtgcccatcaaacgcttcaatggagacgtcctctccccgagctatatccagagcttccgagaccggcagaccgggagctccctgagctccttcatggcctcacccacagatgcggactatgagtatgggtcccggggacctctgacagcctgctcaggccccccagtgcgggtatagccatatctgtctgtctagactctgcagtcaccagctctgccagctcgaggaggcctgctaggctgccactcagcctcctggctttggctgtccctctccccagcctggagagggctggcctggtcactagaagggaggattgtctcaggcgagtcttggcctgagaggaaagccccctcccaagctcccaagaggctcctgaggaactcggggtgtgaaccccattggggtgtgctcagggttgtgagtgtgttgcccgtgtgtctgtgtgtatgtgtgtgggggtgggcaggcttggaggggacgctgggacccttgccttagatttctgactggtagggtttctccaggctcagccccacctcttcactccctgccaaggtcccatgggccacctcctgcatgtctccgcggaggggctaccttccttcccatcgccctgcctcgcagccagactcatctaagggttcttgtccttgtctatggggcaaactgtagcatccctcaccctggtcccctggcctctgtaaagccaccagcctgagggcagtggcaggagatgggggtgggggggtgctgctctgggctgggttgggaagggagttggggaggggtttaaatgcacggtgcatgtctggtgtctgtcatgccaacctagacacctcatgcttctgtctcccccaccccactctgttttacatcttttataaatgtgccaaactgtgtggcctctgccaggaatggt

SEQ ID NO: 276541 - DNA, 2566 bp, Homo sapiens
gctccctccccgcagagcagagccagcggcccgagccgaatccccggagccgcgcctcgattcccctccagcagctgctctgggctgcgcagggttcttgcgctcggcactggagcctcagccgcggccgcagctgtccgacgtgtcactgcaagggccccgcccccggggtggggtctcgggctctcgctaccggagagggaggagaagggggaggttaaaggggaaggacccccggaagtgccccctcctcagtgcgggagagggagacgccgggggcggagtcccctgcctcccgcggcgtggttggtgcgtcccaggtgacgtcagaagcagcccgcccctgcctggatggtgcgccctgagtgacgtcaggagcagaggccggagctgtccatcagcaccaaaggccgcgggcgggctcagggcatggggccgcggttctggggcggcccgagccccggctcctgcgccttccccttcctcaggcccagcccgagttcccggacgccgcgggactggagtgccagccggtgttggacgtggagcggcgccgccaccgcgccgacaccattctctccggcccagcagcccccttcctcgcacgacggactttccctggaccccagtcagttggagcctctggcgccccgcaaccccggcccctcgggcctctgcacagcctctttcactcagaagctcaggtcgcctccagcccaggttaacttgggagggtgactcccttctattcccagcactatgccggggactgtggcaacactgcggttccagctgctgccccctgagccagatgatgccttctggggtgcaccttgtgaacagcccctggagcgcaggtaccaggcactgccggccctcgtctgcatcatgtgctgtttgtttggagtcgtctactgcttcttcggttaccgctgcttcaaggcagtgctcttcctcactgggttgctgtttggctcggtggtcatcttcctcctctgctaccgagagcgggtgctagagacacagctgagtgctggggcgagcgcgggcatcgctctgggcatcgggctgctctgcgggctggtggccatgctagtgcgcagcgtgggcctcttcctggtggggctgctgctcggcctgctgctcgcagctgctgccctgctgggctccgcaccctactaccagccaggctccgtgtggggtccactggggctgttgctggggggcggcctgctctgtgccctgctcactctgcgctggccccgcccactcaccaccctggccaccgccgtgactggtgctgcgctgatcgccactgccgctgactacttcgccgagctgctactgctggggcgctacgtggtggagcgactccgggctgctcctgtgcccccactctgctggcgaagctgggccctgctggcactctggcccctgctcagcctgatgggcgttctggtgcagtggagggtgacagctgagggggactcccacacggaagtggtcatcagccggcagcgccgacgcgtgcaactgatgcggattcggcagcaggaagatcgcaaggagaaaaggcggaaaaagagacctcctcgggctcccctcagaggtccccgggctcctcccaggcctgggccaccagatcctgcttatcggcgcaggccagtgcccatcaaacgcttcaatggagacgtcctctccccgagctatatccagagcttccgagaccggcagaccgggagctccctgagctccttcatggcctcacccacagatgcggactatgagtatgggtcccggggacctctgacagcctgctcaggccccccagtgcgggtatagccatatctgtctgtctagactctgcagtcaccagctctgccagctcgaggaggcctgctaggctgccactcagcctcctggctttggctgtccctctccccagcctggagagggctggcctggtcactagaagggaggattgtctcaggcgagtcttggcctgagaggaaagccccctcccaagctcccaagaggctcctgaggaactcggggtgtgaaccccattggggtgtgctcagggttgtgagtgtgttgcccgtgtgtctgtgtgtatgtgtgtgggggtgggcaggcttggaggggacgctgggacccttgccttagatttctgactggtagggtttctccaggctcagccccacctcttcactccctgccaaggtcccatgggccacctcctgcatgtctccgcggaggggctaccttccttcccatcgccctgcctcgcagccagactcatctaagggttcttgtccttgtctatggggcaaactgtagcatccctcaccctggtcccctggcctctgtaaagccaccagcctgagggcagtggcaggagatgggggtgggggggtgctgctctgggctgggttgggaagggagttggggaggggtttaaatgcacggtgcatgtctggtgtctgtcatgccaacctagacacctcatgcttctgtctcccccaccccactctgttttacatcttttataaatgtgccaaactgt

SEQ ID NO: 276542 - DNA, 2976 bp, Homo sapiens
  misc_feature (2789)..(2789): n is a, c, g, or t
  misc_feature (2804)..(2804): n is a, c, g, or t
gctccctccccgcagagcagagccagcggcccgagccgaatccccggagccgcgcctcgattcccctccagcagctgctctgggctgcgcagggttcttgcgctcggcactggagcctcagccgcggccgcagctgtccgacgtgtcactgcaagggccccgcccccggggtggggtctcgggctctcgctaccggagagggaggagaagggggaggttaaaggggaaggacccccggaagtgccccctcctcagtgcgggagagggagacgccgggggcggagtcccctgcctcccgcggcgtggttggtgcgtcccaggtgacgtcagaagcagcccgcccctgcctggatggtgcgccctgagtgacgtcaggagcagaggccggagctgtccatcagcaccaaaggccgcgggcgggctcagggcatggggccgcggttctggggcggcccgagccccggctcctgcgccttccccttcctcaggcccagcccgagttcccggacgccgcgggactggagtgccagccggtgttggacgtggagcggcgccgccaccgcgccgacaccattctctccggcccagcagcccccttcctcgcacgacggactttccctggaccccagtcagttggagcctctggcgccccgcaaccccggcccctcgggcctctgcacagcctctttcactcagaagctcaggtcgcctccagcccaggttaacttgggagggtgactcccttctattcccagcactatgccggggactgtggcaacactgcggttccagctgctgccccctgagccagatgatgccttctggggtgcaccttgtgaacagcccctggagcgcaggtaccaggcactgccggccctcgtctgcatcatgtgctgtttgtttggagtcgtctactgcttcttcggttaccgctgcttcaaggcagtgctcttcctcactgggttgctgtttggctcggtggtcatcttcctcctctgctaccgagagcgggtgctagagacacagctgagtgctggggcgagcgcgggcatcgctctgggcatcgggctgctctgcgggctggtggccatgctagtgcgcagcgtgggcctcttcctggtggggctgctgctcggcctgctgctcgcagctgctgccctgctgggctccgcaccctactaccagccaggctccgtgtggggtccactggggctgttgctggggggcggcctgctctgtgccctgctcactctgcgctggccccgcccactcaccaccctggccaccgccgtgactggtgctgcgctgatcgccactgccgctgactacttcgccgagctgctactgctggggcgctacgtggtggagcgactccgggctgctcctgtgcccccactctgctggcgaagctgggccctgctggcactctggcccctgctcagcctgatgggcgttctggtgcagtggagggtgacagctgagggggactcccacacggaagtggtcatcagccggcagcgccgacgcgtgcaactgatgcggattcggcagcaggaagatcgcaaggagaaaaggcggaaaaagagacctcctcgggctcccctcagaggtccccgggctcctcccaggcctgggccaccagatcctgcttatcggcgcaggccagtgcccatcaaacgcttcaatggagacgtcctctccccgagctatatccagagcttccgagaccggcagaccgggagctccctgagctccttcatggcctcacccacagatgcggactatgagtatgggtcccggggacctctgacagcctgctcaggccccccagtgcgggtatagccatatctgtctgtctagactctgcagtcaccagctctgccagctcgaggaggcctgctaggctgccactcagcctcctggctttggctgtccctctccccagcctggagagggctggcctggtcactagaagggaggattgtctcaggcgagtcttggcctgagaggaaagccccctcccaagctcccaagaggctcctgaggaactcggggtgtgaaccccattggggtgtgctcagggttgtgagtgtgttgcccgtgtgtctgtgtgtatgtgtgtgggggtgggcaggcttggaggggacgctgggacccttgccttagatttctgactggtagggtttctccaggctcagccccacctcttcactccctgccaaggtcccatgggccacctcctgcatgtctccgcggaggggctaccttccttcccatcgccctgcctcgcagccagactcatctaagggttcttgtccttgtctatggggcaaactgtagcatccctcaccctggtcccctggcctctgtaaagccaccagcctgagggcagtggcaggagatgggggtgggggggtgctgctctgggctgggttgggaagggagttggggaggggtttaaatgcacggtgcatgtctggtgtctgtcatgccaacctagacacctcatgcttctgtctcccccaccccactctgttttacatcttttataaatgtgccaaactgtaaaaaaaaaacaaaaaaaaaaaaaaaaaaaaaaaaaagaggggggggcgcgcccaaaagattctccccgcggggggccccaggttttggcgcggttccccgcagttttttgtgtgccaaggggggccccataaagggggagctcgaatattatataagccatacgagcacgagtagccccgcactgtttttaacaaacggtctcggggcactgtggggaacanaccatgtgtgtcacngctgtgggggaacccctgtggtgccaacggggacccccttaaacctctccggggggggggggacactactattgtgtggcaacaagaattcccttacaggaaaggattttataaagcctctaaaggggggaaaatcttacaacattttaagaggggttatacaacaggcgga

SEQ ID NO: 276543 - DNA, 2371 bp, Homo sapiens
gctccctccccgcagagcagagccagcggcccgagccgaatccccggagccgcgcctcgattcccctccagcagctgctctgggctgcgcagggttcttgcgctcggcactggagcctcagccgcggccgcagctgtccgacgtgtcactgcaagggccccgcccccggggtggggtctcgggctctcgctaccggagagggaggagaagggggaggttaaaggggaaggacccccggaagtgccccctcctcagtgcgggagagggagacgccgggggcggagtcccctgcctcccgcggcgtggttggtgcgtcccaggtgacgtcagaagcagcccgcccctgcctggatggtgcgccctgagtgacgtcaggagcagaggccggagctgtccatcagcaccaaaggccgcgggcgggctcagggcatggggccgcggttctggggcggcccgagccccggctcctgcgccttccccttcctcaggcccagcccgagttcccggacgccgcgggactggagtgccagccggtgttggacgtggagcggcgccgccaccgcgccgacaccattctctccggcccagcagcccccttcctcgcacgacggactttccctggaccccagtcagttggagcctctggcgccccgcaaccccggcccctcgggcctctgcacagcctctttcactcagaagctcaggtcgcctccagcccaggttaacttgggagggtgactcccttctattcccagcactatgccggggactgtggcaacactgcggttccagctgctgccccctgagccagatgatgccttctggggtgcaccttgtgaacagcccctggagcgcaggtaccaggcactgccggccctcgtctgcatcatgtgctgtttgtttggagtcgtctactgcttcttcggttaccgctgcttcaaggcagtgctcttcctcactgggttgctgtttggctcggtggtcatcttcctcctctgctaccgagagcgggtgctagagacacagctgagtgctggggcgagcgcgggcatcgctctgggcatcgggctgctctgcgggctggtggccatgctagtgcgcagcgtgggcctcttcctggtggggctgctgctcggcctgctgctcgcagctgctgccctgctgggctccgcaccctactaccagccaggctccgtgtggggtccactggggctgttgctggggggcggcctgctctgtgccctgctcactctgcgctggccccgcccactcaccaccctggccaccgccgtgactggtgctgcgctgatcgccactgccgctgactacttcgccgagctgctactgctggggcgctacgtggtggagcgactccgggctgctcctgtgcccccactctgctggcgaagctgggccctgctggcactctggcccctgctcagcctgatgggcgttctggtgcagtggagggtgacagctgagggggactcccacacggaagtggtcatcagccggcagcgccgacgcgtgcaactgatgcggattcggcagcaggaagatcgcaaggagaaaaggcggaaaaagagacctctgacagcctgctcaggccccccagtgcgggtatagccatatctgtctgtctagactctgcagtcaccagctctgccagctcgaggaggcctgctaggctgccactcagcctcctggctttggctgtccctctccccagcctggagagggctggcctggtcactagaagggaggattgtctcaggcgagtcttggcctgagaggaaagccccctcccaagctcccaagaggctcctgaggaactcggggtgtgaaccccattggggtgtgctcagggttgtgagtgtgttgcccgtgtgtctgtgtgtatgtgtgtgggggtgggcaggcttggaggggacgctgggacccttgccttagatttctgactggtagggtttctccaggctcagccccacctcttcactccctgccaaggtcccatgggccacctcctgcatgtctccgcggaggggctaccttccttcccatcgccctgcctcgcagccagactcatctaagggttcttgtccttgtctatggggcaaactgtagcatccctcaccctggtcccctggcctctgtaaagccaccagcctgagggcagtggcaggagatgggggtgggggggtgctgctctgggctgggttgggaagggagttggggaggggtttaaatgcacggtgcatgtctggtgtctgtcatgccaacctagacacctcatgcttctgtctcccccaccccactctgttttacatcttttataaatgtgccaaactgtgtggcctctgccaggaatggt

SEQ ID NO: 276544 - DNA, 403 bp, Homo sapiens
gataatcaaacttttaaaactatagctagatggggtgcagtggctcacacttgtaatcacagcactttgggaggctgaggcaggaggatcacttgaagccaggagcttgagaccagcctgggcaacaaagcgagaacctgtctctattaataattttttaaaataaataaaaattggaggagccaagatggccgaataggaacagctccggtctacagctcccagcgtgaccgacgcagaagatgggtgatttctgcatttccatctgaggtaccgggttcatctcactagggagtgccagacagtgggcgcaggccagtgggtgcgcgcacggtgcgggagccgaagcagggcgaggcattgcctcacctgggaagcgcaaggggtcagggagttccctttc

SEQ ID NO: 276545 - DNA, 697 bp, Homo sapiens
ctcccgcccacgttgccttccgggcccgtgcgctccctggctgcttccccctgccgtcagcccgcctgccgggtggaggcgtctagtggcgtcctgagccccccgggggccgctcagtgacaggggctgccccgagctggagggggatccagcgaccaaaccagaggatgcactgaccgcccctcccccccaggcccaaccctccacctggcctcagtcccggggttcctggcgggctgtgcggggcgggggcgcgtcggcgggggcagcttgcgagggtcgttggcccctggaggccgaggggcatggcgccagcacgtctgagccggtgcccgtgtctgtccgtgtctgtaggctcgggcgacatggacgggttgccgaagagttcccccggcgccgtggccggcctgagcaacgccccgggcaccccgcgggacgacggcgagatggcggccgccgggaccttcctgcacccgttcccgagcgaaagctactcgccagggatgaccatgagcgtgtgatggggcggcagccccgggcctctctgcgggcctaggcttctgcccagcgcccctgctcagggcgaggggctgaggtcacacctcgggcacctggactcctggccaatcaaggcttgcccagctgggaggccccacacgaaagactcttaccattttattaaaaacgcaaggacctc

SEQ ID NO: 276546 - DNA, 377 bp, Homo sapiens
tcgaattcaagcttctaacgatgtacggggatactcgccagggatgaccatgagcgtgtgatggggcggcagccccgggcctctctgcgggcctaggcttctgcccagcgcccctgctcagggcgaggggctgaggtcacacctcgggcacctggactcctggccaatcaaggcttgcccagctgggaggccccacacgaaagactcttaccattttattaaaaacgcaaggacctcagagacgttcttttctgtatggacccttcctgccatttgtattttgtcccagagagaaaggctctttggggggcccctctccccaggacgtcagggggtggggcccataaataaatggaagctggttttggtttttggta

SEQ ID NO: 276547 - DNA, 1087 bp, Homo sapiens
ggcgggaggaggggagcgcgcgtttcccggaacagcccgcgcggaggaaagggaggaaaaaaagccaccctgcggccggggccggagctggagccgccgctgccgccgccgccgcggccgtctggagctcccccgcgcggacgatgcctgccgtgcccgcctggggctcggggcggtgaggcccggggcgcggggtagctatggcgacggcaagcgcggcccgcggcgccgcctgacaggtgtgggccccggcggcggcggcgtggagcagcatgtacgccaaggggggcaagggttcggccgtgccctccgacagccaggcccgcgagaagttggcgctgtacgtttatgagtacctgctgcacatcggtgcccagaagtcagcccagaccttcctgtctgagcgtcttctgggacctgtactgcgcggcgcctgacagaagagaggcctgcgagcactccggcgaggccaaggccttccaggactatagtgctgcagccgcccccagccccgttatggggagtatggccccaggtgacacaatggccgcaggctccatggcggctggcttcttccagcccttcatgtcaccgcgcttcccagggggcccccggcccaccctgcggatgccgagtcagagctatggaggtggcatgcgacccccacccaactccctcgccggcccaggcctgcctgccatgaacatgggcccaggagttcgtggcccgtgggccagccccagtggaaactcgatcccctactcctcctcattccccgggagctacaccgggaccccaggaggatggttgggccccctgggaacacccatcatgcctagcccttggagaattccaccaaataccgagcgaaacagcatgttcacttattcatgtaacccccaattcgtggacaaggacgcccggtcaggtgccctaagtttcccccgtcttcgtgccccctgtccctgggaaggggcccccagtggtcggcctagaagccgcgaatggggacgccatcacgcaccgttaaacgggatcccgtgtggactcgggtggacatagaacggccttgccgaaaagttccccg

SEQ ID NO: 276548 - DNA, 1796 bp, Homo sapiens
ggcgggaggaggggagcgcgcgtttcccggaacagcccgcgcggaggaaagggaggaaaaaaagccaccctgcggccggggccggagctggagccgccgctgccgccgccgccgcggccgtctggagctcccccgcgcggacgatgcctgccgtgcccgcctggggctcggggcggtgaggcccggggcgcggggtagctatggcgacggcaagcgcggcccgcggcgccgcctgacaggtgtgggccccggcggcggcggcgtggagcagcatgtacgccaaggggggcaagggttcggccgtgccctccgacagccaggcccgcgagaagttggcgctgtacgtttatgagtacctgctgcacatcggtgcccagaagtcagcccagaccttcctgtctgagatccgatgggagaagaacatcacgctgggggagccccctgggttcctgcactcctggtggtgcgtcttctgggacctgtactgcgcggcgcctgacagaagagaggcctgcgagcactccggcgaggccaaggccttccaggactatagtgctgcagccgcccccagccccgttatggggagtatggccccaggtgacacaatggccgcaggctccatggcggctggcttcttccagcccttcatgtcaccgcgcttcccagggggcccccggcccaccctgcggatgccgagtcagcctcccgcaggcctccctggctcccagcccctcctccctggcgccatggagccctccccacgagcccaggggcatccgagcatgggcggcccaatgcagagggtgacgcctcctcgtggcatggccagcgtggggccccagagctatggaggtggcatgcgacccccacccaactccctcgccggcccaggcctgcctgccatgaacatgggcccaggagttcgtggcccgtgggccagccccagtggaaactcgatcccctactcctcctcatcccccggcagctacaccggacccccaggaggaggtgggccccctggaacacccatcatgcctagccctggagattccaccaactccagcgaaaacatgtacactatcatgaaccccatcgggcagggcgccggcagggctaatttcccgctcggccctggcccggagggccccatggccgccatgagcgcgatggagcctcaccacgtgaacggatccctgggctcgggcgacatggacgggttgccgaagagttcccccggcgccgtggccggcctgagcaacgccccgggcaccccgcgggacgacggcgagatggcggccgccgggaccttcctgcacccgttcccgagcgaaagcgtaagcgactgcgtcgactccccccccgcggcggcgtcgggccggaggggcctggcgggcaggccccggcggggcggccggggggccagagcaagaccgtgaccgcggcgggccagtactcgccagggatgaccatgagcgtgtgatggggcggcagccccgggcctctctgcgggcctaggcttctgcccagcgcccctgctcagggcgaggggctgaggtcacacctcgggcacctggactcctggccaatcaaggcttgcccagctgggaggccccacacgaaagactcttaccattttattaaaaacgcaaggacctcagagacgttcttttctgtatggacccttcctgccatttgtattttgtcccagagagaaaggctctttggggggcccctctccccaggacgtcagggggtggggcccataaataaatggaagctggttttggtttttggta

SEQ ID NO: 276549 - DNA, 2084 bp, Homo sapiens
ggcgggaggaggggagcgcgcgtttcccggaacagcccgcgcggaggaaagggaggaaaaaaagccaccctgcggccggggccggagctggagccgccgctgccgccgccgccgcggccgtctggagctcccccgcgcggacgatgcctgccgtgcccgcctggggctcggggcggtgaggcccggggcgcggggtagctatggcgacggcaagcgcggcccgcggcgccgcctgacaggtgtgggccccggcggcggcggcgtggagcagcatgtacgccaaggggggcaagggttcggccgtgccctccgacagccaggcccgcgagaagttggcgctgtacgtttatgagtacctgctgcacatcggtgcccagaagtcagcccagaccttcctgtctgagatccgatgggagaagaacatcacgctgggggagccccctgggttcctgcactcctggtggtgcgtcttctgggacctgtactgcgcggcgcctgacagaagagaggcctgcgagcactccggcgaggccaaggccttccaggactatagtgctgcagccgcccccagccccgttatggggagtatggccccaggtgacacaatggccgcaggctccatggcggctggcttcttccagcccttcatgtcaccgcgcttcccagggggcccccggcccaccctgcggatgccgagtcagcctcccgcaggcctccctggctcccagcccctcctccctggcgccatggagccctccccacgagcccaggggcatccgagcatgggcggcccaatgcagagggtgacgcctcctcgtggcatggccagcgtggggccccagagctatggaggtggcatgcgacccccacccaactccctcgccggcccaggcctgcctgccatgaacatgggcccaggagttcgtggcccgtgggccagccccagtggaaactcgatcccctactcctcctcatcccccggcagctacaccggacccccaggaggaggtgggccccctggaacacccatcatgcctagccctggagattccaccaactccagcgaaaacatgtacactatcatgaaccccatcgggcagggcgccggcagggctaatttcccgctcggccctggcccggagggccccatggccgccatgagcgcgatggagcctcaccacgtgaacggatccctgggctcgggcgacatggacgggttgccgaagagttcccccggcgccgtggccggcctgagcaacgccccgggcaccccgcgggacgacggcgagatggcggccgccgggaccttcctgcacccgttcccgagcgaaagcgtaagcgactgcgtcgactccccccccgcggcggcgtcgggccggaggggcctggcgggcaggccccggcggggcggccggggggccagagcaagaccgtgaccgcggcgggccaggtgggggggcggccgcggcatcctttccctctcctcaacctctccccaccccccaccacctcccgctcctatttcaccgtcccgatcccatccgcccccaccccgggacccgcgccccagggcggccttcccatgcatcgcccctcccccgttccctcctgtccccaccccatgtctgcccaggacccagccctgccctgtcccccattgtccctgggggcgggtcccagcctcttccggagctgaactcggcccctgcgcgctgccccctcctctctccgcagtacttactcgccagggatgaccatgagcgtgtgatggggcggcagccccgggcctctctgcgggcctaggcttctgcccagcgcccctgctcagggcgaggggctgaggtcacacctcgggcacctggactcctggccaatcaaggcttgcccagctgggaggccccacacgaaagactcttaccattttattaaaaacgcaaggacctcagagacgttcttttctgtatggacccttcctgccatttgtattttgtcccagagagaaaggctctttggggggcccctctccccaggacgtcagggggtggggcccataaataaatggaagctggttttggtttttggta

SEQ ID NO: 276550 - DNA, 1636 bp, Homo sapiens
tgcggtggcctgtgtttagttgttccaggacggccactgtgagctgggtgtgtggcagtgtatgtgtgtcgctgggcgggctgtatgtgcggtggttcccacccttgctgagtgtgggtagctctgcggggtgagacacccaatgtcactgcctgaggctttatggggctatccgcagtcgttccagcagcggggtacacttttgctgtgtggagcgctatgttgagtgtcgctgcgaatgtgtgtggctgggtgtacaacaatgtgggtggccggctccatttgaggttggcgctgtacgtttatgagtacctgctgcacatcggtgcccagaagtcagcccagaccttcctgtctgagatccgatgggagaagaacatcacgctgggggagccccctgggttcctgcactcctggtggtgcgtcttctgggacctgtactgcgcggcgcctgacagaagagaggcctgcgagcactccggcgaggccaaggccttccaggactatagtgctgcagccgcccccagccccgttatggggagtatggccccaggtgacacaatggccgcaggctccatggcggctggcttcttccagcccttcatgtcaccgcgcttcccagggggcccccggcccaccctgcggatgccgagtcagcctcccgcaggcctccctggctcccagcccctcctccctggcgccatggagccctccccacgagcccaggggcatccgagcatgggcggcccaatgcagagggtgacgcctcctcgtggcatggccagcgtggggccccagagctatggaggtggcatgcgacccccacccaactccctcgccggcccaggcctgcctgccatgaacatgggcccaggagttcgtggcccgtgggccagccccagtggaaactcgatcccctactcctcctcatcccccggcagctacaccggacccccaggaggaggtgggccccctggaacacccatcatgcctagccctggagattccaccaactccagcgaaaacatgtacactatcatgaaccccatcgggcagggcgccggcagggctaatttcccgctcggccctggcccggagggccccatggccgccatgagcgcgatggagcctcaccacgtgaacggatccctgggctcgggcgacatggacgggttgccgaagagttcccccggcgccgtggccggcctgagcaacgccccgggcaccccgcgggacgacggcgagatggcggccgccgggaccttcctgcacccgttcccgagcgaaagctactcgccagggatgaccatgagcgtgtgatggggcggcagccccgggcctctctgcgggcctaggcttctgcccagcgcccctgctcagggcgaggggctgaggtcacacctcgggcacctggactcctggccaatcaaggcttgcccagctgggaggccccacacgaaagactcttaccattttattaaaaacgcaaggacctcagagacgttcttttctgtatggacccttcctgccatttgtattttgtcccagagagaaaggctctttggggggcccctctccccaggacgtcagggggtggggcccataaataaatggaagctggttttggtttttggta

SEQ ID NO: 276551 - DNA, 1656 bp, Homo sapiens
ggcgggaggaggggagcgcgcgtttcccggaacagcccgcgcggaggaaagggaggaaaaaaagccaccctgcggccggggccggagctggagccgccgctgccgccgccgccgcggccgtctggagctcccccgcgcggacgatgcctgccgtgcccgcctggggctcggggcggtgaggcccggggcgcggggtagctatggcgacggcaagcgcggcccgcggcgccgcctgacaggtgtgggccccggcggcggcggcgtggagcagcatgtacgccaaggggggcaagggttcggccgtgccctccgacagccaggcccgcgagaagttggcgctgtacgtttatgagtacctgctgcacatcggtgcccagaagtcagcccagaccttcctgtctgagatccgatgggagaagaacatcacgctgggggagccccctgggttcctgcactcctggtggtgcgtcttctgggacctgtactgcgcggcgcctgacagaagagaggcctgcgagcactccggcgaggccaaggccttccaggactatagtgctgcagccgcccccagccccgttatggggagtatggccccaggtgacacaatggccgcaggctccatggcggctggcttcttccagcccttcatgtcaccgcgcttcccagggggcccccggcccaccctgcggatgccgagtcagcctcccgcaggcctccctggctcccagcccctcctccctggcgccatggagccctccccacgagcccaggggcatccgagcatgggcggcccaatgcagagggtgacgcctcctcgtggcatggccagcgtggggccccagagctatggaggtggcatgcgacccccacccaactccctcgccggcccaggcctgcctgccatgaacatgggcccaggagttcgtggcccgtgggccagccccagtggaaactcgatcccctactcctcctcatcccccggcagctacaccggacccccaggaggaggtgggccccctggaacacccatcatgcctagccctggagattccaccaactccagcgaaaacatgtacactatcatgaaccccatcgggcagggcgccggcagggctaatttcccgctcggccctggcccggagggccccatggccgccatgagcgcgatggagcctcaccacgtgaacggatccctgggctcgggcgacatggacgggttgccgaagagttcccccggcgccgtggccggcctgagcaacgccccgggcaccccgcgggacgacggcgagatggcggccgccgggaccttcctgcacccgttcccgagcgaaagcgtaagcgactgcgtcgactccccccccgcggcggcgtcgggccggaggggcctggcgggcaggccccggcggggcggccggggggccagagcaagaccgtgaccgcggcgggccagtactcgccagggatgaccatgagcgtgtgatggggcggcagccccgggcctctctgcgggcctaggcttctgcccagcgcccctgctcagggcgaggggctgaggtcacacctcgggcacctggactcctggccaatcaaggcttgcccagctgggaggccccacacgaaagactcttaccattttattaaaaacgcaaggacctc

SEQ ID NO: 276552 - DNA, 1418 bp, Homo sapiens
gccgcccaagccctggggtgaccgaatccccgcggggactcgtcatgccgggccgtcgcctccgttgctctcgctctaactgggggcgccttgcccgccgagcctgcacggaggcggccccttcctctctcgccctccgaggcgggggaggggggcggggggggctctgttcgcccctccccggctccctgccgaccttggcgtctccaggaaacgccggagcgcccagcccatcgccatggcaacgcgggccgggccggctcctcttcagggatgattgacgtaggggagtgctgcagccgcccccagccccgttatggggagtatggccccaggtgacacaatggccgcaggctccatggcggctggcttcttccagcccttcatgtcaccgcgcttcccagggggcccccggcccaccctgcggatgccgagtcagcctcccgcaggcctccctggctcccagcccctcctccctggcgccatggagccctccccacgagcccaggggcatccgagcatgggcggcccaatgcagagggtgacgcctcctcgtggcatggccagcgtggggccccagagctatggaggtggcatgcgacccccacccaactccctcgccggcccaggcctgcctgccatgaacatgggcccaggagttcgtggcccgtgggccagccccagtggaaactcgatcccctactcctcctcatcccccggcagctacaccggacccccaggaggaggtgggccccctggaacacccatcatgcctagccctggagattccaccaactccagcgaaaacatgtacactatcatgaaccccatcgggcagggcgccggcagggctaatttcccgctcggccctggcccggagggccccatggccgccatgagcgcgatggagcctcaccacgtgaacggatccctgggctcgggcgacatggacgggttgccgaagagttcccccggcgccgtggccggcctgagcaacgccccgggcaccccgcgggacgacggcgagatggcggccgccgggaccttcctgcacccgttcccgagcgaaagctactcgccagggatgaccatgagcgtgtgatggggcggcagccccgggcctctctgcgggcctaggcttctgcccagcgcccctgctcagggcgaggggctgaggtcacacctcgggcacctggactcctggccaatcaaggcttgcccagctgggaggccccacacgaaagactcttaccattttattaaaaacgcaaggacctcagagacgttcttttctgtatggacccttcctgccatttgtattttgtcccagagagaaaggctctttggggggcccctctccccaggacgtcagggggtggggcccataaataaatggaagctggttttggtttttggta

SEQ ID NO: 276553 - DNA, 1482 bp, Homo sapiens
ggcgggaggaggggagcgcgcgtttcccggaacagcccgcgcggaggaaagggaggaaaaaaagccaccctgcggccggggccggagctggagccgccgctgccgccgccgccgcggccgtctggagctcccccgcgcggacgatgcctgccgtgcccgcctggggctcggggcggtgaggcccggggcgcggggtagctatggcgacggcaagcgcggcccgcggcgccgcctgacaggtgtgggccccggcggcggcggcgtggagcagcatgtacgccaaggggggcaagggttcggccgtgccctccgacagccaggcccgcgagaagttggcgctgtacgtttatgagtacctgctgcacatcggtgcccagaagtcagcccagaccttcctgtctgagatccgatgggagaagaacatcacgctgggggagccccctgggttcctgcactcctggtggtgcgtcttctgggacctgtactgcgcggcgcctgacagaagagaggcctgcgagcactccggcgaggccaaggccttccaggactatagtgctgcagccgcccccagccccgttatggggagtatggccccaggtgacacaatggccgcaggctccatggcggctggcttcttccagcccttcatgtcaccgcgcttcccagggggcccccggcccaccctgcggatgccgagtcagcctcccgcaggcctccctggctcccagcccctcctccctggcgccatggagccctccccacgagcccaggggcatccgagcatgggcggcccaatgcagagggtgacgcctcctcgtggcatggccagcgtggggccccagcatgagcgcgatggagcctcaccacgtgaacggatccctgggctcgggcgacatggacgggttgccgaagagttcccccggcgccgtggccggcctgagcaacgccccgggcaccccgcgggacgacggcgagatggcggccgccgggaccttcctgcacccgttcccgagcgaaagcgtaagcgactgcgtcgactccccccccgcggcggcgtcgggccggaggggcctggcgggcaggccccggcggggcggccggggggccagagcaagaccgtgaccgcggcgggccagtactcgccagggatgaccatgagcgtgtgatggggcggcagccccgggcctctctgcgggcctaggcttctgcccagcgcccctgctcagggcgaggggctgaggtcacacctcgggcacctggactcctggccaatcaaggcttgcccagctgggaggccccacacgaaagactcttaccattttattaaaaacgcaaggacctcagagacgttcttttctgtatggacccttcctgccatttgtattttgtcccagagagaaaggctctttggggggcccctctccccaggacgtcagggggtggggcccataaataaatggaagctggttttggtttttggta

SEQ ID NO: 276554 - DNA, 1264 bp, Homo sapiens
ggcgggaggaggggagcgcgcgtttcccggaacagcccgcgcggaggaaagggaggaaaaaaagccaccctgcggccggggccggagctggagccgccgctgccgccgccgccgcggccgtctggagctcccccgcgcggacgatgcctgccgtgcccgcctggggctcggggcggtgaggcccggggcgcggggtagctatggcgacggcaagcgcggcccgcggcgccgcctgacaggtgtgggccccggcggcggcggcgtggagcagcatgtacgccaaggggggcaagggttcggccgtgccctccgacagccaggcccgcgagaagttggcgctgtacgtttatgagtacctgctgcacatcggtgcccagaagtcagcccagaccttcctgtctgagatccgatgggagaagaacatcacgctgggggagccccctgggttcctgcactcctggtggtgcgtcttctgggacctgtactgcgcggcgcctgacagaagagaggcctgcgagcactccggcgaggccaaggccttccaggactatagtgctgcagccgcccccagccccgttatggggagtatggccccaggtgacacaatggccgcaggctccatggcggctggcttcttccagcccttcatgtcaccgcgcttcccagggggcccccggcccaccctgcggatgccgagtcagcctcccgcaggcctccctggctcccagcccctcctccctggcgccatggagccctccccacgagcccaggggcatccgagcatgggcggcccaatgcagagggtgacgcctcctcgtggcatggccagcgtggggccccagagctatggaggtggcatgcgacccccacccaactccctcgccggcccaggcctgcctgccatgaacatgggcccaggagttcgtggcccgtgggccagccccagtggaaactcgatcccctactcctcctcatcccccggcagctacaccggacccccaggaggaggtgggccccctggaacacccatcatgcctagccctggagattccaccaactccagcgaaaacatgtacactatcatgaaccccatcgggcagggcgccggcagggctaatttcccgctcggccctggcccggagggccccatggccgccatgagcgcgatggagcctcaccacgtgaacggatccctgggctcgggcgacatggacgggttgccgaaggtaaggaggctgcgctcttgccgggggtgggatccggg

SEQ ID NO: 276555 - DNA, 837 bp, Homo sapiens
ctcccgcccacgttgccttccgggcccgtgcgctccctggctgcttccccctgccgtcagcccgcctgccgggtggaggcgtctagtggcgtcctgagccccccgggggccgctcagtgacaggggctgccccgagctggagggggatccagcgaccaaaccagaggatgcactgaccgcccctcccccccaggcccaaccctccacctggcctcagtcccggggttcctggcgggctgtgcggggcgggggcgcgtcggcgggggcagcttgcgagggtcgttggcccctggaggccgaggggcatggcgccagcacgtctgagccggtgcccgtgtctgtccgtgtctgtaggctcgggcgacatggacgggttgccgaagagttcccccggcgccgtggccggcctgagcaacgccccgggcaccccgcgggacgacggcgagatggcggccgccgggaccttcctgcacccgttcccgagcgaaagctactcgccagggatgaccatgagcgtgtgatggggcggcagccccgggcctctctgcgggcctaggcttctgcccagcgcccctgctcagggcgaggggctgaggtcacacctcgggcacctggactcctggccaatcaaggcttgcccagctgggaggccccacacgaaagactcttaccattttattaaaaacgcaaggacctcagagacgttcttttctgtatggacccttcctgccatttgtattttgtcccagagagaaaggctctttggggggcccctctccccaggacgtcagggggtggggcccataaataaatggaagctggttttggtttttggta

SEQ ID NO: 276556 - DNA, 400 bp, Homo sapiens
gcgtttcccggaacagcccgcgcggaggaaagggaggaaaaaaagccaccctgcggccggggccggagctggagccgccgctgccgccgccgccgcggccgtctggagctcccccgcgcggacgatgcctgccgtgcccgcctggggctcggggcggtgaggcccggggcgcggggtagctatggcgacggcaagcgcggcccgcggcgccgcctgacaggtgtgggccccggcggcggcggcgtggagcagcatgtacgccaaggggggcaagggttcggccgtgccctccgacagccaggcccgcgagaagtgagtgcggggccgggggcggggctcggcgtccgcgctcttccgtgggctccggcgcgggcgggcaccgcgcggggcacgtgggcgc

SEQ ID NO: 276557 - DNA, 1746 bp, Homo sapiens
ggcgggaggaggggagcgcgcgtttcccggaacagcccgcgcggaggaaagggaggaaaaaaagccaccctgcggccggggccggagctggagccgccgctgccgccgccgccgcggccgtctggagctcccccgcgcggacgatgcctgccgtgcccgcctggggctcggggcggtgaggcccggggcgcggggtagctatggcgacggcaagcgcggcccgcggcgccgcctgacaggtgtgggccccggcggcggcggcgtggagcagcatgtacgccaaggggggcaagggttcggccgtgccctccgacagccaggcccgcgagaagttggcgctgtacgtttatgagtacctgctgcacatcggtgcccagaagtcagcccagaccttcctgtctgagatccgatgggagaagaacatcacgctgggggagccccctgggttcctgcactcctggtggtgcgtcttctgggacctgtactgcgcggcgcctgacagaagagaggcctgcgagcactccggcgaggccaaggccttccaggactatagtgctgcagccgcccccagccccgttatggggagtatggccccaggtgacacaatggccgcaggctccatggcggctggcttcttccagggcccccccggctcccagccgtccccccacaaccccaacgcccccatgatggggcctcacggtcagcccttcatgtcaccgcgcttcccagggggcccccggcccaccctgcggatgccgagtcagcctcccgcaggcctccctggctcccagcccctcctccctggcgccatggagccctccccacgagcccaggggcatccgagcatgggcggcccaatgcagagggtgacgcctcctcgtggcatggccagcgtggggccccagagctatggaggtggcatgcgacccccacccaactccctcgccggcccaggcctgcctgccatgaacatgggcccaggagttcgtggcccgtgggccagccccagtggaaactcgatcccctactcctcctcatcccccggcagctacaccggacccccaggaggaggtgggccccctggaacacccatcatgcctagccctggagattccaccaactccagcgaaaacatgtacactatcatgaaccccatcgggcagggcgccggcagggctaatttcccgctcggccctggcccggagggccccatggccgccatgagcgcgatggagcctcaccacgtgaacggatccctgggctcgggcgacatggacgggttgccgaagagttcccccggcgccgtggccggcctgagcaacgccccgggcaccccgcgggacgacggcgagatggcggccgccgggaccttcctgcacccgttcccgagcgaaagctactcgccagggatgaccatgagcgtgtgatggggcggcagccccgggcctctctgcgggcctaggcttctgcccagcgcccctgctcagggcgaggggctgaggtcacacctcgggcacctggactcctggccaatcaaggcttgcccagctgggaggccccacacgaaagactcttaccattttattaaaaacgcaaggacctcagagacgttcttttctgtatggacccttcctgccatttgtattttgtcccagagagaaaggctctttggggggcccctctccccaggacgtcagggggtggggcccataaataaatggaagctggttttggtttttggta

SEQ ID NO: 276558 - DNA, 1680 bp, Homo sapiens
ggcgggaggaggggagcgcgcgtttcccggaacagcccgcgcggaggaaagggaggaaaaaaagccaccctgcggccggggccggagctggagccgccgctgccgccgccgccgcggccgtctggagctcccccgcgcggacgatgcctgccgtgcccgcctggggctcggggcggtgaggcccggggcgcggggtagctatggcgacggcaagcgcggcccgcggcgccgcctgacaggtgtgggccccggcggcggcggcgtggagcagcatgtacgccaaggggggcaagggttcggccgtgccctccgacagccaggcccgcgagaagttggcgctgtacgtttatgagtacctgctgcacatcggtgcccagaagtcagcccagaccttcctgtctgagatccgatgggagaagaacatcacgctgggggagccccctgggttcctgcactcctggtggtgcgtcttctgggacctgtactgcgcggcgcctgacagaagagaggcctgcgagcactccggcgaggccaaggccttccaggactatagtgctgcagccgcccccagccccgttatggggagtatggccccaggtgacacaatggccgcaggctccatggcggctggcttcttccagcccttcatgtcaccgcgcttcccagggggcccccggcccaccctgcggatgccgagtcagcctcccgcaggcctccctggctcccagcccctcctccctggcgccatggagccctccccacgagcccaggggcatccgagcatgggcggcccaatgcagagggtgacgcctcctcgtggcatggccagcgtggggccccagagctatggaggtggcatgcgacccccacccaactccctcgccggcccaggcctgcctgccatgaacatgggcccaggagttcgtggcccgtgggccagccccagtggaaactcgatcccctactcctcctcatcccccggcagctacaccggacccccaggaggaggtgggccccctggaacacccatcatgcctagccctggagattccaccaactccagcgaaaacatgtacactatcatgaaccccatcgggcagggcgccggcagggctaatttcccgctcggccctggcccggagggccccatggccgccatgagcgcgatggagcctcaccacgtgaacggatccctgggctcgggcgacatggacgggttgccgaagagttcccccggcgccgtggccggcctgagcaacgccccgggcaccccgcgggacgacggcgagatggcggccgccgggaccttcctgcacccgttcccgagcgaaagctactcgccagggatgaccatgagcgtgtgatggggcggcagccccgggcctctctgcgggcctaggcttctgcccagcgcccctgctcagggcgaggggctgaggtcacacctcgggcacctggactcctggccaatcaaggcttgcccagctgggaggccccacacgaaagactcttaccattttattaaaaacgcaaggacctcagagacgttcttttctgtatggacccttcctgccatttgtattttgtcccagagagaaaggctctttggggggcccctctccccaggacgtcagggggtggggcccataaataaatggaagctggttttggtttttggta

SEQ ID NO: 276559 - DNA, 2057 bp, Homo sapiens
ggcgggaggaggggagcgcgcgtttcccggaacagcccgcgcggaggaaagggaggaaaaaaagccaccctgcggccggggccggagctggagccgccgctgccgccgccgccgcggccgtctggagctcccccgcgcggacgatgcctgccgtgcccgcctggggctcggggcggtgaggcccggggcgcggggtagctatggcgacggcaagcgcggcccgcggcgccgcctgacaggtgtgggccccggcggcggcggcgtggagcagcatgtacgccaaggggggcaagggttcggccgtgccctccgacagccaggcccgcgagaagttggcgctgtacgtttatgagtacctgctgcacatcggtgcccagaagtcagcccagaccttcctgtctgagatccgatgggagaagaacatcacgctgggggagccccctgggttcctgcactcctggtggtgcgtcttctgggacctgtactgcgcggcgcctgacagaagagaggcctgcgagcactccggcgaggccaaggccttccaggactatagtgctgcagccgcccccagccccgttatggggagtatggccccaggtgacacaatggccgcaggctccatggcggctggcttcttccagcccttcatgtcaccgcgcttcccagggggcccccggcccaccctgcggatgccgagtcagcctcccgcaggcctccctggctcccagcccctcctccctggcgccatggagccctccccacgagcccaggggcatccgagcatgggcggcccaatgcagagggtgacgcctcctcgtggcatggccagcgtggggccccagagctatggaggtggcatgcgacccccacccaactccctcgccggcccaggcctgcctgccatgaacatgggcccaggagttcgtggcccgtgggccagccccagtggaaactcgatcccctactcctcctcatcccccggcagctacaccggacccccaggaggaggtgggccccctggaacacccatcatgcctagccctggagattccaccaactccagcgaaaacatgtacactatcatgaaccccatcgggcagggcgccggcagggctaatttcccgctcggccctggcccggagggccccatggccgccatgagcgcgatggagcctcaccacgtgaacggatccctgggctcgggcgacatggacgggttgccgaagagttcccccggcgccgtggccggcctgagcaacgccccgggcaccccgcgggacgacggcgagatggcggccgccgggaccttcctgcacccgttcccgagcgaaagcgtaagcgactgcgtcgactccccccccgcggcggcgtcgggccggaggggcctggcgggcaggccccggcggggcggccggggggccagagcaagaccgtgaccgcggcgggccagtactcgccagggatgaccatgagcgtgtgatggggcggcagccccgggcctctctgcgggcctaggcttctgcccagcgcccctgctcagggcgaggggctgaggtcacacctcgggcacctggactcctggccaatcaaggcttgcccagctgggaggccccacacgaaagactcttaccattttattaaaaacgcaaggacctcagagacgttcttttctgtatggacccttcctgccatttgtattttgtcccagagagaaaggctctttggggggcccctctccccaggacgtcagggggtggggcccataaataaatggaagctggttttggtttttggtagcttgtctcagattccctctttggccttctgccaccacactctccaccctgtggtcttgttccgtccccgcccccatctagccccacctttgagaactgggggcagagcgaggctccaggttctgggctctccctgggagttggggtgatgaccatgggcagaggggatgggactgaagctgggcgctcaagagtcggggaagtagagggaggcagagtcaggtcacaggccccaagaaccccaggtggaaggagggctga

SEQ ID NO: 276560 - DNA, 2357 bp, Homo sapiens
ggcgggaggaggggagcgcgcgtttcccggaacagcccgcgcggaggaaagggaggaaaaaaagccaccctgcggccggggccggagctggagccgccgctgccgccgccgccgcggccgtctggagctcccccgcgcggacgatgcctgccgtgcccgcctggggctcggggcggtgaggcccggggcgcggggtagctatggcgacggcaagcgcggcccgcggcgccgcctgacaggtgtgggccccggcggcggcggcgtggagcagcatgtacgccaaggggggcaagggttcggccgtgccctccgacagccaggcccgcgagaagttggcgctgtacgtttatgagtacctgctgcacatcggtgcccagaagtcagcccagaccttcctgtctgagatccgatgggagaagaacatcacgctgggggagccccctgggttcctgcactcctggtggtgcgtcttctgggacctgtactgcgcggcgcctgacagaagagaggcctgcgagcactccggcgaggccaaggccttccaggactatagtgctgcagccgcccccagccccgttatggggagtatggccccaggtgacacaatggccgcaggctccatggcggctggcttcttccagcccttcatgtcaccgcgcttcccagggggcccccggcccaccctgcggatgccgagtcagcctcccgcaggcctccctggctcccagcccctcctccctggcgccatggagccctccccacgagcccaggggcatccgagcatgggcggcccaatgcagagggtgacgcctcctcgtggcatggccagcgtggggccccagagctatggaggtggcatgcgacccccacccaactccctcgccggcccaggcctgcctgccatgaacatgggcccaggagttcgtggcccgtgggccagccccagtggaaactcgatcccctactcctcctcatcccccggcagctacaccggacccccaggaggaggtgggccccctggaacacccatcatgcctagccctggagattccaccaactccagcgaaaacatgtacactatcatgaaccccatcgggcagggcgccggcagggctaatttcccgctcggccctggcccggagggccccatggccgccatgagcgcgatggagcctcaccacgtgaacggatccctgggctcgggcgacatggacgggttgccgaagagttcccccggcgccgtggccggcctgagcaacgccccgggcaccccgcgggacgacggcgagatggcggccgccgggaccttcctgcacccgttcccgagcgaaagcgtaagcgactgcgtcgactccccccccgcggcggcgtcgggccggaggggcctggcgggcaggccccggcggggcggccggggggccagagcaagaccgtgaccgcggcgggccaggtgggggggcggccgcggcatcctttccctctcctcaacctctccccaccccccaccacctcccgctcctatttcaccgtcccgatcccatccgcccccaccccgggacccgcgccccagggcggccttcccatgcatcgcccctcccccgttccctcctgtccccaccccatgtctgcccaggacccagccctgccctgtcccccattgtccctgggggcgggtcccagcctcttccggagctgaactcggcccctgcgcgctgccccctcctctctccgcagtacttactcgccagggatgaccatgagcgtgtgatggggcggcagccccgggcctctctgcgggcctaggcttctgcccagcgcccctgctcagggcgaggggctgaggtcacacctcgggcacctggactcctggccaatcaaggcttgcccagctgggaggccccacacgaaagactcttaccattttattaaaaacgcaaggacctcagagacgttcttttctgtatggacccttcctgccatttgtattttgtcccagagagaaaggctctttggggggcccctctccccaggacgtcagggggtggggcccataaataaatggaagctggttttggtttttggtaaaaaaaaaaaaaaaaaaaaaaaaaaaaaaaaaaaagaaaaaaaaaaaaaaaaaaaaagaaaaaaaaaaaaaaaataaacgaagcgaggagataattatgtgtgcgggcgggggagaaaaagagagaattgaagaaaagagagggacggtgggtacaaaagtgtggttgggcggaaaccacattttgtgggagaaagagggggaaaattgagggggctcccacgaagagaggggtataagtcagagaagaggcgtgacgctttaaaagtgggta

SEQ ID NO: 276561 - DNA, 1524 bp, Homo sapiens
ggcgggaggaggggagcgcgcgtttcccggaacagcccgcgcggaggaaagggaggaaaaaaagccaccctgcggccggggccggagctggagccgccgctgccgccgccgccgcggccgtctggagctcccccgcgcggacgatgcctgccgtgcccgcctggggctcggggcggttggcgctgtacgtttatgagtacctgctgcacatcggtgcccagaagtcagcccagaccttcctgtctgagatccgatgggagaagaacatcacgctgggggagccccctgggttcctgcactcctggtggtgcgtcttctgggacctgtactgcgcggcgcctgacagaagagaggcctgcgagcactccggcgaggccaaggccttccaggactatagtgctgcagccgcccccagccccgttatggggagtatggccccaggtgacacaatggccgcaggctccatggcggctggcttcttccagcccttcatgtcaccgcgcttcccagggggcccccggcccaccctgcggatgccgagtcagcctcccgcaggcctccctggctcccagcccctcctccctggcgccatggagccctccccacgagcccaggggcatccgagcatgggcggcccaatgcagagggtgacgcctcctcgtggcatggccagcgtggggccccagagctatggaggtggcatgcgacccccacccaactccctcgccggcccaggcctgcctgccatgaacatgggcccaggagttcgtggcccgtgggccagccccagtggaaactcgatcccctactcctcctcatcccccggcagctacaccggacccccaggaggaggtgggccccctggaacacccatcatgcctagccctggagattccaccaactccagcgaaaacatgtacactatcatgaaccccatcgggcagggcgccggcagggctaatttcccgctcggccctggcccggagggccccatggccgccatgagcgcgatggagcctcaccacgtgaacggatccctgggctcgggcgacatggacgggttgccgaagagttcccccggcgccgtggccggcctgagcaacgccccgggcaccccgcgggacgacggcgagatggcggccgccgggaccttcctgcacccgttcccgagcgaaagctactcgccagggatgaccatgagcgtgtgatggggcggcagccccgggcctctctgcgggcctaggcttctgcccagcgcccctgctcagggcgaggggctgaggtcacacctcgggcacctggactcctggccaatcaaggcttgcccagctgggaggccccacacgaaagactcttaccattttattaaaaacgcaaggacctcagagacgttcttttctgtatggacccttcctgccatttgtattttgtcccagagagaaaggctctttggggggcccctctccccaggacgtcagggggtggggcccataaataaatggaagctggttttggtttttggta

SEQ ID NO: 276562 - DNA, 820 bp, Homo sapiens
gagttgccagtcagccaggggaagaaggccttgaaacaagaaaaccagcagacacacaagaactcccaaagggttaggaaggaaacagatggaatgtgtgggcctccactctcaggggtctgaggaggagtctacgccagcacagggttgggcaggctgagcacatggcagatgtgtcagaaagcaactgccttttgttctgaaatggtgtttgtcattatttgaggatgttaacatgtccaaatgtccattttgaaatgaattcgtataaaataaaaacattgctgtgaaaagctcacagtccagggtctgtctttccttccttctctcctcccttccttcctttctataaattgtcatgggctgtgaaatgtgagatgctggtctccactcatctggttccagcttctcatctgacagatgtggttcctgagcccagtggccagccagaccttagccaccatcacatgcccctaactgtcctctgccccattttccctgcagatgacatgcaccaggctccccaaccctcaccacaagccctgagggccctggatagcctaggagtctagaaacctgggcctaagattagactggaccaagttgatcctgtttccgccatttatgtgctgtgtgaccttgagcaagtgaattaacctctctgaacctttgttgccttgtctgtaaaatgagaatgataggccgggtgtggtggctcatgtatgtaatcccagcactttgggaagctgaggtgggaggatcccttgagtccaggagttcgagaccagcctgggcaacatagcaagatcccatctgtata

SEQ ID NO: 276563 - DNA, 723 bp, Homo sapiens
gatttttaaagatggtcttttcccaatttgtggaaatgttttaacagaatgctctcaatatttttcgcccatgtgattcttagattcatgtgaatctaacacaacgtatctgatactgttcccaacaggaaccagggtggcagggctagatgtcctctcaccagactgcccagtgaaggtgctgtcactttgatgaattatcaaggctttgtagtgggtcttctactggacaaaggacaaactggagactccctggatcaaatgtgttggtgaggcactgaatctgattgctgaaaggtgattcagctgcaagttaggcatcagtttagggttttctaggcttggcatctaaagggagtgcctgctgtagctgaaaacctcataggccttctcttccttccgaattgttttcaaggccttgggggtacagagacttagagaaaatacatagttgtgcctcagactgatgggcctcatctgtttaatggagaaacaccaagcacactcagtctgggcggaattttagagctccatagtataaccactatctagctacatgtggcaattgagcatttgaaatgtggctagactgaattgaaatgtgctgtataaaatatacacttaatttcaaagacaatatttttaaaatgtaaaatatttcagtaatttaaaaatatggtttaaatattttagatatgttgggttaaataaaatatattagta

SEQ ID NO: 276564 - DNA, 743 bp, Homo sapiens
tccagtaggtcactggccagacaggtgagtatgaaataggacaacactgtattatagctcaggatgcattgataatagaagtttgaagcagcagctgacagacgagtctaagcaataacacacagactagtttgtctctgctcttgagaacagcagcctgcaacccttcaaacaagccataatgtgtgagtcaacaagaagctacatttgattgacaatgccattttaataaagatgttctagagtcaaagaatttggcgtgagaaattgtgcccaggctggggtgcagtggtgtgatcatagctcactgcggcctctgagctcctgggctcaagggatccccctgccttagcctctgaagtagctgggactacaggcatgcaccactgtgcccagctagtttttaatttttttttaaagatggggtctcattatgtttcccaggctggtctcgaactcctggcttcaagtgatcctcccaccttggactccgaaagtgctgggatgtgctcaatattaaatgtcatgaagatactgttaaaataataattgtgctcaatagttgtatctttatactattctgagccttaggtttcttttctgtaaaactgaacaatactaccttctttgcaggggatagcatagtccctggtttacagtaaatgctttcctccaattgaatcaagatatacctctctgctacctccccatctattagaaatgcttgccttctggtaccagaa

SEQ ID NO: 276565 - DNA, 1369 bp, Homo sapiens
ctggtgcccgccttggcctagccccggccccgggacggaagggggcctctggggtggcagcctgggcccagtagagctttgcatctcttggatatctttcccgggcgcagaagctgcggggcttagggagtcgccattgcgctggaaagtcctcccgcccacggagaccccagcaaactccgagtgtcacacagtcgcctctggcgacccgtgcgggccggagccgttcgcgcacaggcagggcgggtgctgagcgtggaaacggggctggaattggccgagccatgcctttccgggatgcccaccgccagtcaaagggttgggggtggtctctgcaccttaagtactaacctgccgcccacgcgcctcctgaccacagcaccccgtcggctttctaattctgtgagctgccctcgtgggcgtggcctccctgtggagctccccatgtgcctccccttggtccagcctgcagctaggaagtgggtcacagcgacggggctgggctgggccaggccaggctccgggagatgtggaattggcgaaacaactgccccagtagtatcctccgcctaggactccaagaggtggcgaattggggcactacgcccgggaaccagggtggcagggctagatgtcctctcaccagactgcccagtgaaggtgctgtcactttgatgaattatcaaggctttgtagtgggtcttctactggacaaaggacaaactggagactccctggatcaaatgtgttgaaaatgttatagtgctgtcaggaagtgctgttctggaatacagaatgtggctgccgtgagtggagtgtgactatgagatagtcgcctgactggagacaatgaagcctcaggccaaggatgctccctcctactcagccctgtttagtgggatttttcagcccactgtaaagcctactgctgcctgtaaagccacctaagtgcatcacttgctggtgttcaccatgataacaacaatttatggggacagaatatgtttctagagctgctggtgccactgctgatgttactgggttccctgaaataaaacaccacagtgcaggctggtctcgaactcctggcttcaagtgatcctcccaccttggactccgaaagtgctgggatgtgctcaatattaaatgtcatgaagatactgttaaaataataattgtgctcaatagttgtatctttatactattctgagccttaggtttcttttctgtaaaactgaacaatactaccttctttgcaggggatagcatagtccctggtttacagtaaatgctttcctccaattgaatcaagatatacctctctgctacctccccatctattagaaatgcttgccttctggtaccagaa

SEQ ID NO: 276566 - DNA, 1166 bp, Homo sapiens
ctggtgcccgccttggcctagccccggccccgggacggaagggggcctctggggtggcagcctgggcccagtagagctttgcatctcttggatatctttcccgggcgcagaagctgcggggcttagggagtcgccattgcgctggaaagtcctcccgcccacggagaccccagcaaactccgagtgtcacacagtcgcctctggcgacccgtgcgggccggagccgttcgcgcacaggcagggcgggtgctgagcgtggaaacggggctggaattggccgagccatgcctttccgggatgcccaccgccagtcaaagggttgggggtggtctctgcaccttaagtactaacctgccgcccacgcgcctcctgaccacagcaccccgtcggctttctaattctgtgagctgccctcgtgggcgtggcctccctgtggagctccccatgtgcctccccttggtccagcctgcagctaggaagtgggtcacagcgacggggctgggctgggccaggccaggctccgggagatgtggaattggcgaaacaactgccccagtagtatcctccgcctaggactccaagaggtggcgaattggggcactacgcccgggaaccagggtggcagggctagatgtcctctcaccagactgcccagtgaaggtgctgtcactttgatgaattatcaaggctttgtagtgggtcttctactggacaaaggacaaactggagactccctggatcaaatgtgttgaaaatgttatagtgctgtcaggaagtgctgttctggaatacagaatgtggctgccgtgagtggagtgtgactatgagatagtcgcctgactggagacaatgaagcctcaggccaaggatgctccctcctactcagccctgtttagtgggatttttcagcccactgtaaagcctactgctgcctgtaaagccacctaagtgcatcacttgctggtgttcaccatgataacaacaatttatggggacagaatatgtttctagagctgctggtgccactgctgatgttactgggttccctgaaataaaacaccacagtgcagctggacggtactgctgccatctcggctcactgcaacctccctgcctgattctcctgcctcagcctgccgagtgcctgcgattgcaggcgcgcgccg

SEQ ID NO: 276567 - DNA, 399 bp, Homo sapiens
atcaaataacaacttttcagtcagtgacagactgcatatacaaaggtggtctcatacgattataatagagctgaaaaaattcctattgtctctaaagaccttccaggaggacaggatgtgaggtggcatcagtggcactgacaatcctgaccctgtgcaggcctaggctaatgtgtgtggttgtgccttagtttataacaaaaaagtttaaaaagtaaagaaaaaataaagaaaaagaaaaatttaaaaatagaaaaagcttatagaaagaatacaaagaaaaaatattttcatactgctgcacaatgtgtttgtgttttaagtcaaacgttattacaagtcaaaaagtttaggtcgggtgtcgtggttcacgcctgtaatcccagcactttgggaggc

SEQ ID NO: 276568 - DNA, 708 bp, Homo sapiens
tttgtctatcaatttttaaatatttttatcaataatcactcaaaaagaacatgaaaagggattgctgccccaaggccctcccaggctgaatgcacagggaatatgcctccagccgtaggtgaggcctccactcactccatctcctcgcccgccactagcatgtcccatcccatgcagctagtcgggaggagtgcggggtcttggtgaggtccatgccagcagaaaacaaaagaccaaaagctgccaccttgaagtttcttacccggtttaatgttttctttatagccctggagctggacaagaacagagccatagaaactgctcctctcagcttccgaaccctggtaggactgcttggaatcgaagctgctctggaaagcctgataaaatcgctttgtgcagaggagaacaactagttccaaaacagtgaacgtggaggatgaagatgctgcgtggaggaacatgcaattttattcaatataaacatttgctattttctgcttagaaaccacaccctgaagacgtgctgtctatgcagttatggcacattatatggaaactctcatgacatgaaaaataaatacaactagttaagtataaaatgccaaataaaagtgacacgtacaatgtggtttataaaaataagcttaacatctgagaaaatgtaccaagtggttgtgtgtcctcagatgtgtggggaggatccat

SEQ ID NO: 276569 - DNA, 1674 bp, Homo sapiens
gcctccgtcagctccccctcaacgactgcaaaagagcctaaaccaaaatcccctagtttctattgaacactatcgctgtgtgtaccaattcctggactaggtcggcgtaagagaggaagtaggtgaaaaaaataaagaggcgctcccctccacgtgatcccagccctgcctctttagtgaggcacgcggccgggcggctccaaggctgccggctagggtgagcagcggagcgcttgggcttggagtagcaaagaacgcgctctccagagaaagtatagccactgcttagacagccagggaaacgtgtgcggggaagtggaggactcaggctctcgtgcgagagcggagttggacgtgcagggccgctggggtcacgcggagctctcccgcctcccctccgcgtgagctctgggatggtccgcgccgggagcgcgcgcgaggcttgaagcgcgggtgaagcgcgcaggtcggagtgacagctgcgctgccggcccggctgcggtcagcaacgcgccatggacgcagagctggcagaggtgcgcgccttgcaagctgagatcgcggccctgcggcgagcgtgtgaggacccaccggcgccctgggaagagaagtcccgagtccaaaaatcttttcaagccatacaccaattcaatttggaaggatggaagtcttcaaaagatctgaaaaatcagcttggacatttagaatcagaactttcatttctaagtacgcttactggcatcaatataagaaatcactccaagcagacagaagacctaacaagcactgagatgacagaaaagagtattagaaaagttctacagagacacagattatcaggaaattgccacatggttacatttcaacttgaatttcagattctggaaattcagaataaggagagattatcttctgctgttactgacctcaacataataatggagcccacagaatgctcagaattaagtgaatttgtgtctagagcagaagagagaaaagatctgttcatgtttttccgaagcctgcatttttttgtggagtggtttgaatatcgtaagcgcacgtttaaacatctcaaggaaaagtacccagatgccgtgtacctctcggaggggccctcctcctgctccatggggatccgcagcgccagccggccagggtttgaattagtcattgtttggaggatacaaatagatgaagatgggaaggtttttccaaagctggatcttctcaccaaagtcccacagcgagccctggagctggacaagaacagagccatagaaactgctcctctcagcttccgaaccctggtaggactgcttggaatcgaagctgctctggaaagcctgataaaatcgctttgtgcagaggagaacaactagttccaaaacagtgaacgtggaggatgaagatgctgcgtggaggaacatgcaattttattcaatataaacatttgctattttctgcttagaaaccacaccctgaagacgtgctgtctatgcagttatggcacattatatggaaactctcatgacatgaaaaataaatacaactagttaagtataaaatgccaaataaaagtgacacgtacaatgtggtttataaaaataagcttaacatctgagaaaatgtaccaagtggttgtgtgtcctcagatgtgtggggaggatccat

SEQ ID NO: 276570 - DNA, 904 bp, Homo sapiens
ctccaagtggcactgttttgggagctgtctgtaatccaccaagcgactgaactcatccactgcgagttgtggggcagccatgcttctctacaaggatacagataccaagagaaagaacccattctgcaggtggagaaaaagaggactctggggtctgttacctgagtttccagctgtctcctgagccaggttcagcaccttcctctgtctcgtagcaaatcagcccctggattcagcgagatatcctgagagcctacaagtaactttggctgcccacctgtattctttttcttatttgttattaatttatgttgagactccatctcaaaaaaaaaagttacagaggatgtgcagaggtcatatgcaaatactgtaccattttacagaagggatttggacattcatgaatttcgatatccaccagggtcctggaaccaatcctcctcggataccaagggatgactgtcatttctttagacgaaaggtgccacccacaataaatagaataaggataactgggactttctgtatacagagacctctagtaaaatgctggcccggaccccatccaccgctcaccttctcgggacaaaattcaggattgctctgacgcaatttgctaggtctgcccttgataacagcatagcaaaacattgttatcaccatcacaaagaggaagtaactggtgtgcatgagatgcaaatttattaatgaacggtcatcctaaataaagaagagaaaaaaaatcagaaacatctgctctgagtgactgaaaggttttaatgctgggttttgagagacaggattgacagcctccagacttgccacaacttttcttcttaagctgcaagaggaggtttctccttttgcctcctaaatgaccaaagctgggtctcattaagtg

SEQ ID NO: 276571 - DNA, 711 bp, Homo sapiens
gcttgcgactgtaatcccagctcctcgggaggctgaggtgggagaactgcttgaacctgggaggcggaggctgcagtgagccaagatagtgccactgcactccagcctgggagacagagcgagactccatctcaaaaaaaaaagttacagaggatgtgcagaggtcatatgcaaatactgtaccattttacagaagggatttggacattcatgaatttcgatatccaccagggtcctggaaccaatcctcctcggataccaagggatgactgtcatttctttagacgaaaggtgccacccacaataaatagaataaggataactgggactttctgtatacagagacctctagtaaaatgctggcccggaccccatccaccgctcaccttctcgggacaaaattcaggattgctctgacgcaatttgctaggtctgcccttgataacagcatagcaaaacattgttatcaccatcacaaagaggaagtaactggtgtgcatgagatgcaaatttattaatgaacggtcatcctaaataaagaagagaaaaaaaatcagaaacatctgctctgagtgactgaaaggttttaatgctgggttttgagagacaggattgacagcctccagacttgccacaacttttcttcttaagctgcaagaggaggtttctccttttgcctcctaaatgaccaaagctgggtctcattaagtg

SEQ ID NO: 276572 - DNA, 174 bp, Homo sapiens
gcaggtgatctaaggatcccgagggaacttttgctgaggttttctctgaggtttttttgatgctttataggaaactattttttaaaaaaagccatttcccacccaaggacacagtggatgtgttttccctgactccagcagggttaccgatgctcgacattctgtcatcatggt

SEQ ID NO: 276573 - DNA, 4694 bp, Homo sapiens
tccaagctgaattcgcggccgcgtcgaccacgccggccctgggcagtgacggggttcgggtgaccatggacagtgcgctcaccgcccgtgacagggtgggggtgcaggatttcgtgctgctggagaacttcaccagcgaggccgccttcatcgagaacctacggcggcgatttcgggagaatctcatctacacctacattggccccgtcctggtctctgtcaatccctaccgggacctgcagatctacagccggcaacatatggagcgttaccgtggcgtcagcttctatgaagtgccccctcacctgtttgccgtggcggacactgtgtaccgagcactgcgcacggagcgtcgggaccaggctgtgatgatctctggggagagcggggcaggcaagaccgaagccaccaagaagctgctgcagttctatgcagagacctgcccagccccccaacgcggaggtgccgtgcgggaccggctgctacagagcaacccggtgctggaggcctttggaaatgccaagaccctccggaacgataactccagcaggttcgggaagtacatggatgtgcagtttgacttcaagggtgcccccgtgggtggccacatcctcagttacctcctggaaaagtcacgagtggtgcaccagaatcatggggagcggaacttccacatcttctaccagctgctggaggggggcgaggaagaaactcttcgcaggctgggcttggaacggaacccccagagctacctgtacctggtgaagggccagtgtgccaaagtctcctccatcaacgacaagagtgactggaaggtcgtcaggaaggctctgacagtcattgatttcaccgaggatgaagtggaggacctgctaagcatcgtggccagcgtccttcatttgggcaacatccactttgctgccaacgaggacagcaatgcccaggtcaccaccgagaaccagctcaagtatctgaccaggctcctcagcgtggaaggctcgacgctgcgagaagccctgacacacaggaagatcatcgccaagggggaagagctcctgagcccgctgaacctggaacaggccgcgtacgcacgaaacgccctcgccaaggctgtgtacagccgcacttttacctggctcgtcgggaaaatcaacaggtcgctggcctccaaggacgtggagagccccagctggcggagcaccacggttctcgggctcctggatatttatggcttcgaagtgtttcagcataacagctttgagcagttctgcatcaattactgcaacgaaaagctgcagcagctcttcatcgaactcccgctcaagtcggagcaggaggaatacgaggcagagggcatcgcgtgggaacccgtccagtatttcaacaacaaaatcatctgtgatctggtggaggagaagtttaagggcatcatctcgattttggatgaggagtgtctgcgcccgggggaggccacagacctgaccttcctggagaagctggaggatactgtcaagcaccatccacacttcctgacgcacaagctggctgaccagaggaccaggaaatctctgggccgaggggaattccgccttctgcactatgcgggggaggtgacctacagcgtgaccgggtttctggacaaaaacaatgaccttctcttccggaaccttaaggagaccatgtgtagctcaaagaatcccattatgagccagtgcttcgaccggagcgagctcagtgacaagaagcggccagagacggtcgccacccagttcaagatgagcctcctgcagctggtggagatcctgcagtctaaggagcccgcctacgtccgctgcatcaaacccaatgatgccaaacagcccggccgctttgacgaggtgctgatccgccaccaggtgaagtacctggggctgttggaaaacctgcgtgtgcgcagagctggctttgcctatcgccgcaaatacgaagctttcctgcaaaggtacaagtcactgtgcccagagacgtggcccacgtgggcaggacggccgcaggatggggtggctgtgctggtccgacacctgggctacaagccagaagagtacaagatgggcaggaccaagatcttcatccgcttccccaagaccctgtttgccacagaggatgccctggaggtccggcggcagagcctggccacaaagatccaagctgcctggaggggctttcactggcggcagaaattcctccgggtgaagagatcagccatctgcatccagtcgtggtggcgtggaacactgggccggaggaaggcagccaagaggaagtgggcggcacagaccatccggcggctcatccgaggcttcatcctgcgccacgccccccgctgccccgagaacgccttcttcttggaccatgtgcgcacgtcttttttgctaaacctgaggcggcagctgccccggaatgtcctggacacctcgtggcccacgcccccacctgccctgcgtgaggcctcagagcttctgcgggagttgtgcataaagaacatggtgtggaaatactgccggagtatcagccctgagtggaagcagcagctgcagcagaaggccgtggctagtgagatcttcaagggcaagaaggataattaccctcagagtgtacccaggctcttcatcagcactcggcttggtacagatgagatcagcccccgagtgctgcaggccttgggctctgagcccattcagtatgcggtgcctgttgtgaaatacgaccgcaagggctacaagcctcgctcccggcagctgctgctcacgcccaacgccgtcgtcatcgtggaggacgccaaagtcaagcagaggattgattacgccaacctgaccggaatctctgtcagcagcctgagcgacagtctttttgtgcttcatgtacagcgtgcggacaataagcaaaagggagatgtggtgctgcagagtgaccacgtgattgagacgctgaccaagacagccctcagtgccaaccgcgtgaacagcatcaacatcaaccagggcagcatcacgtttgcagggggccccggcagggatggcaccattgacttcacacccggctcggagctgctcatcaccaaggccaagaacgggcacctggctgtggtcgccccacggctgaattctcggtgataaaggcgcccactggaccctcccaacgcccaatgctttgcttttctcctcctccccttcccagttaccaaagactcgaacttccagacagggacccagggacaccccgaagcccacctgcaatctcccacctcctgcccatccctctcttgagggagcagcaggggccaggagctaccccaggagtgggccaggccgggccacagcaataggaaagccagggccagagcgagccatgccagccctactgccgatgccaaatatttgagagaagggaacttttgctgaggttttctctgaggtttttttgatgctttataggaaactattttttaaaaaaagccatttcccacccaaggacacagtggatgtgttttccctgactccagcagggcaaggaatgtagccgagaggttgtgtgggctgggctctggtgccctcttccctggccaggacacctctcctcctgattcccttggcaccttgtctttctgtctgtttacctgtctccctgcctgcccatctgcatcttttgcagcccactctgacttccatctgggggctgagaccacccttgcctgcccccttctttctgccttaagaatgtccttttaggctgggcatggtggctcacgcctgtaaccccagcactttgggaggcggagacgggcagataacctgaggtcaggatttcgagaccaacctgacctacatggagaaactccgcctctagtaaaaatacaaaattagccgggcatggtggtgcacgcctctaatcccagctactcgggaggctgaggcaggagaatcacttgaacccgggaagtggaggttgcagtgagccaagagtacaccactgcactccagcctgggcaacagagcgagactccgtcttaaaaaaaaaaaaaaaagaacgcccttttactgtcctcatcatcccagtttgaggcagtgctggagtggggaaggccgtcttagaccatagaggttggaagacgctgagagatcatccagcccagccccttgatgttacagagcagaagacagatgcccaaacaggagaaggcacttgcccacggtcatacggcaggttgccacaaaaccaagatggcagcccttcctcagcgtgcctcactgccactcccagagccagggagccccataaaacccacatcatgtcttaagagtatatctggctccttgaccagcaatcggccctgggagccaccaggtgggaaaagcgcctctgccagagtccaggccttgggatgacagacagcttgcccgcacactcgggccccactcaaggatgtagggccttttctggcccctgacccctccctggcatgggagcgtggggacggggctggccttgggaggagcggcaggggcatcacctccttctgctgcttctccctgctcctaccctcaagggcctgggggctgcccagctgcctctatgcccttctgggggtctcagcccactgctgacacttctgcaatccagagaaacactaaataaagcaatacgtgtttggccaa

SEQ ID NO: 276574 - DNA, 4838 bp, Homo sapiens
  misc_feature (4707)..(4707): n is a, c, g, or t
tccaagctgaattcgcggccgcgtcgaccacgccggccctgggcagtgacggggttcgggtgaccatggacagtgcgctcaccgcccgtgacagggtgggggtgcaggatttcgtgctgctggagaacttcaccagcgaggccgccttcatcgagaacctacggcggcgatttcgggagaatctcatctacacctacattggccccgtcctggtctctgtcaatccctaccgggacctgcagatctacagccggcaacatatggagcgttaccgtggcgtcagcttctatgaagtgccccctcacctgtttgccgtggcggacactgtgtaccgagcactgcgcacggagcgtcgggaccaggctgtgatgatctctggggagagcggggcaggcaagaccgaagccaccaagaagctgctgcagttctatgcagagacctgcccagccccccaacgcggaggtgccgtgcgggaccggctgctacagagcaacccggtgctggaggcctttggaaatgccaagaccctccggaacgataactccagcaggttcgggaagtacatggatgtgcagtttgacttcaagggtgcccccgtgggtggccacatcctcagttacctcctggaaaagtcacgagtggtgcaccagaatcatggggagcggaacttccacatcttctaccagctgctggaggggggcgaggaagaaactcttcgcaggctgggcttggaacggaacccccagagctacctgtacctggtgaagggccagtgtgccaaagtctcctccatcaacgacaagagtgactggaaggtcgtcaggaaggctctgacagtcattgatttcaccgaggatgaagtggaggacctgctaagcatcgtggccagcgtccttcatttgggcaacatccactttgctgccaacgaggacagcaatgcccaggtcaccaccgagaaccagctcaagtatctgaccaggctcctcagcgtggaaggctcgacgctgcgagaagccctgacacacaggaagatcatcgccaagggggaagagctcctgagcccgctgaacctggaacaggccgcgtacgcacgaaacgccctcgccaaggctgtgtacagccgcacttttacctggctcgtcgggaaaatcaacaggtcgctggcctccaaggacgtggagagccccagctggcggagcaccacggttctcgggctcctggatatttatggcttcgaagtgtttcagcataacagctttgagcagttctgcatcaattactgcaacgaaaagctgcagcagctcttcatcgaactcccgctcaagtcggagcaggaggaatacgaggcagagggcatcgcgtgggaacccgtccagtatttcaacaacaaaatcatctgtgatctggtggaggagaagtttaagggcatcatctcgattttggatgaggagtgtctgcgcccgggggaggccacagacctgaccttcctggagaagctggaggatactgtcaagcaccatccacacttcctgacgcacaagctggctgaccagaggaccaggaaatctctgggccgaggggaattccgccttctgcactatgcgggggaggtgacctacagcgtgaccgggtttctggacaaaaacaatgaccttctcttccggaaccttaaggagaccatgtgtagctcaaagaatcccattatgagccagtgcttcgaccggagcgagctcagtgacaagaagcggccagagacggtcgccacccagttcaagatgagcctcctgcagctggtggagatcctgcagtctaaggagcccgcctacgtccgctgcatcaaacccaatgatgccaaacagcccggccgctttgacgaggtgctgatccgccaccaggtgaagtacctggggctgttggaaaacctgcgtgtgcgcagagctggctttgcctatcgccgcaaatacgaagctttcctgcaaaggtacaagtcactgtgcccagagacgtggcccacgtgggcaggacggccgcaggatggggtggctgtgctggtccgacacctgggctacaagccagaagagtacaagatgggcaggaccaagatcttcatccgcttccccaagaccctgtttgccacagaggatgccctggaggtccggcggcagagcctggccacaaagatccaagctgcctggaggggctttcactggcggcagaaattcctccgggtgaagagatcagccatctgcatccagtcgtggtggcgtggaacactgggccggaggaaggcagccaagaggaagtgggcggcacagaccatccggcggctcatccgaggcttcatcctgcgccacgccccccgctgccccgagaacgccttcttcttggaccatgtgcgcacgtcttttttgctaaacctgaggcggcagctgccccggaatgtcctggacacctcgtggcccacgcccccacctgccctgcgtgaggcctcagagcttctgcgggagttgtgcataaagaacatggtgtggaaatactgccggagtatcagccctgagtggaagcagcagctgcagcagaaggccgtggctagtgagatcttcaagggcaagaaggataattaccctcagagtgtacccaggctcttcatcagcactcggcttggtacagatgagatcagcccccgagtgctgcaggccttgggctctgagcccattcagtatgcggtgcctgttgtgaaatacgaccgcaagggctacaagcctcgctcccggcagctgctgctcacgcccaacgccgtcgtcatcgtggaggacgccaaagtcaagcagaggattgattacgccaacctgaccggaatctctgtcagcagcctgagcgacagtctttttgtgcttcatgtacagcgtgcggacaataagcaaaagggagatgtggtgctgcagagtgaccacgtgattgagacgctgaccaagacagccctcagtgccaaccgcgtgaacagcatcaacatcaaccagggcagcatcacgtttgcagggggccccggcagggatggcaccattgacttcacacccggctcggagctgctcatcaccaaggccaagaacgggcacctggctgtggtcgccccacggctgaattctcggtgataaaggcgcccactggaccctcccaacgcccaatgctttgcttttctcctcctccccttcccagttaccaaagactcgaacttccagacagggacccagggacaccccgaagcccacctgcaatctcccacctcctgcccatccctctcttgagggagcagcaggggccaggagctaccccaggagtgggccaggccgggccacagcaataggaaagccagggccagagcgagccatgccagccctactgccgatgccaaatatttgagagaagggaacttttgctgaggttttctctgaggtttttttgatgctttataggaaactattttttaaaaaaagccatttcccacccaaggacacagtggatgtgttttccctgactccagcagggcaaggaatgtagccgagaggttgtgtgggctgggctctggtgccctcttccctggccaggacacctctcctcctgattcccttggcaccttgtctttctgtctgtttacctgtctccctgcctgcccatctgcatcttttgcagcccactctgacttccatctgggggctgagaccacccttgcctgcccccttctttctgccttaagaatgtccttttaggctgggcatggtggctcacgcctgtaaccccagcactttgggaggcggagacgggcagataacctgaggtcaggatttcgagaccaacctgacctacatggagaaactccgcctctagtaaaaatacaaaattagccgggcatggtggtgcacgcctctaatcccagctactcgggaggctgaggcaggagaatcacttgaacccgggaagtggaggttgcagtgagccaagagtacaccactgcactccagcctgggcaacagagcgagactccgtcttaaaaaaaaaaaaaaaagaacgcccttttactgtcctcatcatcccagtttgaggcagtgctggagtggggaaggccgtcttagaccatagaggttggaagacgctgagagatcatccagcccagccccttgatgttacagagcagaagacagatgcccaaacaggagaaggcacttgcccacggtcatacggcaggttgccacaaaaccaagatggcagcccttcctcagcgtgcctcactgccactcccagagccagggagccccataaaacccacatcatgtcttaagagtatatctggctccttgaccagcaatcggccctgggagccaccaggtgggaaaagcgcctctgccagagtccaggccttgggatgacagacagcttgcccgcacactcgggccccactcaaggatgtagggccttttctggcccctgacccctccctggcatgggagcgtggggacggggctggccttgggaggagcggcaggggcatcacctccttctgctgcttctccctgctcctaccctcaagggcctgggggctgcccagctgcctctatgcccttctgggggtctcagcccactgctgacacttctgcaatccagagaaacactaaataaagcaatacgtgtttggccaaaaaaaaaaaacancaaaatgtggggcgccgagaccacaagatttttaaacactctgtggccgcgccagaatgatgacaggctacaggtacagaaacggcataagagtgggttcccaaaaccggcagggtggacaccgagtgtgg

SEQ ID NO: 276575 - DNA, 4806 bp, Homo sapiens
tccaagctgaattcgcggccgcgtcgaccacgccggccctgggcagtgacggggttcgggtgaccatggacagtgcgctcaccgcccgtgacagggtgggggtgcaggatttcgtgctgctggagaacttcaccagcgaggccgccttcatcgagaacctacggcggcgatttcgggagaatctcatctacacctacattggccccgtcctggtctctgtcaatccctaccgggacctgcagatctacagccggcaacatatggagcgttaccgtggcgtcagcttctatgaagtgccccctcacctgtttgccgtggcggacactgtgtaccgagcactgcgcacggagcgtcgggaccaggctgtgatgatctctggggagagcggggcaggcaagaccgaagccaccaagaagctgctgcagttctatgcagagacctgcccagccccccaacgcggaggtgccgtgcgggaccggctgctacagagcaacccggtgctggaggcctttggaaatgccaagaccctccggaacgataactccagcaggttcgggaagtacatggatgtgcagtttgacttcaagggtgcccccgtgggtggccacatcctcagttacctcctggaaaagtcacgagtggtgcaccagaatcatggggagcggaacttccacatcttctaccagctgctggaggggggcgaggaagaaactcttcgcaggctgggcttggaacggaacccccagagctacctgtacctggtgaagggccagtgtgccaaagtctcctccatcaacgacaagagtgactggaaggtcgtcaggaaggctctgacagtcattgatttcaccgaggatgaagtggaggacctgctaagcatcgtggccagcgtccttcatttgggcaacatccactttgctgccaacgaggacagcaatgcccaggtcaccaccgagaaccagctcaagtatctgaccaggctcctcagcgtggaaggctcgacgctgcgagaagccctgacacacaggaagatcatcgccaagggggaagagctcctgagcccgctgaacctggaacaggccgcgtacgcacgaaacgccctcgccaaggctgtgtacagccgcacttttacctggctcgtcgggaaaatcaacaggtcgctggcctccaaggacgtggagagccccagctggcggagcaccacggttctcgggctcctggatatttatggcttcgaagtgtttcagcataacagctttgagcagttctgcatcaattactgcaacgaaaagctgcagcagctcttcatcgaactcccgctcaagtcggagcaggaggaatacgaggcagagggcatcgcgtgggaacccgtccagtatttcaacaacaaaatcatctgtgatctggtggaggagaagtttaagggcatcatctcgattttggatgaggagtgtctgcgcccgggggaggccacagacctgaccttcctggagaagctggaggatactgtcaagcaccatccacacttcctgacgcacaagctggctgaccagaggaccaggaaatctctgggccgaggggaattccgccttctgcactatgcgggggaggtgacctacagcgtgaccgggtttctggacaaaaacaatgaccttctcttccggaaccttaaggagaccatgtgtagctcaaagaatcccattatgagccagtgcttcgaccggagcgagctcagtgacaagaagcggccagagacggtcgccacccagttcaagatgagcctcctgcagctggtggagatcctgcagtctaaggagcccgcctacgtccgctgcatcaaacccaatgatgccaaacagcccggccgctttgacgaggtgctgatccgccaccaggtgaagtacctggggctgttggaaaacctgcgtgtgcgcagagctggctttgcctatcgccgcaaatacgaagctttcctgcaaaggtacaagtcactgtgcccagagacgtggcccacgtgggcaggacggccgcaggatggggtggctgtgctggtccgacacctgggctacaagccagaagagtacaagatgggcaggaccaagatcttcatccgcttccccaagaccctgtttgccacagaggatgccctggaggtccggcggcagagcctggccacaaagatccaagctgcctggaggggctttcactggcggcagaaattcctccgggtgaagagatcagccatctgcatccagtcgtggtggcgtggaacactgggccggaggaaggcagccaagaggaagtgggcggcacagaccatccggcggctcatccgaggcttcatcctgcgccacgccccccgctgccccgagaacgccttcttcttggaccatgtgcgcacgtcttttttgctaaacctgaggcggcagctgccccggaatgtcctggacacctcgtggcccacgcccccacctgccctgcgtgaggcctcagagcttctgcgggagttgtgcataaagaacatggtgtggaaatactgccggagtatcagccctgagtggaagcagcagctgcagcagaaggccgtggctagtgagatcttcaagggcaagaaggataattaccctcagagtgtacccaggctcttcatcagcactcggcttggtacagatgagatcagcccccgagtgctgcaggccttgggctctgagcccattcagtatgcggtgcctgttgtgaaatacgaccgcaagggctacaagcctcgctcccggcagctgctgctcacgcccaacgccgtcgtcatcgtggaggacgccaaagtcaagcagaggattgattacgccaacctgaccggaatctctgtcagcagcctgagcgacagtctttttgtgcttcatgtacagcgtgcggacaataagcaaaagggagatgtggtgctgcagagtgaccacgtgattgagacgctgaccaagacagccctcagtgccaaccgcgtgaacagcatcaacatcaaccagggcagcatcacgtttgcagggggccccggcagggatggcaccattgacttcacacccggctcggagctgctcatcaccaaggccaagaacgggcacctggctgtggtcgccccacggctgaattctcggtgataaaggcgcccactggaccctcccaacgcccaatgctttgcttttctcctcctccccttcccagttaccaaagactcgaacttccagacagggacccagggacaccccgaagcccacctgcaatctcccacctcctgcccatccctctcttgagggagcagcaggggccaggagctaccccaggagtgggccaggccgggccacagcaataggaaagccagggccagagcgagccatgccagccctactgccgatgccaaatatttgagagaagggaacttttgctgaggttttctctgaggtttttttgatgctttataggaaactattttttaaaaaaagccatttcccacccaaggacacagtggatgtgttttccctgactccagcagggcaaggaatgtagccgagaggttgtgtgggctgggctctggtgccctcttccctggccaggacacctctcctcctgattcccttggcaccttgtctttctgtctgtttacctgtctccctgcctgcccatctgcatcttttgcagcccactctgacttccatctgggggctgagaccacccttgcctgcccccttctttctgccttaagaatgtccttttaggctgggcatggtggctcacgcctgtaaccccagcactttgggaggcggagacgggcagataacctgaggtcaggatttcgagaccaacctgacctacatggagaaactccgcctctagtaaaaatacaaaattagccgggcatggtggtgcacgcctctaatcccagctactcgggaggctgaggcaggagaatcacttgaacccgggaagtggaggttgcagtgagccaagagtacaccactgcactccagcctgggcaacagagcgagactccgtcttaaaaaaaaaaaaaaaagaacgcccttttactgtcctcatcatcccagtttgaggcagtgctggagtggggaaggccgtcttagaccatagaggttggaagacgctgagagatcatccagcccagccccttgatgttacagagcagaagacagatgcccaaacaggagaaggcacttgcccacggtcatacggcaggttgccacaaaaccaagatggcagcccttcctcagcgtgcctcactgccactcccagagccagggagccccataaaacccacatcatgtcttaagagtatatctggctccttgaccagcaatcggccctgggagccaccaggtgggaaaagcgcctctgccagagtccaggccttgggatgacagacagcttgcccgcacactcgggccccactcaaggatgtagggccttttctggcccctgacccctccctggcatgggagcgtggggacggggctggccttgggaggagcggcaggggcatcacctccttctgctgcttctccctgctcctaccctcaagggcctgggggctgcccagctgcctctatgcccttctgggggtctcagcccactgctgacacttctgcaatccagagaaacactaaataaagcaatacgtgtttggccaatgtggtctccttatgaatattaggaaacgaagagggccccggaaggcaaccaagggcctcgtgttgcaggtttttctcgagacagcctgggcaacagagcgagatccgtctc

SEQ ID NO: 276576 - DNA, 4680 bp, Homo sapiens
tccaagctgaattcgcggccgcgtcgaccacgccggccctgggcagtgacggggttcgggtgaccatggacagtgcgctcaccgcccgtgacagggtgggggtgcaggatttcgtgctgctggagaacttcaccagcgaggccgccttcatcgagaacctacggcggcgatttcgggagaatctcatctacacctacattggccccgtcctggtctctgtcaatccctaccgggacctgcagatctacagccggcaacatatggagcgttaccgtggcgtcagcttctatgaagtgccccctcacctgtttgccgtggcggacactgtgtaccgagcactgcgcacggagcgtcgggaccaggctgtgatgatctctggggagagcggggcaggcaagaccgaagccaccaagaagctgctgcagttctatgcagagacctgcccagccccccaacgcggaggtgccgtgcgggaccggctgctacagagcaacccggtgctggaggcctttggaaatgccaagaccctccggaacgataactccagcaggttcgggaagtacatggatgtgcagtttgacttcaagggtgcccccgtgggtggccacatcctcagttacctcctggaaaagtcacgagtggtgcaccagaatcatggggagcggaacttccacatcttctaccagctgctggaggggggcgaggaagaaactcttcgcaggctgggcttggaacggaacccccagagctacctgtacctggtgaagggccagtgtgccaaagtctcctccatcaacgacaagagtgactggaaggtcgtcaggaaggctctgacagtcattgatttcaccgaggatgaagtggaggacctgctaagcatcgtggccagcgtccttcatttgggcaacatccactttgctgccaacgaggacagcaatgcccaggtcaccaccgagaaccagctcaagtatctgaccaggctcctcagcgtggaaggctcgacgctgcgagaagccctgacacacaggaagatcatcgccaagggggaagagctcctgagcccgctgaacctggaacaggccgcgtacgcacgaaacgccctcgccaaggctgtgtacagccgcacttttacctggctcgtcgggaaaatcaacaggtcgctggcctccaaggacgtggagagccccagctggcggagcaccacggttctcgggctcctggatatttatggcttcgaagtgtttcagcataacagctttgagcagttctgcatcaattactgcaacgaaaagctgcagcagctcttcatcgaactcccgctcaagtcggagcaggaggaatacgaggcagagggcatcgcgtgggaacccgtccagtatttcaacaacaaaatcatctgtgatctggtggaggagaagtttaagggcatcatctcgattttggatgaggagtgtctgcgcccgggggaggccacagacctgaccttcctggagaagctggaggatactgtcaagcaccatccacacttcctgacgcacaagctggctgaccagaggaccaggaaatctctgggccgaggggaattccgccttctgcactatgcgggggaggtgacctacagcgtgaccgggtttctggacaaaaacaatgaccttctcttccggaaccttaaggagaccatgtgtagctcaaagaatcccattatgagccagtgcttcgaccggagcgagctcagtgacaagaagcggccagagacggtcgccacccagttcaagatgagcctcctgcagctggtggagatcctgcagtctaaggagcccgcctacgtccgctgcatcaaacccaatgatgccaaacagcccggccgctttgacgaggtgctgatccgccaccaggtgaagtacctggggctgttggaaaacctgcgtgtgcgcagagctggctttgcctatcgccgcaaatacgaagctttcctgcaaaggtacaagtcactgtgcccagagacgtggcccacgtgggcaggacggccgcaggatggggtggctgtgctggtccgacacctgggctacaagccagaagagtacaagatgggcaggaccaagatcttcatccgcttccccaagaccctgtttgccacagaggatgccctggaggtccggcggcagagcctggccacaaagatccaagctgcctggaggggctttcactggcggcagaaattcctccgggtgaagagatcagccatctgcatccagtcgtggtggcgtggaacactgggccggaggaaggcagccaagaggaagtgggcggcacagaccatccggcggctcatccgaggcttcatcctgcgccacgccccccgctgccccgagaacgccttcttcttggaccatgtgcgcacgtcttttttgctaaacctgaggcggcagctgccccggaatgtcctggacacctcgtggcccacgcccccacctgccctgcgtgaggcctcagagcttctgcgggagttgtgcataaagaacatggtgtggaaatactgccggagtatcagccctgagtggaagcagcagctgcagcagaaggccgtggctagtgagatcttcaagggcaagaaggataattaccctcagagtgtacccaggctcttcatcagcactcggcttggtacagatgagatcagcccccgagtgctgcaggccttgggctctgagcccattcagtatgcggtgcctgttgtgaaatacgaccgcaagggctacaagcctcgctcccggcagctgctgctcacgcccaacgccgtcgtcatcgtggaggacgccaaagtcaagcagaggattgattacgccaacctgaccggaatctctgtcagcagcctgagcgacagtctttttgtgcttcatgtacagcgtgcggacaataagcaaaagggagatgtggtgctgcagagtgaccacgtgattgagacgctgaccaagacagccctcagtgccaaccgcgtgaacagcatcaacatcaaccagggcagcatcacgtttgcagggggccccggcagggatggcaccattgacttcacacccggctcggagctgctcatcaccaaggccaagaacgggcacctggctgtggtcgccccacggctgaattctcggtgataaaggcgcccactggaccctcccaacgcccaatgctttgcttttctcctcctccccttcccagttaccaaagactcgaacttccagacagggacccagggacaccccgaagcccacctgcaatctcccacctcctgcccatccctctcttgagggagcagcaggggccaggagctaccccaggagtgggccaggccgggccacagcaataggaaagccagggccagagcgagccatgccagccctactgccgatgccaaatatttgagagaagggaacttttgctgaggttttctctgaggtttttttgatgctttataggaaactattttttaaaaaaagccatttcccacccaaggacacagtggatgtgttttccctgactccagcagggcaaggaatgtagccgagaggttgtgtgggctgggctctggtgccctcttccctggccaggacacctctcctcctgattcccttggcaccttgtctttctgtctgtttacctgtctccctgcctgcccatctgcatcttttgcagcccactctgacttccatctgggggctgagaccacccttgcctgcccccttctttctgccttaagaatgtccttttaggctgggcatggtggctcacgcctgtaaccccagcactttgggaggcggagacgggcagataacctgaggtcaggatttcgagaccaacctgacctacatggagaaactccgcctctagtaaaaatacaaaattagccgggcatggtggtgcacgcctctaatcccagctactcgggaggctgaggcaggagaatcacttgaacccgggaagtggaggttgcagtgagccaagagtacaccactgcactccagcctgggcaacagagcgagactccgtcttaaaaaaaaaaaaaaaagaacgcccttttactgtcctcatcatcccagtttgaggcagtgctggagtggggaaggccgtcttagaccatagaggttggaagacgctgagagatcatccagcccagccccttgatgttacagagcagaagacagatgcccaaacaggagaaggcacttgcccacggtcatacggcaggttgccacaaaaccaagatggcagcccttcctcagcgtgcctcactgccactcccagagccagggagccccataaaacccacatcatgtcttaagagtatatctggctccttgaccagcaatcggccctgggagccaccaggtgggaaaagcgcctctgccagagtccaggccttgggatgacagacagcttgcccgcacactcgggccccactcaaggatgtagggccttttctggcccctgacccctccctggcatgggagcgtggggacggggctggccttgggaggagcggcaggggcatcacctccttctgctgcttctccctgctcctaccctcaagggcctgggggctgcccagctgcctctatgcccttctgggggtctcagcccactgctgacacttctgcaatccagaagtgttgcagtggctaccgg

SEQ ID NO: 276577 - DNA, 2004 bp, Homo sapiens
cgcccaacgccgggagcgaggcttgtagcccttgcggtcgtatttcacaacaggcaccgcatactgaatgggctcagagcccaaggcctgctgctcacgcccaacgccgtcgtcatcgtggaggacgccaaagtcaagcagaggattgattacgccaacctgaccggaatctctgtcagcagcctgagcgacagtctttttgtgcttcatgtacagcgtgcggacaataagcaaaagggagatgtggtgctgcagagtgaccacgtgattgagacgctgaccaagacagccctcagtgccaaccgcgtgaacagcatcaacatcaaccagggcagcatcacgtttgcagggggccccggcagggatggcaccattgacttcacacccggctcggagctgctcatcaccaaggccaagaacgggcacctggctgtggtcgccccacggctgaattctcggtgataaaggcgcccactggaccctcccaacgcccaatgctttgcttttctcctcctccccttcccagttaccaaagactcgaacttccagacagggacccagggacaccccgaagcccacctgcaatctcccacctcctgcccatccctctcttgagggagcagcaggggccaggagctaccccaggagtgggccaggccgggccacagcaataggaaagccagggccagagcgagccatgccagccctactgccgatgccaaatatttgagagaagggaacttttgctgaggttttctctgaggtttttttgatgctttataggaaactattttttaaaaaaagccatttcccacccaaggacacagtggatgtgttttccctgactccagcagggcaaggaatgtagccgagaggttgtgtgggctgggctctggtgccctcttccctggccaggacacctctcctcctgattcccttggcaccttgtctttctgtctgtttacctgtctccctgcctgcccatctgcatcttttgcagcccactctgacttccatctgggggctgagaccacccttgcctgcccccttctttctgccttaagaatgtccttttaggctgggcatggtggctcacgcctgtaaccccagcactttgggaggcggagacgggcagataacctgaggtcaggatttcgagaccaacctgacctacatggagaaactccgcctctagtaaaaatacaaaattagccgggcatggtggtgcacgcctctaatcccagctactcgggaggctgaggcaggagaatcacttgaacccgggaagtggaggttgcagtgagccaagagtacaccactgcactccagcctgggcaacagagcgagactccgtcttaaaaaaaaaaaaaaaagaacgcccttttactgtcctcatcatcccagtttgaggcagtgctggagtggggaaggccgtcttagaccatagaggttggaagacgctgagagatcatccagcccagccccttgatgttacagagcagaagacagatgcccaaacaggagaaggcacttgcccacggtcatacggcaggttgccacaaaaccaagatggcagcccttcctcagcgtgcctcactgccactcccagagccagggagccccataaaacccacatcatgtcttaagagtatatctggctccttgaccagcaatcggccctgggagccaccaggtgggaaaagcgcctctgccagagtccaggccttgggatgacagacagcttgcccgcacactcgggccccactcaaggatgtagggccttttctggcccctgacccctccctggcatgggagcgtggggacggggctggccttgggaggagcggcaggggcatcacctccttctgctgcttctccctgctcctaccctcaagggcctgggggctgcccagctgcctctatgcccttctgggggtctcagcccactgctgacacttctgcaatccagagaaacactaaataaagcaatacgtgtttggccaa

SEQ ID NO: 276578 - DNA, 4679 bp, Homo sapiens
tccaagctgaattcgcggccgcgtcgaccacgccggccctgggcagtgacggggttcgggtgaccatggacagtgcgctcaccgcccgtgacagggtgggggtgcaggatttcgtgctgctggagaacttcaccagcgaggccgccttcatcgagaacctacggcggcgatttcgggagaatctcatctacacctacattggccccgtcctggtctctgtcaatccctaccgggacctgcagatctacagccggcaacatatggagcgttaccgtggcgtcagcttctatgaagtgccccctcacctgtttgccgtggcggacactgtgtaccgagcactgcgcacggagcgtcgggaccaggctgtgatgatctctggggagagcggggcaggcaagaccgaagccaccaagaagctgctgcagttctatgcagagacctgcccagccccccaacgcggaggtgccgtgcgggaccggctgctacagagcaacccggtgctggaggcctttggaaatgccaagaccctccggaacgataactccagcaggttcgggaagtacatggatgtgcagtttgacttcaagggtgcccccgtgggtggccacatcctcagttacctcctggaaaagtcacgagtggtgcaccagaatcatggggagcggaacttccacatcttctaccagctgctggaggggggcgaggaagaaactcttcgcaggctgggcttggaacggaacccccagagctacctgtacctggtgaagggccagtgtgccaaagtctcctccatcaacgacaagagtgactggaaggtcgtcaggaaggctctgacagtcattgatttcaccgaggatgaagtggaggacctgctaagcatcgtggccagcgtccttcatttgggcaacatccactttgctgccaacgaggacagcaatgcccaggtcaccaccgagaaccagctcaagtatctgaccaggctcctcagcgtggaaggctcgacgctgcgagaagccctgacacacaggaagatcatcgccaagggggaagagctcctgagcccgctgaacctggaacaggccgcgtacgcacgaaacgccctcgccaaggctgtgtacagccgcacttttacctggctcgtcgggaaaatcaacaggtcgctggcctccaaggacgtggagagccccagctggcggagcaccacggttctcgggctcctggatatttatggcttcgaagtgtttcagcataacagctttgagcagttctgcatcaattactgcaacgaaaagctgcagcagctcttcatcgaactcccgctcaagtcggagcaggaggaatacgaggcagagggcatcgcgtgggaacccgtccagtatttcaacaacaaaatcatctgtgatctggtggaggagaagtttaagggcatcatctcgattttggatgaggagtgtctgcgcccgggggaggccacagacctgaccttcctggagaagctggaggatactgtcaagcaccatccacacttcctgacgcacaagctggctgaccagaggaccaggaaatctctgggccgaggggaattccgccttctgcactatgcgggggaggtgacctacagcgtgaccgggtttctggacaaaaacaatgaccttctcttccggaaccttaaggagaccatgtgtagctcaaagaatcccattatgagccagtgcttcgaccggagcgagctcagtgacaagaagcggccagagacggtcgccacccagttcaagatgagcctcctgcagctggtggagatcctgcagtctaaggagcccgcctacgtccgctgcatcaaacccaatgatgccaaacagcccggccgctttgacgaggtgctgatccgccaccaggtgaagtacctggggctgttggaaaacctgcgtgtgcgcagagctggctttgcctatcgccgcaaatacgaagctttcctgcaaaggtacaagtcactgtgcccagagacgtggcccacgtgggcaggacggccgcaggatggggtggctgtgctggtccgacacctgggctacaagccagaagagtacaagatgggcaggaccaagatcttcatccgcttccccaagaccctgtttgccacagaggatgccctggaggtccggcggcagagcctggccacaaagatccaagctgcctggaggggctttcactggcggcagaaattcctccgggtgaagagatcagccatctgcatccagtcgtggtggcgtggaacactgggccggaggaaggcagccaagaggaagtgggcggcacagaccatccggcggctcatccgaggcttcatcctgcgccacgccccccgctgccccgagaacgccttcttcttggaccatgtgcgcacgtcttttttgctaaacctgaggcggcagctgccccggaatgtcctggacacctcgtggcccacgcccccacctgccctgcgtgaggcctcagagcttctgcgggagttgtgcataaagaacatggtgtggaaatactgccggagtatcagccctgagtggaagcagcagctgcagcagaaggccgtggctagtgagatcttcaagggcaagaaggataattaccctcagagtgtacccaggctcttcatcagcactcggcttggtacagatgagatcagcccccgagtgctgcaggccttgggctctgagcccattcagtatgcggtgcctgttgtgaaatacgaccgcaagggctacaagcctcgctcccggcagctgctgctcacgcccaacgccgtcgtcatcgtggaggacgccaaagtcaagcagaggattgattacgccaacctgaccggaatctctgtcagcagcctgagcgacagtctttttgtgcttcatgtacagcgtgcggacaataagcaaaagggagatgtggtgctgcagagtgaccacgtgattgagacgctgaccaagacagccctcagtgccaaccgcgtgaacagcatcaacatcaaccagggcagcatcacgtttgcagggggccccggcagggatggcaccattgacttcacacccggctcggagctgctcatcaccaaggccaagaacgggcacctggctgtggtcgccccacggctgaattctcggtgataaaggcgcccactggaccctcccaacgcccaatgctttgcttttctcctcctccccttcccagttaccaaagactcgaacttccagacagggacccagggacaccccgaagcccacctgcaatctcccacctcctgcccatccctctcttgagggagcagcaggggccaggagctaccccaggagtgggccaggccgggccacagcaataggaaagccagggccagagcgagccatgccagccctactgccgatgccaaatatttgagagaagggaacttttgctgaggttttctctgaggtttttttgatgctttataggaaactattttttaaaaaaagccatttcccacccaaggacacagtggatgtgttttccctgactccagcagggcaaggaatgtagccgagaggttgtgtgggctgggctctggtgccctcttccctggccaggacacctctcctcctgattcccttggcaccttgtctttctgtctgtttacctgtctccctgcctgcccatctgcatcttttgcagcccactctgacttccatctgggggctgagaccacccttgcctgcccccttctttctgccttaagaatgtccttttaggctgggcatggtggctcacgcctgtaaccccagcactttgggaggcggagacgggcagataacctgaggtcaggatttcgagaccaacctgacctacatggagaaactccgcctctagtaaaaatacaaaattagccgggcatggtggtgcacgcctctaatcccagctactcgggaggctgaggcaggagaatcacttgaacccgggaagtggaggttgcagtgagccaagagtacaccactgcactccagcctgggcaacagagcgagactccgtcttaaaaaaaaaaaaaaaagaacgcccttttactgtcctcatcatcccagtttgaggcagtgctggagtggggaaggccgtcttagaccatagaggttggaagacgctgagagatcatccagcccagccccttgatgttacagagcagaagacagatgcccaaacaggagaaggcacttgcccacggtcatacggcaggttgccacaaaaccaagatggcagcccttcctcagcgtgcctcactgccactcccagagccagggagccccataaaacccacatcatgtcttaagagtatatctggctccttgaccagcaatcggccctgggagccaccctctgccagagtccaggccttgggatgacagacagcttgcccgcacactcgggccccactcaaggatgtagggccttttctggcccctgacccctccctggcatgggagcgtggggacggggctggccttgggaggagcggcaggggcatcacctccttctgctgcttctccctgctcctaccctcaagggcctgggggctgcccagctgcctctatgcccttctgggggtctcagcccactgctgacacttctgcaatccagagaaacactaaataaagcaatacgtgtttggccaa

SEQ ID NO: 276579 - DNA, 4438 bp, Homo sapiens
tccaagctgaattcgcggccgcgtcgaccacgccggccctgggcagtgacggggttcgggtgaccatggacagtgcgctcaccgcccgtgacagggtgggggtgcaggatttcgtgctgctggagaacttcaccagcgaggccgccttcatcgagaacctacggcggcgatttcgggagaatctcatctacacctacattggccccgtcctggtctctgtcaatccctaccgggacctgcagatctacagccggcaacatatggagcgttaccgtggcgtcagcttctatgaagtgccccctcacctgtttgccgtggcggacactgtgtaccgagcactgcgcacggagcgtcgggaccaggctgtgatgatctctggggagagcggggcaggcaagaccgaagccaccaagaagctgctgcagttctatgcagagacctgcccagccccccaacgcggaggtgccgtgcgggaccggctgctacagagcaacccggtgctggaggcctttggaaatgccaagaccctccggaacgataactccagcaggttcgggaagtacatggatgtgcagtttgacttcaagggtgcccccgtgggtggccacatcctcagttacctcctggaaaagtcacgagtggtgcaccagaatcatggggagcggaacttccacatcttctaccagctgctggaggggggcgaggaagaaactcttcgcaggctgggcttggaacggaacccccagagctacctgtacctggtgaagggccagtgtgccaaagtctcctccatcaacgacaagagtgactggaaggtcgtcaggaaggctctgacagtcattgatttcaccgaggatgaagtggaggacctgctaagcatcgtggccagcgtccttcatttgggcaacatccactttgctgccaacgaggacagcaatgcccaggtcaccaccgagaaccagctcaagtatctgaccaggctcctcagcgtggaaggctcgacgctgcgagaagccctgacacacaggaagatcatcgccaagggggaagagctcctgagcccgctgaacctggaacaggccgcgtacgcacgaaacgccctcgccaaggctgtgtacagccgcacttttacctggctcgtcgggaaaatcaacaggtcgctggcctccaaggacgtggagagccccagctggcggagcaccacggttctcgggctcctggatatttatggcttcgaagtgtttcagcataacagctttgagcagttctgcatcaattactgcaacgaaaagctgcagcagctcttcatcgaactcccgctcaagtcggagcaggaggaatacgaggcagagggcatcgcgtgggaacccgtccagtatttcaacaacaaaatcatctgtgatctggtggaggagaagtttaagggcatcatctcgattttggatgaggagtgtctgcgcccgggggaggccacagacctgaccttcctggagaagctggaggatactgtcaagcaccatccacacttcctgacgcacaagctggctgaccagaggaccaggaaatctctgggccgaggggaattccgccttctgcactatgcgggggaggtgacctacagcgtgaccgggtttctggacaaaaacaatgaccttctcttccggaaccttaaggagaccatgtgtagctcaaagaatcccattatgagccagtgcttcgaccggagcgagctcagtgacaagaagcggccagagacggtcgccacccagttcaagatgagcctcctgcagctggtggagatcctgcagtctaaggagcccgcctacgtccgctgcatcaaacccaatgatgccaaacagcccggccgctttgacgaggtgctgatccgccaccaggtgaagtacctggggctgttggaaaacctgcgtgtgcgcagagctggctttgcctatcgccgcaaatacgaagctttcctgcaaaggtacaagtcactgtgcccagagacgtggcccacgtgggcaggacggccgcaggatggggtggctgtgctggtccgacacctgggctacaagccagaagagtacaagatgggcaggaccaagatcttcatccgcttccccaagaccctgtttgccacagaggatgccctggaggtccggcggcagagcctggccacaaagatccaagctgcctggaggggctttcactggcggcagaaattcctccgggtgaagagatcagccatctgcatccagtcgtggtggcgtggaacactgggccggaggaaggcagccaagaggaagtgggcggcacagaccatccggcggctcatccgaggcttcatcctgcgccacgccccccgctgccccgagaacgccttcttcttggaccatgtgcgcacgtcttttttgctaaacctgaggcggcagctgccccggaatgtcctggacacctcgtggcccacgcccccacctgccctgcgtgaggcctcagagcttctgcgggagttgtgcataaagaacatggtgtggaaatactgccggagtatcagccctgagtggaagcagcagctgcagcagaaggccgtggctagtgagatcttcaagggcaagaaggataattaccctcagagtgtacccaggctcttcatcagcactcggcttggtacagatgagatcagcccccgagtgctgcaggccttgggctctgagcccattcagtatgcggtgcctgttgtgaaatacgaccgcaagggctacaagcctcgctcccggcagctgctgctcacgcccaacgccgtcgtcatcgtggaggacgccaaagtcaagcagaggattgattacgccaacctgaccggaatctctgtcagcagcctgagcgacagtctttttgtgcttcatgtacagcgtgcggacaataagcaaaagggagatgtggtgctgcagagtgaccacgtgattgagacgctgaccaagacagccctcagtgccaaccgcgtgaacagcatcaacatcaaccagggcagcatcacgtttgcagggggccccggcagggatggcaccattgacttcacacccggctcggagctgctcatcaccaaggccaagaacgggcacctggctgtggtcgccccacggctgaattctcggtgataaaggcgcccactggaccctcccaacgcccaatgctttgcttttctcctcctccccttcccagttaccaaagactcgaacttccagacagggacccagggacaccccgaagcccacctgcaatctcccacctcctgcccatccctctcttgagggagcagcaggggccaggagctaccccaggagtgggccaggccgggccacagcaataggaaagccagggccagagcgagccatgccagccctactgccgatgccaaatatttgagagaagggaacttttgctgaggttttctctgaggtttttttgatgctttataggaaactattttttaaaaaaagccatttcccacccaaggacacagtggatgtgttttccctgactccagcagggcaaggaatgtagccgagaggttgtgtgggctgggctctggtgccctcttccctggccaggacacctctcctcctgattcccttggcaccttgtctttctgtctgtttacctgtctccctgcctgcccatctgcatcttttgcagcccactctgacttccatctgggggctgagaccacccttgcctgcccccttctttctgccttaagaatgtccttttaggctgggcatggtggctcacgcctgtaaccccagcactttgggaggcggagacgggcagataacctgaggtcaggatttcgagaccaacctgacctacatggagaaactccgcctctagtaaaaatacaaaattagccgggcatggtggtgcacgcctctaatcccagctactcgggaggctgaggcaggagaatcacttgaacccgggaagtggaggttgcagtgagccaagagtacaccactgcactccagcctgggcaacagagcgagactccgtcttaaaaaaaaaaaaaaaagaacgcccttttactgtcctcatcatcccagtttgaggcagtgctggagtggggaaggccgtcttagaccatagaggttggaagacgctgagagatcatccagcccagccccttgatgttacagagcagaagacagatgcccaaacaggagaaggcacttgcccacggtcatacggcaggttgccacaaaaccaagatggcagcccttcctcagcgtgcctcactgccactcccagagccagggagccccataaaacccacatcatgtcttaagcggatcaggctgatccgcttaagggaaaatagtttaggagaaaccagcttttactgtttttgaaaaattagcttcaccctgtcaagttaacaaggaatgcc

SEQ ID NO: 276580 - DNA, 4208 bp, Homo sapiens
tccaagctgaattcgcggccgcgtcgaccacgccggccctgggcagtgacggggttcgggtgaccatggacagtgcgctcaccgcccgtgacagggtgggggtgcaggatttcgtgctgctggagaacttcaccagcgaggccgccttcatcgagaacctacggcggcgatttcgggagaatctcatctacacctacattggccccgtcctggtctctgtcaatccctaccgggacctgcagatctacagccggcaacatatggagcgttaccgtggcgtcagcttctatgaagtgccccctcacctgtttgccgtggcggacactgtgtaccgagcactgcgcacggagcgtcgggaccaggctgtgatgatctctggggagagcggggcaggcaagaccgaagccaccaagaagctgctgcagttctatgcagagacctgcccagccccccaacgcggaggtgccgtgcgggaccggctgctacagagcaacccggtgctggaggcctttggaaatgccaagaccctccggaacgataactccagcaggttcgggaagtacatggatgtgcagtttgacttcaagggtgcccccgtgggtggccacatcctcagttacctcctggaaaagtcacgagtggtgcaccagaatcatggggagcggaacttccacatcttctaccagctgctggaggggggcgaggaagaaactcttcgcaggctgggcttggaacggaacccccagagctacctgtacctggtgaagggccagtgtgccaaagtctcctccatcaacgacaagagtgactggaaggtcgtcaggaaggctctgacagtcattgatttcaccgaggatgaagtggaggacctgctaagcatcgtggccagcgtccttcatttgggcaacatccactttgctgccaacgaggacagcaatgcccaggtcaccaccgagaaccagctcaagtatctgaccaggctcctcagcgtggaaggctcgacgctgcgagaagccctgacacacaggaagatcatcgccaagggggaagagctcctgagcccgctgaacctggaacaggccgcgtacgcacgaaacgccctcgccaaggctgtgtacagccgcacttttacctggctcgtcgggaaaatcaacaggtcgctggcctccaaggacgtggagagccccagctggcggagcaccacggttctcgggctcctggatatttatggcttcgaagtgtttcagcataacagctttgagcagttctgcatcaattactgcaacgaaaagctgcagcagctcttcatcgaactcccgctcaagtcggagcaggaggaatacgaggcagagggcatcgcgtgggaacccgtccagtatttcaacaacaaaatcatctgtgatctggtggaggagaagtttaagggcatcatctcgattttggatgaggagtgtctgcgcccgggggaggccacagacctgaccttcctggagaagctggaggatactgtcaagcaccatccacacttcctgacgcacaagctggctgaccagaggaccaggaaatctctgggccgaggggaattccgccttctgcactatgcgggggaggtgacctacagcgtgaccgggtttctggacaaaaacaatgaccttctcttccggaaccttaaggagaccatgtgtagctcaaagaatcccattatgagccagtgcttcgaccggagcgagctcagtgacaagaagcggccagagacggtcgccacccagttcaagatgagcctcctgcagctggtggagatcctgcagtctaaggagcccgcctacgtccgctgcatcaaacccaatgatgccaaacagcccggccgctttgacgaggtgctgatccgccaccaggtgaagtacctggggctgttggaaaacctgcgtgtgcgcagagctggctttgcctatcgccgcaaatacgaagctttcctgcaaaggtacaagtcactgtgcccagagacgtggcccacgtgggcaggacggccgcaggatggggtggctgtgctggtccgacacctgggctacaagccagaagagtacaagatgggcaggaccaagatcttcatccgcttccccaagaccctgtttgccacagaggatgccctggaggtccggcggcagagcctggccacaaagatccaagctgcctggaggggctttcactggcggcagaaattcctccgggtgaagagatcagccatctgcatccagtcgtggtggcgtggaacactgggccggaggaaggcagccaagaggaagtgggcggcacagaccatccggcggctcatccgaggcttcatcctgcgccacgccccccgctgccccgagaacgccttcttcttggaccatgtgcgcacgtcttttttgctaaacctgaggcggcagctgccccggaatgtcctggacacctcgtggcccacgcccccacctgccctgcgtgaggcctcagagcttctgcgggagttgtgcataaagaacatggtgtggaaatactgccggagtatcagccctgagtggaagcagcagctgcagcagaaggccgtggctagtgagatcttcaagggcaagaaggataattaccctcagagtgtacccaggctcttcatcagcactcggcttggtacagatgagatcagcccccgagtgctgcaggccttgggctctgagcccattcagtatgcggtgcctgttgtgaaatacgaccgcaagggctacaagcctcgctcccggcagctgctgctcacgcccaacgccgtcgtcatcgtggaggacgccaaagtcaagcagaggattgattacgccaacctgaccggaatctctgtcagcagcctgagcgacagtctttttgtgcttcatgtacagcgtgcggacaataagcaaaagggagatgtggtgctgcagagtgaccacgtgattgagacgctgaccaagacagccctcagtgccaaccgcgtgaacagcatcaacatcaaccagggcagcatcacgtttgcagggggccccggcagggatggcaccattgacttcacacccggctcggagctgctcatcaccaaggccaagaacgggcacctggctgtggtcgccccacggctgaattctcggtgataaaggcgcccactggaccctcccaacgcccaatgctttgcttttctcctcctccccttcccagttaccaaagactcgaacttccagacagggacccagggacaccccgaagcccacctgcaatctcccacctcctgcccatccctctcttgagggagcagcaggggccaggagctaccccaggagtgggccaggccgggccacagcaataggaaagccagggccagagcgagccatgccagccctactgccgatgccaaatatttgagagaagggaacttttgctgaggttttctctgaggtttttttgatgctttataggaaactattttttaaaaaaagccatttcccacccaaggacacagtggatgtgttttccctgactccagcagggcaaggaatgtagccgagaggttgtgtgggctgggctctggtgccctcttccctggccaggacacctctcctcctgattcccttggcaccttgtctttctgtctgtttacctgtctccctgcctgcccatctgcatcttttgcagcccactctgacttccatctgggggctgagaccacccttgcctgcccccttctttctgccttaagaatgtccttttaggctgggcatggtggctcacgcctgtaaccccagcactttgggaggcggagacgggcagataacctgaggtcaggatttcgagaccaacctgacctacatggagaaactccgcctctagtaaaaatacaaaattagccgggcatggtggtgcacgcctctaatcccagctactcgggaggctgaggcaggagaatcacttgaacccgggaagtggaggttgcagtgagccaagagtacaccactgcactccagcctgggcaacagagcgagactccgtcttaaaaaaaaaaaaattagccgggcatggtggcaggcgcctgtaatcccagctactcaggagactgaggcaggagaatcgcttgaaccagggaggtggaggttgcagtgagcccagattgcgccactgcactccagcctgggcaacagagcgagatccgtctc

SEQ ID NO: 276581 - DNA, 1335 bp, Homo sapiens
tcagaaaaacctcagagaaaacctcagcaaaagttccctactgccgatgccaaatatttgagagaagggaacttttgctgaggttttctctgaggtttttttgatgctttataggaaactattttttaaaaaaagccatttcccacccaaggacacagtggatgtgttttccctgactccagcagggcaaggaatgtagccgagaggttgtgtgggctgggctctggtgccctcttccctggccaggacacctctcctcctgattcccttggcaccttgtctttctgtctgtttacctgtctccctgcctgcccatctgcatcttttgcagcccactctgacttccatctgggggctgagaccacccttgcctgcccccttctttctgccttaagaatgtccttttaggctgggcatggtggctcacgcctgtaaccccagcactttgggaggcggagacgggcagataacctgaggtcaggatttcgagaccaacctgacctacatggagaaactccgcctctagtaaaaatacaaaattagccgggcatggtggtgcacgcctctaatcccagctactcgggaggctgaggcaggagaatcacttgaacccgggaagtggaggttgcagtgagccaagagtacaccactgcactccagcctgggcaacagagcgagactccgtcttaaaaaaaaaaaaaaaagaacgcccttttactgtcctcatcatcccagtttgaggcagtgctggagtggggaaggccgtcttagaccatagaggttggaagacgctgagagatcatccagcccagccccttgatgttacagagcagaagacagatgcccaaacaggagaaggcacttgcccacggtcatacggcaggttgccacaaaaccaagatggcagcccttcctcagcgtgcctcactgccactcccagagccagggagccccataaaacccacatcatgtcttaagagtatatctggctccttgaccagcaatcggccctgggagccaccaggtgggaaaagcgcctctgccagagtccaggccttgggatgacagacagcttgcccgcacactcgggccccactcaaggatgtagggccttttctggcccctgacccctccctggcatgggagcgtggggacggggctggccttgggaggagcggcaggggcatcacctccttctgctgcttctccctgctcctaccctcaagggcctgggggctgcccagctgcctctatgcccttctgggggtctcagcccactgctgacacttctgcaatccagagaaacactaaataaagcaatacgtgtttggccaa

SEQ ID NO: 276582 - DNA, 1313 bp, Homo sapiens
gcggccgcctactactactattaaattcgcggccgcgtcgacgagggaacttttgctgaggttttctctgaggtttttttgatgctttataggaaactattttttaaaaaaagccatttcccacccaaggacacagtggatgtgttttccctgactccagcagggcaaggaatgtagccgagaggttgtgtgggctgggctctggtgccctcttccctggccaggacacctctcctcctgattcccttggcaccttgtctttctgtctgtttacctgtctccctgcctgcccatctgcatcttttgcagcccactctgacttccatctgggggctgagaccacccttgcctgcccccttctttctgccttaagaatgtccttttaggctgggcatggtggctcacgcctgtaaccccagcactttgggaggcggagacgggcagataacctgaggtcaggatttcgagaccaacctgacctacatggagaaactccgcctctagtaaaaatacaaaattagccgggcatggtggtgcacgcctctaatcccagctactcgggaggctgaggcaggagaatcacttgaacccgggaagtggaggttgcagtgagccaagagtacaccactgcactccagcctgggcaacagagcgagactccgtcttaaaaaaaaaaaaaaaagaacgcccttttactgtcctcatcatcccagtttgaggcagtgctggagtggggaaggccgtcttagaccatagaggttggaagacgctgagagatcatccagcccagccccttgatgttacagagcagaagacagatgcccaaacaggagaaggcacttgcccacggtcatacggcaggttgccacaaaaccaagatggcagcccttcctcagcgtgcctcactgccactcccagagccagggagccccataaaacccacatcatgtcttaagagtatatctggctccttgaccagcaatcggccctgggagccaccaggtgggaaaagcgcctctgccagagtccaggccttgggatgacagacagcttgcccgcacactcgggccccactcaaggatgtagggccttttctggcccctgacccctccctggcatgggagcgtggggacggggctggccttgggaggagcggcaggggcatcacctccttctgctgcttctccctgctcctaccctcaagggcctgggggctgcccagctgcctctatgcccttctgggggtctcagcccactgctgacacttctgcaatccagagaaacactaaataaagcaatacgtgtttggccaa

SEQ ID NO: 276583 - DNA, 4063 bp, Homo sapiens
  misc_feature (4002)..(4002): n is a, c, g, or t
  misc_feature (4010)..(4010): n is a, c, g, or t
  misc_feature (4013)..(4014): n is a, c, g, or t
  misc_feature (4019)..(4019): n is a, c, g, or t
tccaagctgaattcgcggccgcgtcgaccacgccggccctgggcagtgacggggttcgggtgaccatggacagtgcgctcaccgcccgtgacagggtgggggtgcaggatttcgtgctgctggagaacttcaccagcgaggccgccttcatcgagaacctacggcggcgatttcgggagaatctcatctacacctacattggccccgtcctggtctctgtcaatccctaccgggacctgcagatctacagccggcaacatatggagcgttaccgtggcgtcagcttctatgaagtgccccctcacctgtttgccgtggcggacactgtgtaccgagcactgcgcacggagcgtcgggaccaggctgtgatgatctctggggagagcggggcaggcaagaccgaagccaccaagaagctgctgcagttctatgcagagacctgcccagccccccaacgcggaggtgccgtgcgggaccggctgctacagagcaacccggtgctggaggcctttggaaatgccaagaccctccggaacgataactccagcaggttcgggaagtacatggatgtgcagtttgacttcaagggtgcccccgtgggtggccacatcctcagttacctcctggaaaagtcacgagtggtgcaccagaatcatggggagcggaacttccacatcttctaccagctgctggaggggggcgaggaagaaactcttcgcaggctgggcttggaacggaacccccagagctacctgtacctggtgaagggccagtgtgccaaagtctcctccatcaacgacaagagtgactggaaggtcgtcaggaaggctctgacagtcattgatttcaccgaggatgaagtggaggacctgctaagcatcgtggccagcgtccttcatttgggcaacatccactttgctgccaacgaggacagcaatgcccaggtcaccaccgagaaccagctcaagtatctgaccaggctcctcagcgtggaaggctcgacgctgcgagaagccctgacacacaggaagatcatcgccaagggggaagagctcctgagcccgctgaacctggaacaggccgcgtacgcacgaaacgccctcgccaaggctgtgtacagccgcacttttacctggctcgtcgggaaaatcaacaggtcgctggcctccaaggacgtggagagccccagctggcggagcaccacggttctcgggctcctggatatttatggcttcgaagtgtttcagcataacagctttgagcagttctgcatcaattactgcaacgaaaagctgcagcagctcttcatcgaactcccgctcaagtcggagcaggaggaatacgaggcagagggcatcgcgtgggaacccgtccagtatttcaacaacaaaatcatctgtgatctggtggaggagaagtttaagggcatcatctcgattttggatgaggagtgtctgcgcccgggggaggccacagacctgaccttcctggagaagctggaggatactgtcaagcaccatccacacttcctgacgcacaagctggctgaccagaggaccaggaaatctctgggccgaggggaattccgccttctgcactatgcgggggaggtgacctacagcgtgaccgggtttctggacaaaaacaatgaccttctcttccggaaccttaaggagaccatgtgtagctcaaagaatcccattatgagccagtgcttcgaccggagcgagctcagtgacaagaagcggccagagacggtcgccacccagttcaagatgagcctcctgcagctggtggagatcctgcagtctaaggagcccgcctacgtccgctgcatcaaacccaatgatgccaaacagcccggccgctttgacgaggtgctgatccgccaccaggtgaagtacctggggctgttggaaaacctgcgtgtgcgcagagctggctttgcctatcgccgcaaatacgaagctttcctgcaaaggtacaagtcactgtgcccagagacgtggcccacgtgggcaggacggccgcaggatggggtggctgtgctggtccgacacctgggctacaagccagaagagtacaagatgggcaggaccaagatcttcatccgcttccccaagaccctgtttgccacagaggatgccctggaggtccggcggcagagcctggccacaaagatccaagctgcctggaggggctttcactggcggcagaaattcctccgggtgaagagatcagccatctgcatccagtcgtggtggcgtggaacactgggccggaggaaggcagccaagaggaagtgggcggcacagaccatccggcggctcatccgaggcttcatcctgcgccacgccccccgctgccccgagaacgccttcttcttggaccatgtgcgcacgtcttttttgctaaacctgaggcggcagctgccccggaatgtcctggacacctcgtggcccacgcccccacctgccctgcgtgaggcctcagagcttctgcgggagttgtgcataaagaacatggtgtggaaatactgccggagtatcagccctgagtggaagcagcagctgcagcagaaggccgtggctagtgagatcttcaagggcaagaaggataattaccctcagagtgtacccaggctcttcatcagcactcggcttggtacagatgagatcagcccccgagtgctgcaggccttgggctctgagcccattcagtatgcggtgcctgttgtgaaatacgaccgcaagggctacaagcctcgctcccggcagctgctgctcacgcccaacgccgtcgtcatcgtggaggacgccaaagtcaagcagaggattgattacgccaacctgaccggaatctctgtcagcagcctgagcgacagtctttttgtgcttcatgtacagcgtgcggacaataagcaaaagggagatgtggtgctgcagagtgaccacgtgattgagacgctgaccaagacagccctcagtgccaaccgcgtgaacagcatcaacatcaaccagggcagcatcacgtttgcagggggccccggcagggatggcaccattgacttcacacccggctcggagctgctcatcaccaaggccaagaacgggcacctggctgtggtcgccccacggctgaattctcggtgataaaggcgcccactggaccctcccaacgcccaatgctttgcttttctcctcctccccttcccagttaccaaagactcgaacttccagacagggacccagggacaccccgaagcccacctgcaatctcccacctcctgcccatccctctcttgagggagcagcaggggccaggagctaccccaggagtgggccaggccgggccacagcaataggaaagccagggccagagcgagccatgccagccctactgccgatgccaaatatttgagagaagggaacttttgctgaggttttctctgaggtttttttgatgctttataggaaactattttttaaaaaaagccatttcccacccaaggacacagtggatgtgttttccctgactccagcagggcaaggaatgtagccgagaggttgtgtgggctgggctctggtgccctcttccctggccaggacacctctcctcctgattcccttggcaccttgtctttctgtctgtttacctgtctccctgcctgcccatctgcatcttttgcagcccactctgacttccatctgggggctgagaccacccttgcctgcccccttctttctgccttaagaatgtccttttaggctgggcatggtggctcacgcctgtaaccccagcactttgggaggcggagacgggcagataacctgaggtcaggatttcgagaccaacctgacctacatggagaaactccgcctctagtaaaaatacaaaattagccgggcatggtggtgcacgcctctaatcccagctactcgggaggctgaggcaggagaatcacttgaacccgggaagtggaggttgcagtgagccaagtanccatgtcnccnnggaanaggatccgttaaaaaaaaaaggggcgctaaatccccgggcccta

SEQ ID NO: 276584 - DNA, 1225 bp, Homo sapiens
cggacgcgtgggtcgacccacgcgtccatttcccacccaaggacacagtggatgtgttttccctgactccagcagggcaaggaatgtagccgagaggttgtgtgggctgggctctggtgccctcttccctggccaggacacctctcctcctgattcccttggcaccttgtctttctgtctgtttacctgtctccctgcctgcccatctgcatcttttgcagcccactctgacttccatctgggggctgagaccacccttgcctgcccccttctttctgccttaagaatgtccttttaggctgggcatggtggctcacgcctgtaaccccagcactttgggaggcggagacgggcagataacctgaggtcaggatttcgagaccaacctgacctacatggagaaactccgcctctagtaaaaatacaaaattagccgggcatggtggtgcacgcctctaatcccagctactcgggaggctgaggcaggagaatcacttgaacccgggaagtggaggttgcagtgagccaagagtacaccactgcactccagcctgggcaacagagcgagactccgtcttaaaaaaaaaaaaaaaagaacgcccttttactgtcctcatcatcccagtttgaggcagtgctggagtggggaaggccgtcttagaccatagaggttggaagacgctgagagatcatccagcccagccccttgatgttacagagcagaagacagatgcccaaacaggagaaggcacttgcccacggtcatacggcaggttgccacaaaaccaagatggcagcccttcctcagcgtgcctcactgccactcccagagccagggagccccataaaacccacatcatgtcttaagagtatatctggctccttgaccagcaatcggccctgggagccaccaggtgggaaaagcgcctctgccagagtccaggccttgggatgacagacagcttgcccgcacactcgggccccactcaaggatgtagggccttttctggcccctgacccctccctggcatgggagcgtggggacggggctggccttgggaggagcggcaggggcatcacctccttctgctgcttctccctgctcctaccctcaagggcctgggggctgcccagctgcctctatgcccttctgggggtctcagcccactgctgacacttctgcaatccagagaaacactaaataaagcaatacgtgtttggccaa

SEQ ID NO: 276585 - DNA, 3716 bp, Homo sapiens
tccaagctgaattcgcggccgcgtcgaccacgccggccctgggcagtgacggggttcgggtgaccatggacagtgcgctcaccgcccgtgacagggtgggggtgcaggatttcgtgctgctggagaacttcaccagcgaggccgccttcatcgagaacctacggcggcgatttcgggagaatctcatctacacctacattggccccgtcctggtctctgtcaatccctaccgggacctgcagatctacagccggcaacatatggagcgttaccgtggcgtcagcttctatgaagtgccccctcacctgtttgccgtggcggacactgtgtaccgagcactgcgcacggagcgtcgggaccaggctgtgatgatctctggggagagcggggcaggcaagaccgaagccaccaagaagctgctgcagttctatgcagagacctgcccagccccccaacgcggaggtgccgtgcgggaccggctgctacagagcaacccggtgctggaggcctttggaaatgccaagaccctccggaacgataactccagcaggttcgggaagtacatggatgtgcagtttgacttcaagggtgcccccgtgggtggccacatcctcagttacctcctggaaaagtcacgagtggtgcaccagaatcatggggagcggaacttccacatcttctaccagctgctggaggggggcgaggaagaaactcttcgcaggctgggcttggaacggaacccccagagctacctgtacctggtgaagggccagtgtgccaaagtctcctccatcaacgacaagagtgactggaaggtcgtcaggaaggctctgacagtcattgatttcaccgaggatgaagtggaggacctgctaagcatcgtggccagcgtccttcatttgggcaacatccactttgctgccaacgaggacagcaatgcccaggtcaccaccgagaaccagctcaagtatctgaccaggctcctcagcgtggaaggctcgacgctgcgagaagccctgacacacaggaagatcatcgccaagggggaagagctcctgagcccgctgaacctggaacaggccgcgtacgcacgaaacgccctcgccaaggctgtgtacagccgcacttttacctggctcgtcgggaaaatcaacaggtcgctggcctccaaggacgtggagagccccagctggcggagcaccacggttctcgggctcctggatatttatggcttcgaagtgtttcagcataacagctttgagcagttctgcatcaattactgcaacgaaaagctgcagcagctcttcatcgaactcccgctcaagtcggagcaggaggaatacgaggcagagggcatcgcgtgggaacccgtccagtatttcaacaacaaaatcatctgtgatctggtggaggagaagtttaagggcatcatctcgattttggatgaggagtgtctgcgcccgggggaggccacagacctgaccttcctggagaagctggaggatactgtcaagcaccatccacacttcctgacgcacaagctggctgaccagaggaccaggaaatctctgggccgaggggaattccgccttctgcactatgcgggggaggtgacctacagcgtgaccgggtttctggacaaaaacaatgaccttctcttccggaaccttaaggagaccatgtgtagctcaaagaatcccattatgagccagtgcttcgaccggagcgagctcagtgacaagaagcggccagagacggtcgccacccagttcaagatgagcctcctgcagctggtggagatcctgcagtctaaggagcccgcctacgtccgctgcatcaaacccaatgatgccaaacagcccggccgctttgacgaggtgctgatccgccaccaggtgaagtacctggggctgttggaaaacctgcgtgtgcgcagagctggctttgcctatcgccgcaaatacgaagctttcctgcaaaggtacaagtcactgtgcccagagacgtggcccacgtgggcaggacggccgcaggatggggtggctgtgctggtccgacacctgggctacaagccagaagagtacaagatgggcaggaccaagatcttcatccgcttccccaagaccctgtttgccacagaggatgccctggaggtccggcggcagagcctggccacaaagatccaagctgcctggaggggctttcactggcggcagaaattcctccgggtgaagagatcagccatctgcatccagtcgtggtggcgtggaacactgggccggaggaaggcagccaagaggaagtgggcggcacagaccatccggcggctcatccgaggcttcatcctgcgccacgccccccgctgccccgagaacgccttcttcttggaccatgtgcgcacgtcttttttgctaaacctgaggcggcagctgccccggaatgtcctggacacctcgtggcccacgcccccacctgccctgcgtgaggcctcagagcttctgcgggagttgtgcataaagaacatggtgtggaaatactgccggagtatcagccctgagtggaagcagcagctgcagcagaaggccgtggctagtgagatcttcaagggcaagaaggataattaccctcagagtgtacccaggctcttcatcagcactcggcttggtacagatgagatcagcccccgagtgctgcaggccttgggctctgagcccattcagtatgcggtgcctgttgtgaaatacgaccgcaagggctacaagcctcgctcccggcagctgctgctcacgcccaacgccgtcgtcatcgtggaggacgccaaagtcaagcagaggattgattacgccaacctgaccggaatctctgtcagcagcctgagcgacagtctttttgtgcttcatgtacagcgtgcggacaataagcaaaagggagatgtggtgctgcagagtgaccacgtgattgagacgctgaccaagacagccctcagtgccaaccgcgtgaacagcatcaacatcaaccagggcagcatcacgtttgcagggggccccggcagggatggcaccattgacttcacacccggctcggagctgctcatcaccaaggccaagaacgggcacctggctgtggtcgccccacggctgaattctcggtgataaaggcgcccactggaccctcccaacgcccaatgctttgcttttctcctcctccccttcccagttaccaaagactcgaacttccagacagggacccagggacaccccgaagcccacctgcaatctcccacctcctgcccatccctctcttgagggagcagcaggggccaggagctaccccaggagtgggccaggccgggccacagcaataggaaagccagggccagagcgagccatgccagccctactgccgatgccaaatatttgagagaagggaacttttgctgaggttttctctgaggtttttttgatgctttataggaaactattttttaaaaaaagccatttcccacccaaggacacagtggatgtgttttccctgactccagcagggcaaggaatgtagccgagaggttgtgtgggctgggctctggtgccctcttccctggccaggacacctctcctcctgattcccttggcaccttgtctttctgtctgtttacctgtccgccaccacacccagctaattttggttattttcagtagagattgcggtgtgtgttt

SEQ ID NO: 276586 - DNA, 3946 bp, Homo sapiens
tccaagctgaattcgcggccgcgtcgaccacgccggccctgggcagtgacggggttcgggtgaccatggacagtgcgctcaccgcccgtgacagggtgggggtgcaggatttcgtgctgctggagaacttcaccagcgaggccgccttcatcgagaacctacggcggcgatttcgggagaatctcatctacacctacattggccccgtcctggtctctgtcaatccctaccgggacctgcagatctacagccggcaacatatggagcgttaccgtggcgtcagcttctatgaagtgccccctcacctgtttgccgtggcggacactgtgtaccgagcactgcgcacggagcgtcgggaccaggctgtgatgatctctggggagagcggggcaggcaagaccgaagccaccaagaagctgctgcagttctatgcagagacctgcccagccccccaacgcggaggtgccgtgcgggaccggctgctacagagcaacccggtgctggaggcctttggaaatgccaagaccctccggaacgataactccagcaggttcgggaagtacatggatgtgcagtttgacttcaagggtgcccccgtgggtggccacatcctcagttacctcctggaaaagtcacgagtggtgcaccagaatcatggggagcggaacttccacatcttctaccagctgctggaggggggcgaggaagaaactcttcgcaggctgggcttggaacggaacccccagagctacctgtacctggtgaagggccagtgtgccaaagtctcctccatcaacgacaagagtgactggaaggtcgtcaggaaggctctgacagtcattgatttcaccgaggatgaagtggaggacctgctaagcatcgtggccagcgtccttcatttgggcaacatccactttgctgccaacgaggacagcaatgcccaggtcaccaccgagaaccagctcaagtatctgaccaggctcctcagcgtggaaggctcgacgctgcgagaagccctgacacacaggaagatcatcgccaagggggaagagctcctgagcccgctgaacctggaacaggccgcgtacgcacgaaacgccctcgccaaggctgtgtacagccgcacttttacctggctcgtcgggaaaatcaacaggtcgctggcctccaaggacgtggagagccccagctggcggagcaccacggttctcgggctcctggatatttatggcttcgaagtgtttcagcataacagctttgagcagttctgcatcaattactgcaacgaaaagctgcagcagctcttcatcgaactcccgctcaagtcggagcaggaggaatacgaggcagagggcatcgcgtgggaacccgtccagtatttcaacaacaaaatcatctgtgatctggtggaggagaagtttaagggcatcatctcgattttggatgaggagtgtctgcgcccgggggaggccacagacctgaccttcctggagaagctggaggatactgtcaagcaccatccacacttcctgacgcacaagctggctgaccagaggaccaggaaatctctgggccgaggggaattccgccttctgcactatgcgggggaggtgacctacagcgtgaccgggtttctggacaaaaacaatgaccttctcttccggaaccttaaggagaccatgtgtagctcaaagaatcccattatgagccagtgcttcgaccggagcgagctcagtgacaagaagcggccagagacggtcgccacccagttcaagatgagcctcctgcagctggtggagatcctgcagtctaaggagcccgcctacgtccgctgcatcaaacccaatgatgccaaacagcccggccgctttgacgaggtgctgatccgccaccaggtgaagtacctggggctgttggaaaacctgcgtgtgcgcagagctggctttgcctatcgccgcaaatacgaagctttcctgcaaaggtacaagtcactgtgcccagagacgtggcccacgtgggcaggacggccgcaggatggggtggctgtgctggtccgacacctgggctacaagccagaagagtacaagatgggcaggaccaagatcttcatccgcttccccaagaccctgtttgccacagaggatgccctggaggtccggcggcagagcctggccacaaagatccaagctgcctggaggggctttcactggcggcagaaattcctccgggtgaagagatcagccatctgcatccagtcgtggtggcgtggaacactgggccggaggaaggcagccaagaggaagtgggcggcacagaccatccggcggctcatccgaggcttcatcctgcgccacgccccccgctgccccgagaacgccttcttcttggaccatgtgcgcacgtcttttttgctaaacctgaggcggcagctgccccggaatgtcctggacacctcgtggcccacgcccccacctgccctgcgtgaggcctcagagcttctgcgggagttgtgcataaagaacatggtgtggaaatactgccggagtatcagccctgagtggaagcagcagctgcagcagaaggccgtggctagtgagatcttcaagggcaagaaggataattaccctcagagtgtacccaggctcttcatcagcactcggcttggtacagatgagatcagcccccgagtgctgcaggccttgggctctgagcccattcagtatgcggtgcctgttgtgaaatacgaccgcaagggctacaagcctcgctcccggcagctgctgctcacgcccaacgccgtcgtcatcgtggaggacgccaaagtcaagcagaggattgattacgccaacctgaccggaatctctgtcagcagcctgagcgacagtctttttgtgcttcatgtacagcgtgcggacaataagcaaaagggagatgtggtgctgcagagtgaccacgtgattgagacgctgaccaagacagccctcagtgccaaccgcgtgaacagcatcaacatcaaccagggcagcatcacgtttgcagggggccccggcagggatggcaccattgacttcacacccggctcggagctgctcatcaccaaggccaagaacgggcacctggctgtggtcgccccacggctgaattctcggtgataaaggcgcccactggaccctcccaacgcccaatgctttgcttttctcctcctccccttcccagttaccaaagactcgaacttccagacagggacccagggacaccccgaagcccacctgcaatctcccacctcctgcccatccctctcttgagggagcagcaggggccaggagctaccccaggagtgggccaggccgggccacagcaataggaaagccagggccagagcgagccatgccagccctactgccgatgccaaatatttgagagaagggaacttttgctgaggttttctctgaggtttttttgatgctttataggaaactattttttaaaaaaagccatttcccacccaaggacacagtggatgtgttttccctgactccagcagggcaaggaatgtagccgagaggttgtgtgggctgggctctggtgccctcttccctggccaggacacctctcctcctgattcccttggccttgccatatgcaattgcatatggcaaggccaagtggaggatgagagggcggtgtcccaggctgagcagacagccagagggaggagtacttggtcaggctgagggactgcgccagctgaaaggtggaggcaagggagcagaggccagcaggggctgcctggagcctggggactctaccccaaccctagcagcgggaagagagggggcggggccctcacctgctcaaactcgtcagtgatggtcttgggctcctcgtgcctctggaaccacatcatgtacttggtgtggaatcgccatgactgttctttagggcc

SEQ ID NO: 276587 - DNA, 3443 bp, Homo sapiens
  misc_feature (3406)..(3406): n is a, c, g, or t
  misc_feature (3421)..(3421): n is a, c, g, or t
tccaagctgaattcgcggccgcgtcgaccacgccggccctgggcagtgacggggttcgggtgaccatggacagtgcgctcaccgcccgtgacagggtgggggtgcaggatttcgtgctgctggagaacttcaccagcgaggccgccttcatcgagaacctacggcggcgatttcgggagaatctcatctacacctacattggccccgtcctggtctctgtcaatccctaccgggacctgcagatctacagccggcaacatatggagcgttaccgtggcgtcagcttctatgaagtgccccctcacctgtttgccgtggcggacactgtgtaccgagcactgcgcacggagcgtcgggaccaggctgtgatgatctctggggagagcggggcaggcaagaccgaagccaccaagaagctgctgcagttctatgcagagacctgcccagccccccaacgcggaggtgccgtgcgggaccggctgctacagagcaacccggtgctggaggcctttggaaatgccaagaccctccggaacgataactccagcaggttcgggaagtacatggatgtgcagtttgacttcaagggtgcccccgtgggtggccacatcctcagttacctcctggaaaagtcacgagtggtgcaccagaatcatggggagcggaacttccacatcttctaccagctgctggaggggggcgaggaagaaactcttcgcaggctgggcttggaacggaacccccagagctacctgtacctggtgaagggccagtgtgccaaagtctcctccatcaacgacaagagtgactggaaggtcgtcaggaaggctctgacagtcattgatttcaccgaggatgaagtggaggacctgctaagcatcgtggccagcgtccttcatttgggcaacatccactttgctgccaacgaggacagcaatgcccaggtcaccaccgagaaccagctcaagtatctgaccaggctcctcagcgtggaaggctcgacgctgcgagaagccctgacacacaggaagatcatcgccaagggggaagagctcctgagcccgctgaacctggaacaggccgcgtacgcacgaaacgccctcgccaaggctgtgtacagccgcacttttacctggctcgtcgggaaaatcaacaggtcgctggcctccaaggacgtggagagccccagctggcggagcaccacggttctcgggctcctggatatttatggcttcgaagtgtttcagcataacagctttgagcagttctgcatcaattactgcaacgaaaagctgcagcagctcttcatcgaactcccgctcaagtcggagcaggaggaatacgaggcagagggcatcgcgtgggaacccgtccagtatttcaacaacaaaatcatctgtgatctggtggaggagaagtttaagggcatcatctcgattttggatgaggagtgtctgcgcccgggggaggccacagacctgaccttcctggagaagctggaggatactgtcaagcaccatccacacttcctgacgcacaagctggctgaccagaggaccaggaaatctctgggccgaggggaattccgccttctgcactatgcgggggaggtgacctacagcgtgaccgggtttctggacaaaaacaatgaccttctcttccggaaccttaaggagaccatgtgtagctcaaagaatcccattatgagccagtgcttcgaccggagcgagctcagtgacaagaagcggccagagacggtcgccacccagttcaagatgagcctcctgcagctggtggagatcctgcagtctaaggagcccgcctacgtccgctgcatcaaacccaatgatgccaaacagcccggccgctttgacgaggtgctgatccgccaccaggtgaagtacctggggctgttggaaaacctgcgtgtgcgcagagctggctttgcctatcgccgcaaatacgaagctttcctgcaaaggtacaagtcactgtgcccagagacgtggcccacgtgggcaggacggccgcaggatggggtggctgtgctggtccgacacctgggctacaagccagaagagtacaagatgggcaggaccaagatcttcatccgcttccccaagaccctgtttgccacagaggatgccctggaggtccggcggcagagcctggccacaaagatccaagctgcctggaggggctttcactggcggcagaaattcctccgggtgaagagatcagccatctgcatccagtcgtggtggcgtggaacactgggccggaggaaggcagccaagaggaagtgggcggcacagaccatccggcggctcatccgaggcttcatcctgcgccacgccccccgctgccccgagaacgccttcttcttggaccatgtgcgcacgtcttttttgctaaacctgaggcggcagctgccccggaatgtcctggacacctcgtggcccacgcccccacctgccctgcgtgaggcctcagagcttctgcgggagttgtgcataaagaacatggtgtggaaatactgccggagtatcagccctgagtggaagcagcagctgcagcagaaggccgtggctagtgagatcttcaagggcaagaaggataattaccctcagagtgtacccaggctcttcatcagcactcggcttggtacagatgagatcagcccccgagtgctgcaggccttgggctctgagcccattcagtatgcggtgcctgttgtgaaatacgaccgcaagggctacaagcctcgctcccggcagctgctgctcacgcccaacgccgtcgtcatcgtggaggacgccaaagtcaagcagaggattgattacgccaacctgaccggaatctctgtcagcagcctgagcgacagtctttttgtgcttcatgtacagcgtgcggacaataagcaaaagggagatgtggtgctgcagagtgaccacgtgattgagacgctgaccaagacagccctcagtgccaaccgcgtgaacagcatcaacatcaaccagggcagcatcacgtttgcagggggccccggcagggatggcaccattgacttcacacccggctcggagctgctcatcaccaaggccaagaacgggcacctggctgtggtcgccccacggctgaattctcggtgataaaggcgcccactggaccctcccaacgcccaatgctttgcttttctcctcctccccttcccagttaccaaagactcgaacttccagacagggacccagggacaccccgaagcccacctgcaatctcccacctcctgcccatccctctcttgagggagcagcaggggccaggagctaccccaggagtgggccaggccgggccagggcatcacgtttgcaggaaagccacggcagggatggcaccattgacttcncacccggctcggagntgctcttcaccggccagcggct

SEQ ID NO: 276588 - DNA, 1329 bp, Homo sapiens
tagctcggtttccagttccatttcacctgctgactccaccactggcccgaccgccctgcctttgcctcatctctgcacctacccacatggcctcctctatttttgacccagatgtccccctcacctgagtcccaggagcccttggagcatccacgttcagtgtgttgagtgacatggctctcttcattctgcaaagagggcagcagggaggaaatgagtgaatccaggagtggcccccctccacgagggacctttccagcacagggtttgatctgtgtgtatcacaggggagatgggagccatggaaggttcttgagcaagatgggggtgggggtggggtgggctgtggattctgctgatgtcaggactctttgccgacctgatcaacactcacccggctgctcctgccgccgcctcgcctcggagccgggagaccagcttctcacttcctcgcctgatagactcacggatcttggagagtgagctgctgcggcgaagggcctggggaggggccggggatgctgctcagtcccccaggcccatgcagtccccacgcccaccccaggagccgaagcacagcccatcctcacctgttctgcgtcaccagctgtgcctgtgttgggggcacctagggggaaagatgggggacactgagatggggacatagagaagccaccaggagggaagacagacaggggctaggggctcaccgagaggggcgggtaggtcctccttgtggaggatttctttgtacagctcttccgcttgttgatacttgttctgtttcaggtaggctgaggcctgcggagaagggagtgtctgggaacttttcggaccccagttcccaacactgcatccagtcccgcctttttttttttttttgtagagacaggggtcttggtatgttgcccaggctggtcttgaactcctagcctcaagtgatcctcctgccttggcctcccaaagtgttggggttacaagcgtgaaccaccacgtctggccccactttctaatgtgctgacctggccgtatccttcccctgcctaaagccttgccctggggcagagtgggtttggagctcggccttacttcctgccctggggatggaggacaggcagcctcctgtttctgagcctgtctgctgtactttgggctggtggcatggcctcggtgcctcagtcttcccacacgcaaagtggagcgacagctcccacctcatagggacgctataagaactagcgatgtggggaccgggctaagaggggagccggccacagtgagctcaataaatgtctgctgctgccacctgtgcctgccagcttccgcttc

SEQ ID NO: 276589 - DNA, 4780 bp, Homo sapiens
gctatcttgctcaagctgatctcgaactcctgggttcgatcaatactcagacaatcttggcaggcgcaggaggaccaaattctagtgaatgagatcgagtctctcggctctttcccttccatgttttctttttgattggccctcgacgatcctcagtgacgcctcccgcaccgcctcacccgagagtcagccgccctcgcttttccgtgcgcacgcgcagtatcccgattggctctgccctagcggattgacgggcaggttagccaatggtctcgtaatataggtggagcgagccctcgaggatgtccacgacccggcctctcgctgaatattcatgagggaggcgggtcgaccccgctgcacagtccggccggcgccatgaagtgagaagggggctgggggtcgcgctcgctagcgggcgcggggggtcttgaagatggggtcatcggtgggcgcgcctgggtccccaagggggcgaggggagggtgaaggggtgggacgggggcagccgcagggagcagcagtgatagcgaggagacactgagggggccccgaggctcctgaggacctgagggttaccgggggcgccgggcccgtcacccttctctgggctcgacgaccgggcactgtggaggcgggagaggggctgaggggacgggaactgacccagcagcccctgccgccaggctcaacgtggacgggctcctggtctacttcccgtacgactacatctaccccgagcagttctcctacatgcgggagctcaaacgcacgctggacgccaagggtcatggagtcctggagatgccctcaggcaccgggaagacagtatccctgttggccctgatcatggcataccagagagcatatccgctggaggtgaccaaactcatctactgctcaagaactgtgccagagattgagaaggtgattgaagagcttcgaaagttgctcaacttctatgagaagcaggagggcgagaagctgccgtttctgggactggctctgagctcccgcaaaaacttgtgtattcaccctgaggtgacacccctgcgctttgggaaggacgtcgatgggaaatgccacagcctcacagcctcctatgtgcgggcgcagtaccagcatgacaccagcctgccccactgccgattctatgaggaatttgatgcccatgggcgtgaggtgcccctccccgctggcatctacaacctggatgacctgaaggccctggggcggcgccagggctggtgcccatacttccttgctcgatactcaatcctgcatgccaatgtggtggtttatagctaccactacctcctggaccccaagattgcagacctggtgtccaaggaactggcccgcaaggccgtcgtggtcttcgacgaggcccacaacattgacaacgtctgcatcgactccatgagcgtcaacctcacccgccggacccttgaccggtgccagggcaacctggagaccctgcagaagacggtgctcaggatcaaagagacagacgagcagcgcctgcgggacgagtaccggcgtctggtggaggggctgcgggaggccagcgccgcccgggagacggacgcccacctggccaaccccgtgctgcccgacgaagtgctgcaggaggcagtgcctggctccatccgcacggccgagcatttcctgggcttcctgaggcggctgctggagtacgtgaagtggcggctgcgtgtgcagcatgtggtgcaggagagcccgcccgccttcctgagcggcctggcccagcgcgtgtgcatccagcgcaagcccctcagattctgtgctgaacgcctccggtccctgctgcatactctggagatcaccgaccttgctgacttctccccgctcaccctccttgctaactttgccacccttgtcagcacctacgccaaaggcttcaccatcatcatcgagccctttgacgacagaaccccgaccattgccaaccccatcctgcacttcagctgcatggacgcctcgctggccatcaaacccgtatttgagcgtttccagtctgtcatcatcacatctgggacactgtccccgctggacatctaccccaagatcctggacttccaccccgtcaccatggcaaccttcaccatgacgctggcacgggtctgcctctgccctatgatcatcggccgtggcaatgaccaggtggccatcagctccaaatttgagacccgggaggatattgctgtgatccggaactatgggaacctcctgctggagatgtccgctgtggtccctgatggcatcgtggccttcttcaccagctaccagtacatggagagcaccgtggcctcctggtatgagcaggggatccttgagaacatccagaggaacaagctgctctttattgagacccaggatggtgccgaaaccagtgtcgccctggagaagtaccaggaggcctgcgagaatggccgcggggccatcctgctgtcagtggcccggggcaaagtgtccgagggaatcgactttgtgcaccactacgggcgggccgtcatcatgtttggcgtcccctacgtctacacacagagccgcattctcaaggcgcggctggaatacctgcgggaccagttccagattcgtgagaatgactttcttaccttcgatgccatgcgccacgcggcccagtgtgtgggtcgggccatcaggggcaagacggactacggcctcatggtctttgccgacaagcggtttgcccgtggggacaagcgggggaagctgccccgctggatccaggagcacctcacagatgccaacctcaacctgaccgtggacgagggtgtccaggtggccaagtacttcctgcggcagatggcacagcccttccaccgggaggatcagctgggcctgtccctgctcagcctggagcagctagaatcagaggagacgctgaagaggatagagcagattgctcagcagctctgagtggggcgggtggggccataaacggttcctggtgactcctgagtcttgcctggccctggttcccagcggcggtggtgctagaaggtcttatgaagtcaggtgacatttctcactgtcacgtccacagcctttaatcgcaggagaaggcagctatccaccaggtacccagaggcaagggggggccaggagatgatagaccccctctcaccccaccagcccatccctcctgcactgttcccaagaagctgcggccagcgcagttcactggacgttagtgggggctcaggtcctgggtgctggcgctgagggtccgaggggccttgtccaggtgccagctgggaaactggagacaggcacaggggatggttggaggggaggtgaggggcaagtgttacatccaccctccagctccaggtccagcctggcagccaactatccaaccccctcgcctctaccccaagtaaaacccatctttgctcctgtcctgggtctcttctgacaccaacccaccacctgctgactccaccactggcccgaccgccctgcctttgcctcatctctgcacctacccacatggcctcctctatttttgacccagatgtccccctcacctgagtcccaggagcccttggagcatccacgttcagtgtgttgagtgacatggctctcttcattctgcaaagagggcagcagggaggaaatgagtgaatccaggagtggcccccctccacgagggacctttccagcacagggtttgatctgtgtgtatcacaggggagatgggagccatggaaggttcttgagcaagatgggggtgggggtggggtgggctgtggattctgctgatgtcaggactctttgccgacctgatcaacactcacccggctgctcctgccgccgcctcgcctcggagccgggagaccagcttctcacttcctcgcctgatagactcacggatcttggagagtgagctgctgcggcgaagggcctggggaggggccggggatgctgctcagtcccccaggcccatgcagtccccacgcccaccccaggagccgaagcacagcccatcctcacctgttctgcgtcaccagctgtgcctgtgttgggggcacctagggggaaagatgggggacactgagatggggacatagagaagccaccaggagggaagacagacaggggctaggggctcaccgagaggggcgggtaggtcctccttgtggaggatttctttgtacagctcttccgcttgttgatacttgttctgtttcaggtaggctgaggcctgcggagaagggagtgtctgggaacttttcggaccccagttcccaacactgcatccagtcccgcctttttttttttttttgtagagacaggggtcttggtatgttgcccaggctggtcttgaactcctagcctcaagtgatcctcctgccttggcctcccaaagtgttggggttacaagcgtgaaccaccacgtctggccccactttctaatgtgctgacctggccgtatccttcccctgcctaaagccttgccctggggcagagtgggtttggagctcggccttacttcctgccctggggatggaggacaggcagcctcctgtttctgagcctgtctgctgtactttgggctggtggcatggcctcggtgcctcagtcttcccacacgcaaagtggagcgacagctcccacctcatagggacgctataagaactagcgatgtggggaccgggctaagaggggagccggccacagtgagctcaataaatgtctgctgctgccacctgtgcctgccagcttccgcttc

SEQ ID NO: 276590 - DNA, 2999 bp, Homo sapiens
gctatcttgctcaagctgatctcgaactcctgggttcgatcaatactcagacaatcttggcaggcgcaggaggaccaaattctagtgaatgagatcgagtctctcggctctttcccttccatgttttctttttgattggccctcgacgatcctcagtgacgcctcccgcaccgcctcacccgagagtcagccgccctcgcttttccgtgcgcacgcgcagtatcccgattggctctgccctagcggattgacgggcaggttagccaatggtctcgtaatataggtggagcgagccctcgaggatgtccacgacccggcctctcgctgaatattcatgagggaggcgggtcgaccccgctgcacagtccggccggcgccatgaagtgagaagggggctgggggtcgcgctcgctagcgggcgcggggggtcttgaagatggggtcatcggtgggcgcgcctgggtccccaagggggcgaggggagggtgaaggggtgggacgggggcagccgcagggagcagcagtgatagcgaggagacactgagggggccccgaggctcctgaggacctgagggttaccgggggcgccgggcccgtcacccttctctgggctcgacgaccgggcactgtggaggcgggagaggggctgaggggacgggaactgacccagcagcccctgccgccaggctcaacgtggacgggctcctggtctacttcccgtacgactacatctaccccgagcagttctcctacatgcgggagctcaaacgcacgctggacgccaagggtcatggagtcctggagatgccctcaggcaccgggaagacagtatccctgttggccctgatcatggcataccagagagcatatccgctggaggtgaccaaactcatctactgctcaagaactgtgccagagattgagaaggtgattgaagagcttcgaaagttgctcaacttctatgagaagcaggagggcgagaagctgccgtttctgggactggctctgagctcccgcaaaaacttgtgtattcaccctgaggtgacacccctgcgctttgggaaggacgtcgatgggaaatgccacagcctcacagcctcctatgtgcgggcgcagtaccagcatgacaccagcctgccccactgccgattctatgaggaatttgatgcccatgggcgtgaggtgcccctccccgctggcatctacaacctggatgacctgaaggccctggggcggcgccagggctggtgcccatacttccttgctcgatactcaatcctgcatgccaatgtggtggtttatagctaccactacctcctggaccccaagattgcagacctggtgtccaaggaactggcccgcaaggccgtcgtggtcttcgacgaggcccacaacattgacaacgtctgcatcgactccatgagcgtcaacctcacccgccggacccttgaccggtgccagggcaacctggagaccctgcagaagacggtgctcaggatcaaagagacagacgagcagcgcctgcgggacgagtaccggcgtctggtggaggggctgcgggaggccagcgccgcccgggagacggacgcccacctggccaaccccgtgctgcccgacgaagtgctgcaggaggcagtgcctggctccatccgcacggccgagcatttcctgggcttcctgaggcggctgctggagtacgtgaagtggcggctgcgtgtgcagcatgtggtgcaggagagcccgcccgccttcctgagcggcctggcccagcgcgtgtgcatccagcgcaagcccctcagattctgtgctgaacgcctccggtccctgctgcatactctggagatcaccgaccttgctgacttctccccgctcaccctccttgctaactttgccacccttgtcagcacctacgccaaaggcttcaccatcatcatcgagccctttgacgacagaaccccgaccattgccaaccccatcctgcacttcagctgcatggacgcctcgctggccatcaaacccgtatttgagcgtttccagtctgtcatcatcacatctgggacactgtccccgctggacatctaccccaagatcctggacttccaccccgtcaccatggcaaccttcaccatgacgctggcacgggtctgcctctgccctatgatcatcggccgtggcaatgaccaggtggccatcagctccaaatttgagacccgggaggatattgctgtgatccggaactatgggaacctcctgctggagatgtccgctgtggtccctgatggcatcgtggccttcttcaccagctaccagtacatggagagcaccgtggcctcctggtatgagcaggggatccttgagaacatccagaggaacaagctgctctttattgagacccaggatggtgccgaaaccagtgtcgccctggagaagtaccaggaggcctgcgagaatggccgcggggccatcctgctgtcagtggcccggggcaaagtgtccgagggaatcgactttgtgcaccactacgggcgggccgtcatcatgtttggcgtcccctacgtctacacacagagccgcattctcaaggcgcggctggaatacctgcgggaccagttccagattcgtgagaatgactttcttaccttcgatgccatgcgccacgcggcccagtgtgtgggtcgggccatcaggggcaagacggactacggcctcatggtctttgccgacaagcggtttgcccgtggggacaagcgggggaagctgccccgctggatccaggagcacctcacagatgccaacctcaacctgaccgtggacgagggtgtccaggtggccaagtacttcctgcggcagatggcacagcccttccaccgggaggatcagctgggcctgtccctgctcagcctggagcagctagaatcagaggagacgctgaagaggatagagcagattgctcagcagctctgagtggggcgggtggggccataaacggttcctggtga

SEQ ID NO: 276591 - DNA, 4477 bp, Homo sapiens
gctatcttgctcaagctgatctcgaactcctgggttcgatcaatactcagacaatcttggcaggcgcaggaggaccaaattctagtgaatgagatcgagtctctcggctctttcccttccatgttttctttttgattggccctcgacgatcctcagtgacgcctcccgcaccgcctcacccgagagtcagccgccctcgcttttccgtgcgcacgcgcagtatcccgattggctctgccctagcggattgacgggcaggttagccaatggtctcgtaatataggtggagcgagccctcgaggatgtccacgacccggcctctcgctgaatattcatgagggaggcgggtcgaccccgctgcacagtccggccggcgccatgaagctcaacgtggacgggctcctggtctacttcccgtacgactacatctaccccgagcagttctcctacatgcgggagctcaaacgcacgctggacgccaagggtcatggagtcctggagatgccctcaggcaccgggaagacagtatccctgttggccctgatcatggcataccagagagcatatccgctggaggtgaccaaactcatctactgctcaagaactgtgccagagattgagaaggtgattgaagagcttcgaaagttgctcaacttctatgagaagcaggagggcgagaagctgccgtttctgggactggctctgagctcccgcaaaaacttgtgtattcaccctgaggtgacacccctgcgctttgggaaggacgtcgatgggaaatgccacagcctcacagcctcctatgtgcgggcgcagtaccagcatgacaccagcctgccccactgccgattctatgaggaatttgatgcccatgggcgtgaggtgcccctccccgctggcatctacaacctggatgacctgaaggccctggggcggcgccagggctggtgcccatacttccttgctcgatactcaatcctgcatgccaatgtggtggtttatagctaccactacctcctggaccccaagattgcagacctggtgtccaaggaactggcccgcaaggccgtcgtggtcttcgacgaggcccacaacattgacaacgtctgcatcgactccatgagcgtcaacctcacccgccggacccttgaccggtgccagggcaacctggagaccctgcagaagacggtgctcaggatcaaagagacagacgagcagcgcctgcgggacgagtaccggcgtctggtggaggggctgcgggaggccagcgccgcccgggagacggacgcccacctggccaaccccgtgctgcccgacgaagtgctgcaggaggcagtgcctggctccatccgcacggccgagcatttcctgggcttcctgaggcggctgctggagtacgtgaagtggcggctgcgtgtgcagcatgtggtgcaggagagcccgcccgccttcctgagcggcctggcccagcgcgtgtgcatccagcgcaagcccctcagattctgtgctgaacgcctccggtccctgctgcatactctggagatcaccgaccttgctgacttctccccgctcaccctccttgctaactttgccacccttgtcagcacctacgccaaaggcttcaccatcatcatcgagccctttgacgacagaaccccgaccattgccaaccccatcctgcacttcagctgcatggacgcctcgctggccatcaaacccgtatttgagcgtttccagtctgtcatcatcacatctgggacactgtccccgctggacatctaccccaagatcctggacttccaccccgtcaccatggcaaccttcaccatgacgctggcacgggtctgcctctgccctatgatcatcggccgtggcaatgaccaggtggccatcagctccaaatttgagacccgggaggatattgctgtgatccggaactatgggaacctcctgctggagatgtccgctgtggtccctgatggcatcgtggccttcttcaccagctaccagtacatggagagcaccgtggcctcctggtatgagcaggggatccttgagaacatccagaggaacaagctgctctttattgagacccaggatggtgccgaaaccagtgtcgccctggagaagtaccaggaggcctgcgagaatggccgcggggccatcctgctgtcagtggcccggggcaaagtgtccgagggaatcgactttgtgcaccactacgggcgggccgtcatcatgtttggcgtcccctacgtctacacacagagccgcattctcaaggcgcggctggaatacctgcgggaccagttccagattcgtgagaatgactttcttaccttcgatgccatgcgccacgcggcccagtgtgtgggtcgggccatcaggggcaagacggactacggcctcatggtctttgccgacaagcggtttgcccgtggggacaagcgggggaagctgccccgctggatccaggagcacctcacagatgccaacctcaacctgaccgtggacgagggtgtccaggtggccaagtacttcctgcggcagatggcacagcccttccaccgggaggatcagctgggcctgtccctgctcagcctggagcagctagaatcagaggagacgctgaagaggatagagcagattgctcagcagctctgagtggggcgggtggggccataaacggttcctggtgactcctgagtcttgcctggccctggttcccagcggcggtggtgctagaaggtcttatgaagtcaggtgacatttctcactgtcacgtccacagcctttaatcgcaggagaaggcagctatccaccaggtacccagaggcaagggggggccaggagatgatagaccccctctcaccccaccagcccatccctcctgcactgttcccaagaagctgcggccagcgcagttcactggacgttagtgggggctcaggtcctgggtgctggcgctgagggtccgaggggccttgtccaggtgccagctgggaaactggagacaggcacaggggatggttggaggggaggtgaggggcaagtgttacatccaccctccagctccaggtccagcctggcagccaactatccaaccccctcgcctctaccccaagtaaaacccatctttgctcctgtcctgggtctcttctgacaccaacccaccacctgctgactccaccactggcccgaccgccctgcctttgcctcatctctgcacctacccacatggcctcctctatttttgacccagatgtccccctcacctgagtcccaggagcccttggagcatccacgttcagtgtgttgagtgacatggctctcttcattctgcaaagagggcagcagggaggaaatgagtgaatccaggagtggcccccctccacgagggacctttccagcacagggtttgatctgtgtgtatcacaggggagatgggagccatggaaggttcttgagcaagatgggggtgggggtggggtgggctgtggattctgctgatgtcaggactctttgccgacctgatcaacactcacccggctgctcctgccgccgcctcgcctcggagccgggagaccagcttctcacttcctcgcctgatagactcacggatcttggagagtgagctgctgcggcgaagggcctggggaggggccggggatgctgctcagtcccccaggcccatgcagtccccacgcccaccccaggagccgaagcacagcccatcctcacctgttctgcgtcaccagctgtgcctgtgttgggggcacctagggggaaagatgggggacactgagatggggacatagagaagccaccaggagggaagacagacaggggctaggggctcaccgagaggggcgggtaggtcctccttgtggaggatttctttgtacagctcttccgcttgttgatacttgttctgtttcaggtaggctgaggcctgcggagaagggagtgtctgggaacttttcggaccccagttcccaacactgcatccagtcccgcctttttttttttttttgtagagacaggggtcttggtatgttgcccaggctggtcttgaactcctagcctcaagtgatcctcctgccttggcctcccaaagtgttggggttacaagcgtgaaccaccacgtctggccccactttctaatgtgctgacctggccgtatccttcccctgcctaaagccttgccctggggcagagtgggtttggagctcggccttacttcctgccctggggatggaggacaggcagcctcctgtttctgagcctgtctgctgtactttgggctggtggcatggcctcggtgcctcagtcttcccacacgcaaagtggagcgacagctcccacctcatagggacgctataagaactagcgatgtggggaccgggctaagaggggagccggccacagtgagctcaataaatgtctgctgctgccacctgtgcctgccagcttccgcttc

SEQ ID NO: 276592 - DNA, 4542 bp, Homo sapiens
gctatcttgctcaagctgatctcgaactcctgggttcgatcaatactcagacaatcttggcaggcgcaggaggaccaaattctagtgaatgagatcgagtctctcggctctttcccttccatgttttctttttgattggccctcgacgatcctcagtgacgcctcccgcaccgcctcacccgagagtcagccgccctcgcttttccgtgcgcacgcgcagtatcccgattggctctgccctagcggattgacgggcaggttagccaatggtctcgtaatataggtggagcgagccctcgaggatgtccacgacccggcctctcgctgaatattcatgagggaggcgggtcgaccccgctgcacagtccggccggcgccatgaagtgagaagggggctgggggtcgcgctcgctagcgggcgcggggggtcttgaagatggggtcatcggctcaacgtggacgggctcctggtctacttcccgtacgactacatctaccccgagcagttctcctacatgcgggagctcaaacgcacgctggacgccaagggtcatggagtcctggagatgccctcaggcaccgggaagacagtatccctgttggccctgatcatggcataccagagagcatatccgctggaggtgaccaaactcatctactgctcaagaactgtgccagagattgagaaggtgattgaagagcttcgaaagttgctcaacttctatgagaagcaggagggcgagaagctgccgtttctgggactggctctgagctcccgcaaaaacttgtgtattcaccctgaggtgacacccctgcgctttgggaaggacgtcgatgggaaatgccacagcctcacagcctcctatgtgcgggcgcagtaccagcatgacaccagcctgccccactgccgattctatgaggaatttgatgcccatgggcgtgaggtgcccctccccgctggcatctacaacctggatgacctgaaggccctggggcggcgccagggctggtgcccatacttccttgctcgatactcaatcctgcatgccaatgtggtggtttatagctaccactacctcctggaccccaagattgcagacctggtgtccaaggaactggcccgcaaggccgtcgtggtcttcgacgaggcccacaacattgacaacgtctgcatcgactccatgagcgtcaacctcacccgccggacccttgaccggtgccagggcaacctggagaccctgcagaagacggtgctcaggatcaaagagacagacgagcagcgcctgcgggacgagtaccggcgtctggtggaggggctgcgggaggccagcgccgcccgggagacggacgcccacctggccaaccccgtgctgcccgacgaagtgctgcaggaggcagtgcctggctccatccgcacggccgagcatttcctgggcttcctgaggcggctgctggagtacgtgaagtggcggctgcgtgtgcagcatgtggtgcaggagagcccgcccgccttcctgagcggcctggcccagcgcgtgtgcatccagcgcaagcccctcagattctgtgctgaacgcctccggtccctgctgcatactctggagatcaccgaccttgctgacttctccccgctcaccctccttgctaactttgccacccttgtcagcacctacgccaaaggcttcaccatcatcatcgagccctttgacgacagaaccccgaccattgccaaccccatcctgcacttcagctgcatggacgcctcgctggccatcaaacccgtatttgagcgtttccagtctgtcatcatcacatctgggacactgtccccgctggacatctaccccaagatcctggacttccaccccgtcaccatggcaaccttcaccatgacgctggcacgggtctgcctctgccctatgatcatcggccgtggcaatgaccaggtggccatcagctccaaatttgagacccgggaggatattgctgtgatccggaactatgggaacctcctgctggagatgtccgctgtggtccctgatggcatcgtggccttcttcaccagctaccagtacatggagagcaccgtggcctcctggtatgagcaggggatccttgagaacatccagaggaacaagctgctctttattgagacccaggatggtgccgaaaccagtgtcgccctggagaagtaccaggaggcctgcgagaatggccgcggggccatcctgctgtcagtggcccggggcaaagtgtccgagggaatcgactttgtgcaccactacgggcgggccgtcatcatgtttggcgtcccctacgtctacacacagagccgcattctcaaggcgcggctggaatacctgcgggaccagttccagattcgtgagaatgactttcttaccttcgatgccatgcgccacgcggcccagtgtgtgggtcgggccatcaggggcaagacggactacggcctcatggtctttgccgacaagcggtttgcccgtggggacaagcgggggaagctgccccgctggatccaggagcacctcacagatgccaacctcaacctgaccgtggacgagggtgtccaggtggccaagtacttcctgcggcagatggcacagcccttccaccgggaggatcagctgggcctgtccctgctcagcctggagcagctagaatcagaggagacgctgaagaggatagagcagattgctcagcagctctgagtggggcgggtggggccataaacggttcctggtgactcctgagtcttgcctggccctggttcccagcggcggtggtgctagaaggtcttatgaagtcaggtgacatttctcactgtcacgtccacagcctttaatcgcaggagaaggcagctatccaccaggtacccagaggcaagggggggccaggagatgatagaccccctctcaccccaccagcccatccctcctgcactgttcccaagaagctgcggccagcgcagttcactggacgttagtgggggctcaggtcctgggtgctggcgctgagggtccgaggggccttgtccaggtgccagctgggaaactggagacaggcacaggggatggttggaggggaggtgaggggcaagtgttacatccaccctccagctccaggtccagcctggcagccaactatccaaccccctcgcctctaccccaagtaaaacccatctttgctcctgtcctgggtctcttctgacaccaacccaccacctgctgactccaccactggcccgaccgccctgcctttgcctcatctctgcacctacccacatggcctcctctatttttgacccagatgtccccctcacctgagtcccaggagcccttggagcatccacgttcagtgtgttgagtgacatggctctcttcattctgcaaagagggcagcagggaggaaatgagtgaatccaggagtggcccccctccacgagggacctttccagcacagggtttgatctgtgtgtatcacaggggagatgggagccatggaaggttcttgagcaagatgggggtgggggtggggtgggctgtggattctgctgatgtcaggactctttgccgacctgatcaacactcacccggctgctcctgccgccgcctcgcctcggagccgggagaccagcttctcacttcctcgcctgatagactcacggatcttggagagtgagctgctgcggcgaagggcctggggaggggccggggatgctgctcagtcccccaggcccatgcagtccccacgcccaccccaggagccgaagcacagcccatcctcacctgttctgcgtcaccagctgtgcctgtgttgggggcacctagggggaaagatgggggacactgagatggggacatagagaagccaccaggagggaagacagacaggggctaggggctcaccgagaggggcgggtaggtcctccttgtggaggatttctttgtacagctcttccgcttgttgatacttgttctgtttcaggtaggctgaggcctgcggagaagggagtgtctgggaacttttcggaccccagttcccaacactgcatccagtcccgcctttttttttttttttgtagagacaggggtcttggtatgttgcccaggctggtcttgaactcctagcctcaagtgatcctcctgccttggcctcccaaagtgttggggttacaagcgtgaaccaccacgtctggccccactttctaatgtgctgacctggccgtatccttcccctgcctaaagccttgccctggggcagagtgggtttggagctcggccttacttcctgccctggggatggaggacaggcagcctcctgtttctgagcctgtctgctgtactttgggctggtggcatggcctcggtgcctcagtcttcccacacgcaaagtggagcgacagctcccacctcatagggacgctataagaactagcgatgtggggaccgggctaagaggggagccggccacagtgagctcaataaatgtctgctgctgccacctgtgcctgccagcttccgcttc

SEQ ID NO: 276593 - DNA, 4716 bp, Homo sapiens
gctatcttgctcaagctgatctcgaactcctgggttcgatcaatactcagacaatcttggcaggcgcaggaggaccaaattctagtgaatgagatcgagtctctcggctctttcccttccatgttttctttttgattggccctcgacgatcctcagtgacgcctcccgcaccgcctcacccgagagtcagccgccctcgcttttccgtgcgcacgcgcagtatcccgattggctctgccctagcggattgacgggcaggttagccaatggtctcgtaatataggtggagcgagccctcgaggatgtccacgacccggcctctcgctgaatattcatgagggaggcgggtcgaccccgctgcacagtccggccggcgccatgaagtgagaagggggctgggggtcgcgctcgctagcgggcgcggggggtcttgaagatggggtcatcggtgggcgcgcctgggtccccaagggggcgaggggagggtgaaggggtgggacgggggcagccgcagggagcagcagtgatagcgaggagacactgagggggccccgaggctcctgaggacctgagggttaccgggggcgccgggcccgtcacccttctctgggctcgacgaccgggcactgtggaggcgggagaggggctgaggggacgggaactgacccagcagcccctgccgccaggctcaacgtggacgggctcctggtctacttcccgtacgactacatctaccccgagcagttctcctacatgcgggagctcaaacgcacgctggacgccaagggtcatggagtcctggagatgccctcaggcaccgggaagacagtatccctgttggccctgatcatggcataccagagagcatatccgctggaggtgaccaaactcatctactgctcaagaactgtgccagagattgagaaggtgattgaagagcttcgaaagttgctcaacttctatgagaagcaggagggcgagaagctgccgtttctgggactggctctgagctcccgcaaaaacttgtgtattcaccctgaggtgacacccctgcgctttgggaaggacgtcgatgggaaatgccacagcctcacagcctcctatgtgcgggcgcagtaccagcatgacaccagcctgccccactgccgattctatgaggaatttgatgcccatgggcgtgaggtgcccctccccgctggcatctacaacctggatgacctgaaggccctggggcggcgccagggctggtgcccatacttccttgctcgatactcaatcctgcatgccaatgtggtggtttatagctaccactacctcctggaccccaagattgcagacctggtgtccaaggaactggcccgcaaggccgtcgtggtcttcgacgaggcccacaacattgacaacgtctgcatcgactccatgagcgtcaacctcacccgccggacccttgaccggtgccagggcaacctggagaccctgcagaagacggtgctcaggatcaaagagacagacgagcagcgcctgcgggacgagtaccggcgtctggtggaggggctgcgggaggccagcgccgcccgggagacggacgcccacctggccaaccccgtgctgcccgacgaagtgctgcaggaggcagtgcctggctccatccgcacggccgagcatttcctgggcttcctgaggcggctgctggagtacgtgaagtggcggctgcgtgtgcagcatgtggtgcaggagagcccgcccgccttcctgagcggcctggcccagcgcgtgtgcatccagcgcaagcccctcagattctgtgctgaacgcctccggtccctgctgcatactctggagatcaccgaccttgctgacttctccccgctcaccctccttgctaactttgccacccttgtcagcacctacgccaaaggcttcaccatcatcatcgagccctttgacgacagaaccccgaccattgccaaccccatcctgcacttcagctgcatggacgcctcgctggccatcaaacccgtatttgagcgtttccagtctgtcatcatcacatctgggacactgtccccgctggacatctaccccaagatcctggacttccaccccgtcaccatggcaaccttcaccatgacgctggcacgggtctgcctctgccctatgctgtgatccggaactatgggaacctcctgctggagatgtccgctgtggtccctgatggcatcgtggccttcttcaccagctaccagtacatggagagcaccgtggcctcctggtatgagcaggggatccttgagaacatccagaggaacaagctgctctttattgagacccaggatggtgccgaaaccagtgtcgccctggagaagtaccaggaggcctgcgagaatggccgcggggccatcctgctgtcagtggcccggggcaaagtgtccgagggaatcgactttgtgcaccactacgggcgggccgtcatcatgtttggcgtcccctacgtctacacacagagccgcattctcaaggcgcggctggaatacctgcgggaccagttccagattcgtgagaatgactttcttaccttcgatgccatgcgccacgcggcccagtgtgtgggtcgggccatcaggggcaagacggactacggcctcatggtctttgccgacaagcggtttgcccgtggggacaagcgggggaagctgccccgctggatccaggagcacctcacagatgccaacctcaacctgaccgtggacgagggtgtccaggtggccaagtacttcctgcggcagatggcacagcccttccaccgggaggatcagctgggcctgtccctgctcagcctggagcagctagaatcagaggagacgctgaagaggatagagcagattgctcagcagctctgagtggggcgggtggggccataaacggttcctggtgactcctgagtcttgcctggccctggttcccagcggcggtggtgctagaaggtcttatgaagtcaggtgacatttctcactgtcacgtccacagcctttaatcgcaggagaaggcagctatccaccaggtacccagaggcaagggggggccaggagatgatagaccccctctcaccccaccagcccatccctcctgcactgttcccaagaagctgcggccagcgcagttcactggacgttagtgggggctcaggtcctgggtgctggcgctgagggtccgaggggccttgtccaggtgccagctgggaaactggagacaggcacaggggatggttggaggggaggtgaggggcaagtgttacatccaccctccagctccaggtccagcctggcagccaactatccaaccccctcgcctctaccccaagtaaaacccatctttgctcctgtcctgggtctcttctgacaccaacccaccacctgctgactccaccactggcccgaccgccctgcctttgcctcatctctgcacctacccacatggcctcctctatttttgacccagatgtccccctcacctgagtcccaggagcccttggagcatccacgttcagtgtgttgagtgacatggctctcttcattctgcaaagagggcagcagggaggaaatgagtgaatccaggagtggcccccctccacgagggacctttccagcacagggtttgatctgtgtgtatcacaggggagatgggagccatggaaggttcttgagcaagatgggggtgggggtggggtgggctgtggattctgctgatgtcaggactctttgccgacctgatcaacactcacccggctgctcctgccgccgcctcgcctcggagccgggagaccagcttctcacttcctcgcctgatagactcacggatcttggagagtgagctgctgcggcgaagggcctggggaggggccggggatgctgctcagtcccccaggcccatgcagtccccacgcccaccccaggagccgaagcacagcccatcctcacctgttctgcgtcaccagctgtgcctgtgttgggggcacctagggggaaagatgggggacactgagatggggacatagagaagccaccaggagggaagacagacaggggctaggggctcaccgagaggggcgggtaggtcctccttgtggaggatttctttgtacagctcttccgcttgttgatacttgttctgtttcaggtaggctgaggcctgcggagaagggagtgtctgggaacttttcggaccccagttcccaacactgcatccagtcccgcctttttttttttttttgtagagacaggggtcttggtatgttgcccaggctggtcttgaactcctagcctcaagtgatcctcctgccttggcctcccaaagtgttggggttacaagcgtgaaccaccacgtctggccccactttctaatgtgctgacctggccgtatccttcccctgcctaaagccttgccctggggcagagtgggtttggagctcggccttacttcctgccctggggatggaggacaggcagcctcctgtttctgagcctgtctgctgtactttgggctggtggcatggcctcggtgcctcagtcttcccacacgcaaagtggagcgacagctcccacctcatagggacgctataagaactagcgatgtggggaccgggctaagaggggagccggccacagtgagctcaataaatgtctgctgctgccacctgtgcctgccagcttccgcttc

SEQ ID NO: 276594 - DNA, 3933 bp, Homo sapiens
  misc_feature (39)..(39): n is a, c, g, or t
  misc_feature (42)..(42): n is a, c, g, or t
gaaaagaaaaatacttaggctaggtacgaggccgggtgntgntcatctactgctcaagaactgtgccagagattgagaaggtgattgaagagcttcgaaagttgctcaacttctatgagaagcaggagggcgagaagctgccgtttctgggactggctctgagctcccgcaaaaacttgtgtattcaccctgaggtgacacccctgcgctttgggaaggacgtcgatgggaaatgccacagcctcacagcctcctatgtgcgggcgcagtaccagcatgacaccagcctgccccactgccgattctatgaggaatttgatgcccatgggcgtgaggtgcccctccccgctggcatctacaacctggatgacctgaaggccctggggcggcgccagggctggtgcccatacttccttgctcgatactcaatcctgcatgccaatgtggtggtttatagctaccactacctcctggaccccaagattgcagacctggtgtccaaggaactggcccgcaaggccgtcgtggtcttcgacgaggcccacaacattgacaacgtctgcatcgactccatgagcgtcaacctcacccgccggacccttgaccggtgccagggcaacctggagaccctgcagaagacggtgctcaggatcaaagagacagacgagcagcgcctgcgggacgagtaccggcgtctggtggaggggctgcgggaggccagcgccgcccgggagacggacgcccacctggccaaccccgtgctgcccgacgaagtgctgcaggaggcagtgcctggctccatccgcacggccgagcatttcctgggcttcctgaggcggctgctggagtacgtgaagtggcggctgcgtgtgcagcatgtggtgcaggagagcccgcccgccttcctgagcggcctggcccagcgcgtgtgcatccagcgcaagcccctcagattctgtgctgaacgcctccggtccctgctgcatactctggagatcaccgaccttgctgacttctccccgctcaccctccttgctaactttgccacccttgtcagcacctacgccaaaggcttcaccatcatcatcgagccctttgacgacagaaccccgaccattgccaaccccatcctgcacttcagctgcatggacgcctcgctggccatcaaacccgtatttgagcgtttccagtctgtcatcatcacatctgggacactgtccccgctggacatctaccccaagatcctggacttccaccccgtcaccatggcaaccttcaccatgacgctggcacgggtctgcctctgccctatgatcatcggccgtggcaatgaccaggtggccatcagctccaaatttgagacccgggaggatattgctgtgatccggaactatgggaacctcctgctggagatgtccgctgtggtccctgatggcatcgtggccttcttcaccagctaccagtacatggagagcaccgtggcctcctggtatgagcaggggatccttgagaacatccagaggaacaagctgctctttattgagacccaggatggtgccgaaaccagtgtcgccctggagaagtaccaggaggcctgcgagaatggccgcggggccatcctgctgtcagtggcccggggcaaagtgtccgagggaatcgactttgtgcaccactacgggcgggccgtcatcatgtttggcgtcccctacgtctacacacagagccgcattctcaaggcgcggctggaatacctgcgggaccagttccagattcgtgagaatgactttcttaccttcgatgccatgcgccacgcggcccagtgtgtgggtcgggccatcaggggcaagacggactacggcctcatggtctttgccgacaagcggtttgcccgtggggacaagcgggggaagctgccccgctggatccaggagcacctcacagatgccaacctcaacctgaccgtggacgagggtgtccaggtggccaagtacttcctgcggcagatggcacagcccttccaccgggaggatcagctgggcctgtccctgctcagcctggagcagctagaatcagaggagacgctgaagaggatagagcagattgctcagcagctctgagtggggcgggtggggccataaacggttcctggtgactcctgagtcttgcctggccctggttcccagcggcggtggtgctagaaggtcttatgaagtcaggtgacatttctcactgtcacgtccacagcctttaatcgcaggagaaggcagctatccaccaggtacccagaggcaagggggggccaggagatgatagaccccctctcaccccaccagcccatccctcctgcactgttcccaagaagctgcggccagcgcagttcactggacgttagtgggggctcaggtcctgggtgctggcgctgagggtccgaggggccttgtccaggtgccagctgggaaactggagacaggcacaggggatggttggaggggaggtgaggggcaagtgttacatccaccctccagctccaggtccagcctggcagccaactatccaaccccctcgcctctaccccaagtaaaacccatctttgctcctgtcctgggtctcttctgacaccaacccaccacctgctgactccaccactggcccgaccgccctgcctttgcctcatctctgcacctacccacatggcctcctctatttttgacccagatgtccccctcacctgagtcccaggagcccttggagcatccacgttcagtgtgttgagtgacatggctctcttcattctgcaaagagggcagcagggaggaaatgagtgaatccaggagtggcccccctccacgagggacctttccagcacagggtttgatctgtgtgtatcacaggggagatgggagccatggaaggttcttgagcaagatgggggtgggggtggggtgggctgtggattctgctgatgtcaggactctttgccgacctgatcaacactcacccggctgctcctgccgccgcctcgcctcggagccgggagaccagcttctcacttcctcgcctgatagactcacggatcttggagagtgagctgctgcggcgaagggcctggggaggggccggggatgctgctcagtcccccaggcccatgcagtccccacgcccaccccaggagccgaagcacagcccatcctcacctgttctgcgtcaccagctgtgcctgtgttgggggcacctagggggaaagatgggggacactgagatggggacatagagaagccaccaggagggaagacagacaggggctaggggctcaccgagaggggcgggtaggtcctccttgtggaggatttctttgtacagctcttccgcttgttgatacttgttctgtttcaggtaggctgaggcctgcggagaagggagtgtctgggaacttttcggaccccagttcccaacactgcatccagtcccgcctttttttttttttttgtagagacaggggtcttggtatgttgcccaggctggtcttgaactcctagcctcaagtgatcctcctgccttggcctcccaaagtgttggggttacaagcgtgaaccaccacgtctggccccactttctaatgtgctgacctggccgtatccttcccctgcctaaagccttgccctggggcagagtgggtttggagctcggccttacttcctgccctggggatggaggacaggcagcctcctgtttctgagcctgtctgctgtactttgggctggtggcatggcctcggtgcctcagtcttcccacacgcaaagtggagcgacagctcccacctcatagggacgctataagaactagcgatgtggggaccgggctaagaggggagccggccacagtgagctcaataaatgtctgctgctgccacctgtgcctgccagcttccgcttc

SEQ ID NO: 276595 - DNA, 4702 bp, Homo sapiens
gctatcttgctcaagctgatctcgaactcctgggttcgatcaatactcagacaatcttggcaggcgcaggaggaccaaattctagtgaatgagatcgagtctctcggctctttcccttccatgttttctttttgattggccctcgacgatcctcagtgacgcctcccgcaccgcctcacccgagagtcagccgccctcgcttttccgtgcgcacgcgcagtatcccgattggctctgccctagcggattgacgggcaggttagccaatggtctcgtaatataggtggagcgagccctcgaggatgtccacgacccggcctctcgctgaatattcatgagggaggcgggtcgaccccgctgcacagtccggccggcgccatgaagtgagaagggggctgggggtcgcgctcgctagcgggcgcggggggtcttgaagatggggtcatcggtgggcgcgcctgggtccccaagggggcgaggggagggtgaaggggtgggacgggggcagccgcagggagcagcagtgatagcgaggagacactgagggggccccgaggctcctgaggacctgagggttaccgggggcgccgggcccgtcacccttctctgggctcgacgaccgggcactgtggaggcgggagaggggctgaggggacgggaactgacccagcagcccctgccgccaggctcaacgtggacgggctcctggtctacttcccgtacgactacatctaccccgagcagttctcctacatgcgggagctcaaacgcacgctggacgccaaggcatatccgctggaggtgaccaaactcatctactgctcaagaactgtgccagagattgagaaggtgattgaagagcttcgaaagttgctcaacttctatgagaagcaggagggcgagaagctgccgtttctgggactggctctgagctcccgcaaaaacttgtgtattcaccctgaggtgacacccctgcgctttgggaaggacgtcgatgggaaatgccacagcctcacagcctcctatgtgcgggcgcagtaccagcatgacaccagcctgccccactgccgattctatgaggaatttgatgcccatgggcgtgaggtgcccctccccgctggcatctacaacctggatgacctgaaggccctggggcggcgccagggctggtgcccatacttccttgctcgatactcaatcctgcatgccaatgtggtggtttatagctaccactacctcctggaccccaagattgcagacctggtgtccaaggaactggcccgcaaggccgtcgtggtcttcgacgaggcccacaacattgacaacgtctgcatcgactccatgagcgtcaacctcacccgccggacccttgaccggtgccagggcaacctggagaccctgcagaagacggtgctcaggatcaaagagacagacgagcagcgcctgcgggacgagtaccggcgtctggtggaggggctgcgggaggccagcgccgcccgggagacggacgcccacctggccaaccccgtgctgcccgacgaagtgctgcaggaggcagtgcctggctccatccgcacggccgagcatttcctgggcttcctgaggcggctgctggagtacgtgaagtggcggctgcgtgtgcagcatgtggtgcaggagagcccgcccgccttcctgagcggcctggcccagcgcgtgtgcatccagcgcaagcccctcagattctgtgctgaacgcctccggtccctgctgcatactctggagatcaccgaccttgctgacttctccccgctcaccctccttgctaactttgccacccttgtcagcacctacgccaaaggcttcaccatcatcatcgagccctttgacgacagaaccccgaccattgccaaccccatcctgcacttcagctgcatggacgcctcgctggccatcaaacccgtatttgagcgtttccagtctgtcatcatcacatctgggacactgtccccgctggacatctaccccaagatcctggacttccaccccgtcaccatggcaaccttcaccatgacgctggcacgggtctgcctctgccctatgatcatcggccgtggcaatgaccaggtggccatcagctccaaatttgagacccgggaggatattgctgtgatccggaactatgggaacctcctgctggagatgtccgctgtggtccctgatggcatcgtggccttcttcaccagctaccagtacatggagagcaccgtggcctcctggtatgagcaggggatccttgagaacatccagaggaacaagctgctctttattgagacccaggatggtgccgaaaccagtgtcgccctggagaagtaccaggaggcctgcgagaatggccgcggggccatcctgctgtcagtggcccggggcaaagtgtccgagggaatcgactttgtgcaccactacgggcgggccgtcatcatgtttggcgtcccctacgtctacacacagagccgcattctcaaggcgcggctggaatacctgcgggaccagttccagattcgtgagaatgactttcttaccttcgatgccatgcgccacgcggcccagtgtgtgggtcgggccatcaggggcaagacggactacggcctcatggtctttgccgacaagcggtttgcccgtggggacaagcgggggaagctgccccgctggatccaggagcacctcacagatgccaacctcaacctgaccgtggacgagggtgtccaggtggccaagtacttcctgcggcagatggcacagcccttccaccgggaggatcagctgggcctgtccctgctcagcctggagcagctagaatcagaggagacgctgaagaggatagagcagattgctcagcagctctgagtggggcgggtggggccataaacggttcctggtgactcctgagtcttgcctggccctggttcccagcggcggtggtgctagaaggtcttatgaagtcaggtgacatttctcactgtcacgtccacagcctttaatcgcaggagaaggcagctatccaccaggtacccagaggcaagggggggccaggagatgatagaccccctctcaccccaccagcccatccctcctgcactgttcccaagaagctgcggccagcgcagttcactggacgttagtgggggctcaggtcctgggtgctggcgctgagggtccgaggggccttgtccaggtgccagctgggaaactggagacaggcacaggggatggttggaggggaggtgaggggcaagtgttacatccaccctccagctccaggtccagcctggcagccaactatccaaccccctcgcctctaccccaagtaaaacccatctttgctcctgtcctgggtctcttctgacaccaacccaccacctgctgactccaccactggcccgaccgccctgcctttgcctcatctctgcacctacccacatggcctcctctatttttgacccagatgtccccctcacctgagtcccaggagcccttggagcatccacgttcagtgtgttgagtgacatggctctcttcattctgcaaagagggcagcagggaggaaatgagtgaatccaggagtggcccccctccacgagggacctttccagcacagggtttgatctgtgtgtatcacaggggagatgggagccatggaaggttcttgagcaagatgggggtgggggtggggtgggctgtggattctgctgatgtcaggactctttgccgacctgatcaacactcacccggctgctcctgccgccgcctcgcctcggagccgggagaccagcttctcacttcctcgcctgatagactcacggatcttggagagtgagctgctgcggcgaagggcctggggaggggccggggatgctgctcagtcccccaggcccatgcagtccccacgcccaccccaggagccgaagcacagcccatcctcacctgttctgcgtcaccagctgtgcctgtgttgggggcacctagggggaaagatgggggacactgagatggggacatagagaagccaccaggagggaagacagacaggggctaggggctcaccgagaggggcgggtaggtcctccttgtggaggatttctttgtacagctcttccgcttgttgatacttgttctgtttcaggtaggctgaggcctgcggagaagggagtgtctgggaacttttcggaccccagttcccaacactgcatccagtcccgcctttttttttttttttgtagagacaggggtcttggtatgttgcccaggctggtcttgaactcctagcctcaagtgatcctcctgccttggcctcccaaagtgttggggttacaagcgtgaaccaccacgtctggccccactttctaatgtgctgacctggccgtatccttcccctgcctaaagccttgccctggggcagagtgggtttggagctcggccttacttcctgccctggggatggaggacaggcagcctcctgtttctgagcctgtctgctgtactttgggctggtggcatggcctcggtgcctcagtcttcccacacgcaaagtggagcgacagctcccacctcatagggacgctataagaactagcgatgtggggaccgggctaagaggggagccggccacagtgagctcaataaatgtctgctgctgccacctgtgcctgccagcttccgcttc

SEQ ID NO: 276596 - DNA, 2065 bp, Homo sapiens
gctatcttgctcaagctgatctcgaactcctgggttcgatcaatactcagacaatcttggcaggcgcaggaggaccaaattctagtgaatgagatcgagtctctcggctctttcccttccatgttttctttttgattggccctcgacgatcctcagtgacgcctcccgcaccgcctcacccgagagtcagccgccctcgcttttccgtgcgcacgcgcagtatcccgattggctctgccctagcggattgacgggcaggttagccaatggtctcgtaatataggtggagcgagccctcgaggatgtccacgacccggcctctcgctgaatattcatgagggaggcgggtcgaccccgctgcacagtccggccggcgccatgaagtgagaagggggctgggggtcgcgctcgctagcgggcgcggggggtcttgaagatggggtcatcggtgggcgcgcctgggtccccaagggggcgaggggagggtgaaggggtgggacgggggcagccgcagggagcagcagtgatagcgaggagacactgagggggccccgaggctcctgaggacctgagggttaccgggggcgccgggcccgtcacccttctctgggctcgacgaccgggcactgtggaggcgggagaggggctgaggggacgggaactgacccagcagcccctgccgccaggctcaacgtggacgggctcctggtctacttcccgtacgactacatctaccccgagcagttctcctacatgcgggagctcaaacgcacgctggacgccaagggtcatggagtcctggagatgccctcaggcaccgggaagacagtatccctgttggccctgatcatggcataccagagagcatatccgctggaggtgaccaaactcatctactgctcaagaactgtgccagagattgagaaggtgattgaagagcttcgaaagttgctcaacttctatgagaagcaggagggcgagaagctgccgtttctgggactggctctgagctcccgcaaaaacttgtgtattcaccctgaggtgacacccctgcgctttgggaaggacgtcgatgggaaatgccacagcctcacagcctcctatgtgcgggcgcagtaccagcatgacaccagcctgccccactgccgattctatgaggaatttgatgcccatgggcgtgaggtgcccctccccgctggcatctacaacctggatgacctgaaggccctggggcggcgccagggctggtgcccatacttccttgctcgatactcaatcctgcatgccaatgtggtggtttatagctaccactacctcctggaccccaagattgcagacctggtgtccaaggaactggcccgcaaggccgtcgtggtcttcgacgaggcccacaacattgacaacgtctgcatcgactccatgagcgtcaacctcacccgccggacccttgaccggtgccagggcaacctggagaccctgcagaagacggtgctcaggatcaaagagacagacgagcagcgcctgcgggacgagtaccggcgtctggtggaggggctgcgggaggccagcgccgcccgggagacggacgcccacctggccaaccccgtgctgcccgacgaagtgctgcaggaggcagtgcctggctccatccgcacggccgagcatttcctgggcttcctgaggcggctgctggagtacgtgaagtggcggctgcgtgtgcagcatgtggtgcaggagagcccgcccgccttcctgagcggcctggcccagcgcgtgtgcatccagcgcaagcccctcagattctgtgctgaacgcctccggtccctgctgcatactctggagatcaccgaccttgctgacttctccccgctcaccctccttgctaactttgccacccttgtcagcacctacgccaaaggccaggctcagcactgtggaagcagcaggaaccaaaaaagatctcatccctaaccccccagaacttatattccagatgggaaaaccagtagcaaagatgcagccaaataaacaaggaaataattccagaaagtgacagttatcatga

SEQ ID NO: 276597 - DNA, 2264 bp, Homo sapiens
gctatcttgctcaagctgatctcgaactcctgggttcgatcaatactcagacaatcttggcaggcgcaggaggaccaaattctagtgaatgagatcgagtctctcggctctttcccttccatgttttctttttgattggccctcgacgatcctcagtgacgcctcccgcaccgcctcacccgagagtcagccgccctcgcttttccgtgcgcacgcgcagtatcccgattggctctgccctagcggattgacgggcaggttagccaatggtctcgtaatataggtggagcgagccctcgaggatgtccacgacccggcctctcgctgaatattcatgagggaggcgggtcgaccccgctgcacagtccggccggcgccatgaagtgagaagggggctgggggtcgcgctcgctagcgggcgcggggggtcttgaagatggggtcatcggtgggcgcgcctgggtccccaagggggcgaggggagggtgaaggggtgggacgggggcagccgcagggagcagcagtgatagcgaggagacactgagggggccccgaggctcctgaggacctgagggttaccgggggcgccgggcccgtcacccttctctgggctcgacgaccgggcactgtggaggcgggagaggggctgaggggacgggaactgacccagcagcccctgccgccaggctcaacgtggacgggctcctggtctacttcccgtacgactacatctaccccgagcagttctcctacatgcgggagctcaaacgcacgctggacgccaagggtcatggagtcctggagatgccctcaggcaccgggaagacagtatccctgttggccctgatcatggcataccagagagcatatccgctggaggtgaccaaactcatctactgctcaagaactgtgccagagattgagaaggtgattgaagagcttcgaaagttgctcaacttctatgagaagcaggagggcgagaagctgccgtttctgggactggctctgagctcccgcaaaaacttgtgtattcaccctgaggtgacacccctgcgctttgggaaggacgtcgatgggaaatgccacagcctcacagcctcctatgtgcgggcgcagtaccagcatgacaccagcctgccccactgccgattctatgaggaatttgatgcccatgggcgtgaggtgcccctccccgctggcatctacaacctggatgacctgaaggccctggggcggcgccagggctggtgcccatacttccttgctcgatactcaatcctgcatgccaatgtggtggtttatagctaccactacctcctggaccccaagattgcagacctggtgtccaaggaactggcccgcaaggccgtcgtggtcttcgacgaggcccacaacattgacaacgtctgcatcgactccatgagcgtcaacctcacccgccggacccttgaccggtgccagggcaacctggagaccctgcagaagacggtgctcaggatcaaagagacagacgagcagcgcctgcgggacgagtaccggcgtctggtggaggggctgcgggaggccagcgccgcccgggagacggacgcccacctggccaaccccgtgctgcccgacgaagtgctgcaggaggcagtgcctggctccatccgcacggccgagcatttcctgggcttcctgaggcggctgctggagtacgtgaagtggcggctgcgtgtgcagcatgtggtgcaggagagcccgcccgccttcctgagcggcctggcccagcgcgtgtgcatccagcgcaagcccctcagattctgtgctgaacgcctccggtccctgctgcatactctggagatcaccgaccttgctgacttctccccgctcaccctccttgctaactttgccacccttgtcagcacctacgccaaaggcttcaccatcatcatcgagccctttgacgacagaaccccgaccattgccaaccccatcctgcacttcagctgcatggacgcctcgctggccatcaaacccgtatttgagcgtttccagtctgtcatcatcacatctgggacactgtccccgctggacatctaccccaagatcctggacttccaccccgtcaccatggcaaccttcaccatgacgctggcacgggtctgcctctgccctatgatcatcggccgtggcaatgaccaggtggccatcagctccaaatttgagacccgggaggatattgggtatgctgccagtggggctggtttctgtgggttccaaga

SEQ ID NO: 276598 - DNA, 2774 bp, Homo sapiens
gctagttctagatcgcgatctagaactagtgtctgtcatcatcacatctgggacactgtccccgctggacatctaccccaagatcctggacttccaccccgtcaccatggcaaccttcaccatgacgctggcacgggtctgcctctgccctatgatcatcggccgtggcaatgaccaggtggccatcagctccaaatttgagacccgggaggatattgctgtgatccggaactatgggaacctcctgctggagatgtccgctgtggtccctgatggcatcgtggccttcttcaccagctaccagtacatggagagcaccgtggcctcctggtatgagcaggggatccttgagaacatccagaggaacaagctgctctttattgagacccaggatggtgccgaaaccagtgtcgccctggagaagtaccaggaggcctgcgagaatggccgcggggccatcctgctgtcagtggcccggggcaaagtgtccgagggaatcgactttgtgcaccactacgggcgggccgtcatcatgtttggcgtcccctacgtctacacacagagccgcattctcaaggcgcggctggaatacctgcgggaccagttccagattcgtgagaatgactttcttaccttcgatgccatgcgccacgcggcccagtgtgtgggtcgggccatcaggggcaagacggactacggcctcatggtctttgccgacaagcggtttgcccgtggggacaagcgggggaagctgccccgctggatccaggagcacctcacagatgccaacctcaacctgaccgtggacgagggtgtccaggtggccaagtacttcctgcggcagatggcacagcccttccaccgggaggatcagctgggcctgtccctgctcagcctggagcagctagaatcagaggagacgctgaagaggatagagcagattgctcagcagctctgagtggggcgggtggggccataaacggttcctggtgactcctgagtcttgcctggccctggttcccagcggcggtggtgctagaaggtcttatgaagtcaggtgacatttctcactgtcacgtccacagcctttaatcgcaggagaaggcagctatccaccaggtacccagaggcaagggggggccaggagatgatagaccccctctcaccccaccagcccatccctcctgcactgttcccaagaagctgcggccagcgcagttcactggacgttagtgggggctcaggtcctgggtgctggcgctgagggtccgaggggccttgtccaggtgccagctgggaaactggagacaggcacaggggatggttggaggggaggtgaggggcaagtgttacatccaccctccagctccaggtccagcctggcagccaactatccaaccccctcgcctctaccccaagtaaaacccatctttgctcctgtcctgggtctcttctgacaccaacccaccacctgctgactccaccactggcccgaccgccctgcctttgcctcatctctgcacctacccacatggcctcctctatttttgacccagatgtccccctcacctgagtcccaggagcccttggagcatccacgttcagtgtgttgagtgacatggctctcttcattctgcaaagagggcagcagggaggaaatgagtgaatccaggagtggcccccctccacgagggacctttccagcacagggtttgatctgtgtgtatcacaggggagatgggagccatggaaggttcttgagcaagatgggggtgggggtggggtgggctgtggattctgctgatgtcaggactctttgccgacctgatcaacactcacccggctgctcctgccgccgcctcgcctcggagccgggagaccagcttctcacttcctcgcctgatagactcacggatcttggagagtgagctgctgcggcgaagggcctggggaggggccggggatgctgctcagtcccccaggcccatgcagtccccacgcccaccccaggagccgaagcacagcccatcctcacctgttctgcgtcaccagctgtgcctgtgttgggggcacctagggggaaagatgggggacactgagatggggacatagagaagccaccaggagggaagacagacaggggctaggggctcaccgagaggggcgggtaggtcctccttgtggaggatttctttgtacagctcttccgcttgttgatacttgttctgtttcaggtaggctgaggcctgcggagaagggagtgtctgggaacttttcggaccccagttcccaacactgcatccagtcccgcctttttttttttttttgtagagacaggggtcttggtatgttgcccaggctggtcttgaactcctagcctcaagtgatcctcctgccttggcctcccaaagtgttggggttacaagcgtgaaccaccacgtctggccccactttctaatgtgctgacctggccgtatccttcccctgcctaaagccttgccctggggcagagtgggtttggagctcggccttacttcctgccctggggatggaggacaggcagcctcctgtttctgagcctgtctgctgtactttgggctggtggcatggcctcggtgcctcagtcttcccacacgcaaagtggagcgacagctcccacctcatagggacgctataagaactagcgatgtggggaccgggctaagaggggagccggccacagtgagctcaataaatgtctgctgctgccacctgtgcctgccagcttccgcttc

SEQ ID NO: 276599 - DNA, 1720 bp, Homo sapiens
gtgaggtgactctacaggatctttaaaggcgagccgggtagtggcggagtcataaggtggtgggttggtgtcagaagagacccaggacaggagatgatagaccccctctcaccccaccagcccatccctcctgcactgttcccaagaagctgcggccagcgcagttcactggacgttagtgggggctcaggtcctgggtgctggcgctgagggtccgaggggccttgtccaggtgccagctgggaaactggagacaggcacaggggatggttggaggggaggtgaggggcaagtgttacatccaccctccagctccaggtccagcctggcagccaactatccaaccccctcgcctctaccccaagtaaaacccatctttgctcctgtcctgggtctcttctgacaccaacccaccacctgctgactccaccactggcccgaccgccctgcctttgcctcatctctgcacctacccacatggcctcctctatttttgacccagatgtccccctcacctgagtcccaggagcccttggagcatccacgttcagtgtgttgagtgacatggctctcttcattctgcaaagagggcagcagggaggaaatgagtgaatccaggagtggcccccctccacgagggacctttccagcacagggtttgatctgtgtgtatcacaggggagatgggagccatggaaggttcttgagcaagatgggggtgggggtggggtgggctgtggattctgctgatgtcaggactctttgccgacctgatcaacactcacccggctgctcctgccgccgcctcgcctcggagccgggagaccagcttctcacttcctcgcctgatagactcacggatcttggagagtgagctgctgcggcgaagggcctggggaggggccggggatgctgctcagtcccccaggcccatgcagtccccacgcccaccccaggagccgaagcacagcccatcctcacctgttctgcgtcaccagctgtgcctgtgttgggggcacctagggggaaagatgggggacactgagatggggacatagagaagccaccaggagggaagacagacaggggctaggggctcaccgagaggggcgggtaggtcctccttgtggaggatttctttgtacagctcttccgcttgttgatacttgttctgtttcaggtaggctgaggcctgcggagaagggagtgtctgggaacttttcggaccccagttcccaacactgcatccagtcccgcctttttttttttttttgtagagacaggggtcttggtatgttgcccaggctggtcttgaactcctagcctcaagtgatcctcctgccttggcctcccaaagtgttggggttacaagcgtgaaccaccacgtctggccccactttctaatgtgctgacctggccgtatccttcccctgcctaaagccttgccctggggcagagtgggtttggagctcggccttacttcctgccctggggatggaggacaggcagcctcctgtttctgagcctgtctgctgtactttgggctggtggcatggcctcggtgcctcagtcttcccacacgcaaagtggagcgacagctcccacctcatagggacgctataagaactagcgatgtggggaccgggctaagaggggagccggccacagtgagctcaataaatgtctgctgctgccacctgtgcctgccagcttccgcttc

SEQ ID NO: 276600 - DNA, 493 bp, Homo sapiens
acactgtccccgctggacatctaccccaagatcctggacttccaccccgtcaccatggcaaccttcaccatgacgctggcacgggtctgcctctgccctatggtgagtgggagaggctagggctggggccgggaggggagatgggggcaaggggccgccctccttccttggcttcccccactgctcaggcaggagagctttacagcgaagaggctgggttcgggattcagacagacttaggcttgattctgcttctctgtgggctcgactctcaagcctcagttttctcatctgtgaaatgggaatgtatcctccctgatctcccagggtggttgagaggattgagagagagaactggggtaaaccacttaggtcgcccagggcctggcacaggtaggcgcttagtcagcatcttagcatcttgccgagtacgtggtctggctgtgacccaggtaagtgagccttcctctccgtctccgtctctgtaacacgt

SEQ ID NO: 276601 - DNA, 696 bp, Homo sapiens
tcaacatggccctggagctctacatggacctgctgtcagcaccctgccgtgccgtctacatcttctcgaagaagcatgacatccagttcaactttcagtttgtggatctgctgaaaggtcaccaccacagcaaagaatacattgacatcaaccccctcaggaagctgcccagcctcaaagatgggaaatttatcttaagtgaaagttgctgatcccaaagataacaggggaggaagtttcagctgagaagatggagcatgcagtggaagaggtgaagaacagcctgcagctctttgaggagtattttctgcaggataagatgttcatcaccgggaaccaaatctcactggctgacctggtggccgtggtggagatgatgcagcccatggcagccaactataatgtcttcctcaacagctccaagctagctgagtggcgtatgcaggtggagctgaatattggctctggcctctttagggaggcccatgatcgactaatgcagttggccgactgggacttttcaacattggattcaatggtcaaggagaatatttctgagttgctgaagaagagcaggtgaccctaggcgcagcctgtcccgcagggcctggctggcttagcaatctgagccaccttccttaaaggaaatgttaaaaaaacaactgttctttgcctaataaagaactggaacaacca

SEQ ID NO: 276602 - DNA, 921 bp, Homo sapiens
tcaacatggccctggagctctacatggacctgctgtcagcaccctgccgtgccgtctacatcttctcgaagaagcatgacatccagttcaactttcagtttgtggatctgctgaaaggtcaccaccacagcaaagaatacattgacatcaaccccctcaggaagctgcccagcctcaaagatgggaaatttatcttaagtgaaagttgctgatcccaaagataacaggggaggaagtttcagctgagaagatggagcatgcagtggaagaggtgaagaacagcctgcagctctttgaggagtattttctgcaggataagatgttcatcaccgggaaccaaatctcactggctgacctggtggccgtggtggagatgatgcaggccagcagcacagcgatgcctttgcccaggtgaaccccctgaggaaggtgccgggccttgaaggatggggacttcaccttggctgagagatttagtctcttactggttatgtatgctgcacctgaggagtagcagcactgccaaggacactgagtgtcttgtctgtgcagagcttcacatgaagctggagagaagggactggggcaagagggaaagataaaaaggggcaaatggctctcctcacctggacccacaggggtataccaaaggtgccacggatgcagtcggcatgccagcccaggtactcatgaacacgggcacgagcctgcaggtcagatggataccagtggtccggcgtctggtacttacagctcagaaggcaagctaaggttcagagaggctgtgatcccttcaaggccactcagtccacagcattctctggtggcagacgctgcaggaggaggatctcactctgttgccctggctggagtgcagtagcacgatcatggtcaccgcagtctcgactttcctgggctcag

SEQ ID NO: 276603 - DNA, 484 bp, Homo sapiens
acttttagtagagacggggtttcaccgtgttagccaggattgtctggatctcctgacctcgtaatccacccacctggcctcccaaagtgctaggattacaggtgtgagccacggcgccctgaggactggcagacccatctgactttcttggagtagaggaggaagaggaggaagaagaggtgcaggaggaagaccagggtgtggctgacatctagctggatgcagtggatgattctggaggacctcttgcccttctccttcatgacctgtagggcagggccaagaggaggaagcagcctcagaacagacaaaagactccctgccccaaacggcagtcatcccacagtcagcacttctggaaggaaggaaggaaggtttccttctgcagaaagctcctttttaccttgtttctgacaccagggagggtcagcagagcccagcgcacctgtggtgcctgagttaccatctatgcccaggatgtgcg

SEQ ID NO: 276604 - DNA, 298 bp, Homo sapiens
tgtgctgctaatgtcaacaggtacctgctgattagtcgggagggctcagaagcttccaggggtcccagagattggctggaccctgggcctgttgctcaactccctcctgaatcttcttctgggctacctctctgtcacctgggccatcccctatcccctgttccttgctctgtcacacacttctcactcgttccccaggcccatcccttgcctccccatccctgctctgtgccttttcctgtctttgtctccttccttctcgctgccctgtccctctgtcactcacattcccctttgt

SEQ ID NO: 276605 - DNA, 572 bp, Homo sapiens
cagtcggcactcaaccacctccgcccgagcgcccactctgtgcttcgtgctgggaaacaatgaagacacaccgggctggcctctgggggctcagaagtgcgctgggcgagacatgcttctcaggcctccgggagcattctgagcacgtactcggggagggcaggtccccacccacctgcccggaggaccttgctgggagcaggcatggcatggggcagaagggaaacctacgcggccccacccccactgcgctcccaactaaccaggctttcaataatcccacactaaacacctgctccccggaggtactgcggccctgggcagcgcccagctcaggggggacagggcgggggcggggcggagcctcaccttgaggatctcattggagccgaagccggacagcatgagggtgtccctctccatgtccaggatggcgcaggccaccagcagggcaggtgagcccaccccttcaggcctctcgcccaaactggctggcccacctcccacagccgaaggacatccgggaaggggaattccctcttgaaccagatgagcagccaccggaaacagaa

SEQ ID NO: 276606 - DNA, 241 bp, Homo sapiens
gtaacaaacctgcacattgtgcacatgtaccctaaaacttaaaatataataataaaaaaatatatatatatatttttttggctttgtgagccagacaatgggttgtagtttctcagctctgctgttgcagcatcaaagcattcatacacagtatataaatgaatgggcatggctgtgttccaataaaactttatttacaaaaagaggcagcagactagatctggcactccaggctatagtt

SEQ ID NO: 276607 - DNA, 6071 bp, Homo sapiens
  misc_feature (2311)..(2311): n is a, c, g, or t
  misc_feature (2833)..(2833): n is a, c, g, or t
  misc_feature (2866)..(2866): n is a, c, g, or t
  misc_feature (3623)..(3623): n is a, c, g, or t
  misc_feature (4655)..(4655): n is a, c, g, or t
  misc_feature (4821)..(4821): n is a, c, g, or t
  misc_feature (5000)..(5000): n is a, c, g, or t
  misc_feature (5638)..(5638): n is a, c, g, or t
  misc_feature (5672)..(5672): n is a, c, g, or t
  misc_feature (5725)..(5726): n is a, c, g, or t
  misc_feature (5729)..(5729): n is a, c, g, or t
  misc_feature (5776)..(5776): n is a, c, g, or t
ctcgaggcggccgtctcgctgggccaccgcagcctccgccacccgagcgacggcgcccgtccggatccgtagcgtttcgcggacgccgggacaggcggccccccgcggcgcaccccgccctacacgtccaggacgtggttgagataggagatgtagcagatggccaggcgcaggatctcgatcttggagagcttcttgtccgggggcagcgtgggcagcaatttgcggagctcggcgaaggccaagttgaaggcttccacgcggatgcgctcgcgggtggcgtgggccgagcggtacttggccgtggcgcgccggcggcggcgcttctcctcgcggctcagctgctgcgggtgcgggtagagcgcggctcggctgccgcccttgccgtcgccctcggcctcctccaccggctccaggtccgacacgctgccgagcaccttggtgtccgtgccgcccagggactccggatccgagtgcgccgagctgggatggtccgaatctgctgcttggtccggactcagcatcattttggaggctgaggaggggtcggaaaattaatcagtaaaaggaatcagggtattttgctggaaggatggctgccgaggcctaccacgccggtcctcccagcggacgcgcggcccgggccccctccccacagcaggccggcgcgcgacgcgggagggcgccgataggatctggcccgagggcgcgagccctgcgcctcgccctggcgcgggagccggcggggacgcggttgacccaggccgcatactagactggacacctcgacttgcagacggccacagcgggcctgtggccctgggcctggggaacaaccgcaggcctgtggggtcgcgactgggtttttgtgcctcttccggccaaatgccaaccgcgctattcctcctccctcccttcgtccccttcccggacaaacgagcgatttcgaacaacgaatacatctgggttttcacgggggcggggagacgcggggtgcacttctcgccccgagggcctccggcgaagcaacccggcagccgcggcgcccgagggcctggcgctggtctgggctgcgccgggggcgcctggctctggggtgcggccggtcaggaatccccatcctggagcgcaggcggagagccagtggctgggggcgggaaggcttcttggacccctcgcgcttctccgaaatcgtaaagaaatgactaaacaaacgtgggggagcctttaaaaagaaaattgactccgatgccctcgcaggctcccggagcaccatctgtcacgcagacagccacacacataggggacctagggacacggcgacgtgggatcagacaatgcgcccggcagtctggcgaccaccttgcgggaaaatgccggcagccgggccgctgagggaggagaggatgcagagggaagggaagagaagggaagggcccggggcggggcaggcggggactagcgggtgcagcgcgtgttgtcccggcgggagctgcatctctgccggcaaagttcgggcgctcccggaaccggagctcggcaggctgcagctgtccccgggtggcctggccaagtccgggcatgtcggtgcttagccttcctctaacttaactgtgccctcttggaaacgccacctggccaggcttctctggggcgcctggagcactggcccggactgtgcgccttctgggagggggccgctcagaaccgctgggcttccgggtaattcgggcttcgagaaagggcccggcaggaggagaaaggcccctgcaggggctgcacgcaccgcccctgggcgtcgggagtgaggaccaggctgagaactcggggccccggcgtgggcagcctccgcgacgctcggcacgggagaaatccgcgtcggcgacgtataggagcgtttgcttctagagaaacaaaagcaaggggatgggtgatcggttcccagcaccgcacttgcagaggagcgaattgggccaaaacagctttaatttccctgcgaggaaatcaggtcctctacggcaaaataaaaacaaatgctcccagtgagctgcatgtgactccctacgggcttttctcgggtacgtttatgagtagaacaacttgcacctacacagtcagcttgaaagggcagaaataaatagacgagtaatggaaaatcacaataagccactaaatagttgtagttctggtaaaaagttcctgggttgccctcaaagcacattaaattctcctctagatctttaaaaatattcataaatagtatgccgtgtatgcgttttatctctttatggaatgaactgcatctataganacagtatgaataatctaacttatttcaagctgaaaaaaattatttaaaggagtcttaccttgcaaaagcctttttgataatctgttctccaatctttagagttaaaattccaaggaatagcgaggggagattccggaaaatattaaaagcagcaaatatttattacattcaaaaatgaaaaagcagctgtcatctcgctggtgtccgcagcgagggacaataatatctcaggatgtagacgatatgaatgattgttcacttagttgatagattttttaaaaaacgctttttccttttaattgttctcaaacattgcaagaaattcgttgatgatttttttaaacgatgtgttgaaaagtctcgtgccttttttcctcttctaggtctctaaaaataacaaaagagatgcagagataaacacaatcacatcaaagggctgattcctccactttctaatagcggaataatcaataagaaagatggttaagataagattccgctcctatcgtatgcctttctttnccttaatacggctgagcagaaactgggaagtgnaggacagagatgtgatcttgctcagaagtgattttttttttttttttgagataaggctttgttcagctgatatctccccagttcccaggaacacaatactgtaactaggagctaaggttgcctcttcctcttccctcacttacttgtatgttgtataaatagacacctattttccagtttcaaagtctttcaaggtttggctatatcccccgtccccagcccctcttctctttaccttgtagcaaaatatatatagtcagtggcttggagatgcttggagaaaggttggtgaaaagtgaacgtctcctggagtaacagtgacaaggaagcagagaaagacgggaagagggtgggagagccagagcaaagaggcagagatgcgtgtgtggcttctgggctctcctggtaccaattgattcagcctggagatggtggaagagataaaggcttaggaagggggatggaatttttttcccctaaattgatatttaatgggaaatcctattggacagaaacctggacatgagtcacttaattggacttgacatctgtcacagtgtgggagttttcacagcccaaatattttagcagatcagattcccactgaatctgtgccataaaatataacaattgaaaagcagttcatgatagaaatcttagcctctaaacagtatctagccgtagtcaggctatttctcttttccagattattgatgaaatatttaagtacaaataaacaatatattgactatcaaanaattcccctggcatattacaaagccaccactttcccttaatatttagaaaaatatttgtgtccagaacatggaaatatatactatataagatgctgcaataaagtatttagacatgcaacagccaacatttattagagatcatttacattttaaaagatacttcagtaaggtttgattaagcatattaacatttttgagaaatgatctgctatgagactaacttatcaatagatggtaagaacctttcaatagattaagccattggtggaactagaaagagaatccacatattcacggaccacgacatgagataattctacttttctgtatgtttgtttttctctccacccactcattcattcaagctgaaatatgacatgctacatgtgttgattattgcacttcattcttgcccatcttaacatgctaatatattgtactgcgtggcagtgcttgtgccaagatgtaaacacaaattaccagtgtgtcccagtacataatgcctttgccttacatgatcccatggccctgaatttgtataccttataataaaaaataaaatctagttcaattattttgccactttatgaagatactcatagttaatatcaataacatattatttgtgattattttagcttgttttgatcatacaagcttaaagaaataaaagagcattacagccttactcccaccccgccagttcctaggggaacatttgtggagagaggagtcctcacttgtcttccttaattttgccctaaaagcagattttatcaccaggggaggcacattgagcagcccacccctgggagtgaccctccgggtttttcatggcttccacaagtactatttgcctttgcccacatttttgctcctttgagagattcctggaccacaatggggcaggggtcggggaaaggagggagtgcctccaacaaataagggcaccaacactccccagccttgcttctgcctaaccccagcacagaggtatattttagatatccccagaacgttaaagtgaaganggaagccggtcccatacaggtggcaatggaaatgggtgagtggataaacaccccaaggtggtgacaatgaagggagaagggaggttttctcactctagttaggaacagccaatgctaagcattcacacacaaccagaagtgtgcacacagatgcacacccacaganacctgtacctcctcccccttcatcatacaagctggctggctctattagaccaccacacatccatactgatggattgaaaaaaactggtgggtctaatcaccatagctctagagtgggcagctgctacagtgggaaaggaccagcatctctggttcccctggtgttggggagtcatgacngggtgtgcctatcagggcaggtccaattctgctatggtgtgtgtgataccagacaaattcccttttatgttcaggcttactcattctataccagcagccagcatacacaaaaattaatgcttacagaagtaagcctgtataaacaggtacacactcagatccatacttagtgatgcctagccacactgtcatagacacagacatggattcacattcacacacacacattctttcttccatcaaagcctccccctcccccacccctttgccttttctaagacctccctggcacagatggcccctccttctgtgctccataagcactcctttcatgtctcccttagagactacatattgtgtaccgtgattcttggttcttggttaccacactggtctctcttcctaggctatgatgcttccaggggaggtctgtagcttatatccccagcactaatgtctgagcttgacacattataggtactcagttcatttatgatgtgactctatgtacagaggtaccccagatatttgtaacatagaaacgcttccactaaaggacacccatggttcagttctatcaattttctttcctgtaaaaatgagaataataatattgcacttctcatttcacaggctcnctatgagacccaatgtatttgaaaatatttgatnaaatagtaagcaccatacaaattatgatattatagactataagagtaatattnnatnatattattaaatgaatggggaggtgataagtagtgacttaaaaagtncggctttgtggctctgtcatatgctagctgtgtgaatttagttgtaagttacttaacctttttggaccttagttttctaatctgtaaaatgagaataatcaaagcatgttatgtaatgttatgtcatgtttttttctgaaggtgaacaagataatatatgtaaagtgcttaaactaatgcctagaactcatgttcagtaagtgttggctatcattattattattattcagtataaatacatattgaggaacagatatatattgacatagaaaaataaacatatccagatatactc

SEQ ID NO: 276608 - DNA, 2081 bp, Homo sapiens
  misc_feature (1)..(2): n is a, c, g, or t
  misc_feature (4)..(4): n is a, c, g, or t
  misc_feature (8)..(8): n is a, c, g, or t
  misc_feature (795)..(795): n is a, c, g, or t
  misc_feature (938)..(938): n is a, c, g, or t
  misc_feature (1045)..(1045): n is a, c, g, or t
  misc_feature (1083)..(1083): n is a, c, g, or t
  misc_feature (1131)..(1131): n is a, c, g, or t
  misc_feature (1588)..(1588): n is a, c, g, or t
  misc_feature (1684)..(1684): n is a, c, g, or t
  misc_feature (1760)..(1760): n is a, c, g, or t
  misc_feature (1769)..(1769): n is a, c, g, or t
  misc_feature (1803)..(1803): n is a, c, g, or t
  misc_feature (1814)..(1815): n is a, c, g, or t
  misc_feature (1817)..(1817): n is a, c, g, or t
  misc_feature (1824)..(1824): n is a, c, g, or t
  misc_feature (1833)..(1835): n is a, c, g, or t
  misc_feature (1842)..(1844): n is a, c, g, or t
  misc_feature (1846)..(1846): n is a, c, g, or t
  misc_feature (1849)..(1849): n is a, c, g, or t
  misc_feature (1862)..(1862): n is a, c, g, or t
  misc_feature (1868)..(1868): n is a, c, g, or t
  misc_feature (1871)..(1871): n is a, c, g, or t
  misc_feature (1874)..(1874): n is a, c, g, or t
  misc_feature (1877)..(1877): n is a, c, g, or t
  misc_feature (1888)..(1888): n is a, c, g, or t
  misc_feature (1895)..(1896): n is a, c, g, or t
  misc_feature (1900)..(1900): n is a, c, g, or t
nncncgangcacgagcttggtgatgaagtccttcagctgcgccacgccctggcgcacggtgggctgcagcggctccatccaagcctccttggccctggaagccggcgtgtccatgttgcccacgttctggactgcctggaggtgacagcaggaaggaccaggttctgctaggtttaactgacgctgctgcactggataccccaccccggtgccgggcacataggtgcagcctgagagtaagcagacctgggttggaaggtcccgcgattcaccaccgacaggatgggcggccttggcaacccccgacccctcgcaggcctgttcccttatccatgagatggaactcggacaaggtggccacaggaagcctttgcaaactgtgaagtgcagtgcctacgtgggcgtgccagtggcctcgccggagccggtagggaacactctgcagtccaggccagggccccggtaggacacccagctgtgcatcccgcccgtggccgcaaggcccgcaccttggccaacaggagcagggtgcggctggtgcgggcgtccgcgtggcgctcccgcaggtggaagagcttgggcgacatgatggcgggagagaagaagcgcaggcacaggaagctggtgacggcgatgaacggtacattctggaggggtgcggaagagcgcgggctgggagtcccccagaccagggctcctggcagccccctccccttaggctccgtccctgaccctcgccgggacacagcctccctggtcctccccagcgctccctggttccccaccgctcttgcncgccctcgccccagcccagtccaacccggcccagcctagcccagcgggtggagggcgcacctcgtgctgggcgccggggaagcgctcgcgcacgcgccggaagagctggcggaaggtggcgcgcaccacggcggggcacgcgngaaccgagcggctgagcgcgctcagcagggcccccaggtgggcgcgcagcgtctgcgcgctctgctccagcacctcggcctcggtctgcgggcggtgcagcccggancacctgcgtggaacggggcgggttggcagaggaggtcncggtcagcgccagggccacgacaggaacagtggctctcacagcagccnggacacggacacaggggacaatacacgggtgggcagaagcacaaacacacatgctgacagggcctgatcccaacccgctgccgctgcaccccgcaacccccggagttacccccggcctcaccctacatccttaacttccactttgctggggtccagctccacgtacttcttctcctcaaacaccttgttgatgatggggcccaggacgccgtgcaggtactgcatcccggccacctggggaccaccgcaggtcacattgatcctgtctcccccagtcccactccagctgcccaccttctcccggcagccgcccttgcaccgtttgcctgccgtatccgcccaggagggggccaggtacacatgcagggcaaactgtttattcatgaatgaatgaatgagtgagtgaatgaatgactagaattcttagcccttgtaatcctagcactttgggaggccnaggcaggaggatcacttgaggccaggagtttgagaccagcctgggcaacatagtgagactgtctctaacttaaattttaatcacacacacattctnttgggggggggggtgcggggcacggagtctagcacggggcccaggctagagtgcagtggcgtgagctcactacaanctctggctnctggttcaagtgagtctcctgcctcagctactcnggaggctgagnnangagaatnacttgaacnnnggaggcnnngnttncagtgagccgagntcgtgncantgnacnccagcctggcnacagagnnagantccatctcaaaaaaaaaaaaaaaaaaaaaagaatgagtctggcccctttttgtctttctctcatcctctttgcctttcaccatgttatgatgcagcaagaagcccctcatcagatactagtgccatgaccttggacttcccagcctccagaactgtgagaaaataaatttctgttctatgt

SEQ ID NO: 276609 - DNA, 2302 bp, Homo sapiens
  misc_feature (1016)..(1016): n is a, c, g, or t
  misc_feature (1159)..(1159): n is a, c, g, or t
  misc_feature (1266)..(1266): n is a, c, g, or t
  misc_feature (1304)..(1304): n is a, c, g, or t
  misc_feature (1352)..(1352): n is a, c, g, or t
  misc_feature (1809)..(1809): n is a, c, g, or t
  misc_feature (1905)..(1905): n is a, c, g, or t
  misc_feature (1981)..(1981): n is a, c, g, or t
  misc_feature (1990)..(1990): n is a, c, g, or t
  misc_feature (2024)..(2024): n is a, c, g, or t
  misc_feature (2035)..(2036): n is a, c, g, or t
  misc_feature (2038)..(2038): n is a, c, g, or t
  misc_feature (2045)..(2045): n is a, c, g, or t
  misc_feature (2054)..(2056): n is a, c, g, or t
  misc_feature (2063)..(2065): n is a, c, g, or t
  misc_feature (2067)..(2067): n is a, c, g, or t
  misc_feature (2070)..(2070): n is a, c, g, or t
  misc_feature (2083)..(2083): n is a, c, g, or t
  misc_feature (2089)..(2089): n is a, c, g, or t
  misc_feature (2092)..(2092): n is a, c, g, or t
  misc_feature (2095)..(2095): n is a, c, g, or t
  misc_feature (2098)..(2098): n is a, c, g, or t
  misc_feature (2109)..(2109): n is a, c, g, or t
  misc_feature (2116)..(2117): n is a, c, g, or t
  misc_feature (2121)..(2121): n is a, c, g, or t
gtccctggaggccagacccctgggtgcggcccatcctagcagtggttctggctgggtctgtcctgggcaggagaggagggtccctggagaggcagtgatggctacagcgtctgtagggagctggggacacttccggccagccatgacaggcccaagcctgctcagctctgcacttctggggatccccttattcctgactctcccccctcccccacctggaagagacctaggccctgcaccctaatgaggaggaccggggtgagggggtgcagagtgtcctggggggggcggagcagtgggaggggccatggggctcaagggctgagcaaatctgaacagcaggcagtggacgtagtcatggggctcaagggcggagcaaacatcaacagctggtttaactgacgctgctgcactggataccccaccccggtgccgggcacataggtgcagcctgagagtaagcagacctgggttggaaggtcccgcgattcaccaccgacaggatgggcggccttggcaacccccgacccctcgcaggcctgttcccttatccatgagatggaactcggacaaggtggccacaggaagcctttgcaaactgtgaagtgcagtgcctacgtgggcgtgccagtggcctcgccggagccggtagggaacactctgcagtccaggccagggccccggtaggacacccagctgtgcatcccgcccgtggccgcaaggcccgcaccttggccaacaggagcagggtgcggctggtgcgggcgtccgcgtggcgctcccgcaggtggaagagcttgggcgacatgatggcgggagagaagaagcgcaggcacaggaagctggtgacggcgatgaacggtacattctggaggggtgcggaagagcgcgggctgggagtcccccagaccagggctcctggcagccccctccccttaggctccgtccctgaccctcgccgggacacagcctccctggtcctccccagcgctccctggttccccaccgctcttgcncgccctcgccccagcccagtccaacccggcccagcctagcccagcgggtggagggcgcacctcgtgctgggcgccggggaagcgctcgcgcacgcgccggaagagctggcggaaggtggcgcgcaccacggcggggcacgcgngaaccgagcggctgagcgcgctcagcagggcccccaggtgggcgcgcagcgtctgcgcgctctgctccagcacctcggcctcggtctgcgggcggtgcagcccggancacctgcgtggaacggggcgggttggcagaggaggtcncggtcagcgccagggccacgacaggaacagtggctctcacagcagccnggacacggacacaggggacaatacacgggtgggcagaagcacaaacacacatgctgacagggcctgatcccaacccgctgccgctgcaccccgcaacccccggagttacccccggcctcaccctacatccttaacttccactttgctggggtccagctccacgtacttcttctcctcaaacaccttgttgatgatggggcccaggacgccgtgcaggtactgcatcccggccacctggggaccaccgcaggtcacattgatcctgtctcccccagtcccactccagctgcccaccttctcccggcagccgcccttgcaccgtttgcctgccgtatccgcccaggagggggccaggtacacatgcagggcaaactgtttattcatgaatgaatgaatgagtgagtgaatgaatgactagaattcttagcccttgtaatcctagcactttgggaggccnaggcaggaggatcacttgaggccaggagtttgagaccagcctgggcaacatagtgagactgtctctaacttaaattttaatcacacacacattctnttgggggggggggtgcggggcacggagtctagcacggggcccaggctagagtgcagtggcgtgagctcactacaanctctggctnctggttcaagtgagtctcctgcctcagctactcnggaggctgagnnangagaatnacttgaacnnnggaggcnnngnttncagtgagccgagntcgtgncantgnacnccagcctggcnacagagnnagantccatctcaaaaaaaaaaaaaaaaaaaaaagaatgagtctggcccctttttgtctttctctcatcctctttgcctttcaccatgttatgatgcagcaagaagcccctcatcagatactagtgccatgaccttggacttcccagcctccagaactgtgagaaaataaatttctgttctatgt

SEQ ID NO: 276610 - DNA, 801 bp, Homo sapiens
  misc_feature (14)..(14): n is a, c, g, or t
  misc_feature (107)..(107): n is a, c, g, or t
  misc_feature (308)..(308): n is a, c, g, or t
  misc_feature (404)..(404): n is a, c, g, or t
  misc_feature (480)..(480): n is a, c, g, or t
  misc_feature (489)..(489): n is a, c, g, or t
  misc_feature (523)..(523): n is a, c, g, or t
  misc_feature (534)..(535): n is a, c, g, or t
  misc_feature (537)..(537): n is a, c, g, or t
  misc_feature (544)..(544): n is a, c, g, or t
  misc_feature (553)..(555): n is a, c, g, or t
  misc_feature (562)..(564): n is a, c, g, or t
  misc_feature (566)..(566): n is a, c, g, or t
  misc_feature (569)..(569): n is a, c, g, or t
  misc_feature (582)..(582): n is a, c, g, or t
  misc_feature (588)..(588): n is a, c, g, or t
  misc_feature (591)..(591): n is a, c, g, or t
  misc_feature (594)..(594): n is a, c, g, or t
  misc_feature (597)..(597): n is a, c, g, or t
  misc_feature (608)..(608): n is a, c, g, or t
  misc_feature (615)..(616): n is a, c, g, or t
  misc_feature (620)..(620): n is a, c, g, or t
tgcaaagataaggncaaataaagccatgcaaccctcaccttcaagaaaagactccatggactttgaggccagagagttgctccgaaacagggtgttggtcttttgtnacttggtcataagtaggcgttttccttttgatttggttctaggaggttagtgtgcattggcgttctgttgcctgcttccagcccctattctcctgcctcaggttcattagaaaaaactgtttattcatgaatgaatgaatgagtgagtgaatgaatgactagaattcttagcccttgtaatcctagcactttgggaggccnaggcaggaggatcacttgaggccaggagtttgagaccagcctgggcaacatagtgagactgtctctaacttaaattttaatcacacacacattctnttgggggggggggtgcggggcacggagtctagcacggggcccaggctagagtgcagtggcgtgagctcactacaanctctggctnctggttcaagtgagtctcctgcctcagctactcnggaggctgagnnangagaatnacttgaacnnnggaggcnnngnttncagtgagccgagntcgtgncantgnacnccagcctggcnacagagnnagantccatctcaaaaaaaaaaaaaaaaaaaaaagaatgagtctggcccctttttgtctttctctcatcctctttgcctttcaccatgttatgatgcagcaagaagcccctcatcagatactagtgccatgaccttggacttcccagcctccagaactgtgagaaaataaatttctgttctatgt

SEQ ID NO: 276611 - DNA, 652 bp, Homo sapiens
ctgagcggaagtacggaccgtgaactggagtggaatcgcgactatgggagctccggggggaaagatcaaccggccccgaacggagctgaagaagaagctgttcaaacgccggcgggtgttgaatcgggagcggcgtctgaggcaccgggtggtcggggctgtgatagaccaagggctgatcacgcggcaccacctcaagaagcgggcgtccagtgcacgtgccaacattacactgtcagggaagaagcgcagaaaactcctccagcagatccggcttgcccagaaagagaagacagccatggaagtggaagccccttcaaagccagccaggactagtgaaccacagctcaaaaggcaaaagaagacaaaagccccccaggatgtagaaatgaaggaccttgaagatgagagctaaacctcttccactagaagattctcaactggagccagccttcagactcagtggttgtttcagaggactttgacaaaagcaaggccccttttcactctccagatttcctcctacctaatggcctactgacctcccctagagggatgtctttgggagggaagaaggtacagaagaaagattggagaagggcctctctagcagtcaactccatttgtaataaagccctagcacttcttgaat

SEQ ID NO: 276612 - DNA, 769 bp, Homo sapiens
agtcgatttcgaacgatatgccctcggccgtagcgcctaaccgctaacatttacgtggcagggccacctactcagtgcacctaagttggaaggcaaccacgccctagcgagatagtcggagccaggtaaccttcgcctcgtacacttagtcatgttcagcaattctaagttgtacggactatcctagaaatgcgcatgtcgcctgtaatccaagcctacgtgtggtgcgacagtgtgctagtaagccgtcgagcgctgcatgaccgacacataatagtatagagaccaagggctgatcacgcggcaccacctcaagaagcgggcgtccagtgcacgtgccaacattacactgtcagggaagaagcgcagaaaactcctccagcagatccggcttgcccagaaagagaagacagccatggaagtggaagccccttcaaagccagccaggactagtgaaccacagctcaaaaggcaaaagaagacaaaagccccccaggatgtagaaatgaaggaccttgaagatgagagctaaacctcttccactagaagattctcaactggagccagccttcagactcagtggttgtttcagaggactttgacaaaagcaaggccccttttcactctccagatttcctcctacctaatggcctactgacctcccctagagggatgtctttgggagggaagaaggtacagaagaaagattggagaagggcctctctagcagtcaactccatttgtaataaagccctagcacttcttgaat

SEQ ID NO: 276613 - DNA, 417 bp, Homo sapiens
aaaaaaaaaaaaaaaaaaaaaaaaaaaaaaaaaaaaaaaaaaaaaaaaaaaaaaaaaaaaaagagagagagaacagaaccaacctccagtccggcagacctgaaatcaaatgagaaagtgtgagcaccccgatggaggagccagctggatctcggttgtccttctccgagattcccggtgtcccggcgtttgaggatagaaccagcggatgggaagccgccagcaccgaagacatgacgccgagggggccagagccctttccctcttcctccgtacattacggggagcggcaccacaagcccgatccccgccaagaaaaggagggtcctgagaccccgcccagagccttccacccggcacccccaccactcccggccgcccaatctggctactacagctaaaaccaccctcgtgccg

SEQ ID NO: 276614 - DNA, 377 bp, Homo sapiens
atttttccgcaaggaatccatggccgcctgcacagccagcggagcgcccacgggagctccccgcagccgcaagctgttgccgcgcggtctcactaccccttggcgcaggctagagcgccctatagcagaaaccatagataagcggccggctagagaggacctgctcgaggaaacgtttggaatccggagcgcttggatctcaggtttagctgagggggttgaggtgtccaagaagtgctggcaccaagggctgagcgcggggaccctgtgtcctcaattccggggtgggattgctagggggagagtgcgtgtcttcatggttgccgtgggttttatgattgcccatttttctgtcttccgacgtttcccgatcagta

SEQ ID NO: 276615 - DNA, 439 bp, Homo sapiens
agtagagatggggtttcaccatattgcccaggctggtctcaaactcctgagctcaggcaatctgcccgcctcagcctcccaagaagctacattcttttgagcatttactatgtaccaggtactatgctaaacacttttacttcatgattttcagaacaacccaatgaaggtacttcccctttataaatgagaaaattgaggctgcgaggttaggctcttagtgatataattgctctatttttttataagcaaaaaataccacagaaattaatttttagctcaagtgcagcagcttatcatggcccattgcagctttgacctcccagggttcaagcagtcctcccagctcagcctcctgagtagttggaactacatgcctgtgccactatcccgggctcatttgtttttgtagagttaggggtgtcactttattgccagg

SEQ ID NO: 276616 - DNA, 304 bp, Homo sapiens
ctccggggggataagacacggccgaacggagctgaagaagaagctgttcaaacgccggcgggtgttgaatcgggagcggcgtctgaggcaccgggtggtcggggctgtgatagaccaagggctgatcacgcggcaccacctcaagaagcgggctcgataagctatactccggtgtgcatagtaatcataagagtctatacgtttaatgcaaagacttagggtttgggaatcctgcaccacaggatggtacacacatcattgtataattgcagtatgctatcttttttcgtgatatgggatactc

SEQ ID NO: 276617 - DNA, 576 bp, Homo sapiens
ctgagcggaagtacggaccgtgaactggagtggaatcgcgactatgggagctccggggggaaagatcaaccggccccgaacggagctgaagaagaagctgttcaaacgccggcgggtgttgaatcgggagcggcgtctgaggcaccgggtggtcggggctgtgatagaccaagggctgatcacgcggcaccacctcaagaagcgggcgtccagtgcacgtgccaacattacactgtcagggaagaagcgcagaaaactcctccagcagatccggcttgcccagaaagagaagacagccatggaagtggaagccccttcaaagccagccaggactagtgaaccacagctcaaaaggcaaaagaagacaaaagccccccaggatgtagaaatgaaggaccttgaagatgagagctaaacctcttccactagaagattctcaactggagccagccttcagactcagtggttgtttcagaggactttgacaaaagcaaggcccttctccaatctttcttctgtaccttcttccctcccaaagacatccctctaggggaggtcagtaggccattaggtagg

SEQ ID NO: 276618 - DNA, 2039 bp, Homo sapiens
cacgcccggctggtattgctttttgttttgcttcgttttcttttttgctttttgagacagagtctcactctgttgcccagctggagtgcagtggcgtgatctcggctcactgcaagctctgcctcccgggttcacgccattctcctgcctcagcctcccgagtagctgggactacaggcgcccgccaccacggccggctaattttttgtatttttagtagagaaagagtttcactatgtaggtcaggctggtctcgaactcctgacctcgtgatccgcccaatccgcccacctcggcctcccaaagtgctgggattacaggtgtgagccaccgcgcccggctgttttgctttgttttcaaccactaaaaggctggattcgtgtaacatactgaattctgctttacagaagaaaacacctcttagctgtgtgactgattataggcaagttcttgtgccccggtttctgcatcagaaaatgaagcttataacaacagtacttgtctcacagttttaggataattaaattagttatatgtaaagcaattaaaacagctcctgccaaagagtaaacaccatataaatattcattaaataacatacaaacataccaggttgggaaaaatcagtaagcataggagtcaggaaattccaagttggttatcacaactcttggcccacagggctttaatccaggtgcccttgtctcctacccttgttgccatcccagtgtctccagggagtaagtagaaataaagatcctatctcacctcttgggcattttcccctgccctgaaagcgtataatcgcttagcacagtcggtgcttaaggggccaggctccaaagaagattaaaggaacagtttgtggggtgcactgggcagcagtactctcctctgagttcaatcatcttgcactctaagaatcaccaccatggcccttgtgccagggagaagcaaggaggatgggctttggactagaaatagcccaggctcctcccagcatccagaaagtcccaggctgcccaaccctctctgggacagaggaaaaattggcaaggttgaaggtcaccagcacattcaggatttctctcaaaagtcccatctgccgtctattgtggtggaatccagtgaggtgaatgaagagagtggggatctccatttgccccatgaggagctgctgctgctcactgatggtgaggaagaggatgctgaggccttcttccaagaccaaagtgaagagccaggctgggcttggagcccacaggaccctagaagtcctttaagaacatttaacgctggactcagctgggggcaggaccaggatgaagaagatgcttgttggattcttgaggacacagcatgtctggaagccaccaaccactgtcccttctgggactcaacaggctcccgtgtttgtagaagtggctttgtggaatattcccatctcctgcctcctaatagctttgagggagctgaagaagaagctgttcaaacgccggcgggtgttgaatcgggagcggcgtctgaggcaccgggtggtcggggctgtgatagaccaagggctgatcacgcggcaccacctcaagaagcgggcgtccagtgcacgtgccaacattacactgtcagggaagaagcgcagaaaactcctccagcagatccggcttgcccagaaagagaagacagccatggaagtggaagccccttcaaagccagccaggactagtgaaccacagctcaaaaggcaaaagaagacaaaagccccccaggatgtagaaatgaaggaccttgaagatgagagctaaacctcttccactagaagattctcaactggagccagccttcagactcagtggttgtttcagaggactttgacaaaagcaaggccccttttcactctccagatttcctcctacctaatggcctactgacctcccctagagggatgtctttgggagggaagaaggtacagaagaaagattggagaagggcctctctagcagtcaactccatttgtaataaagccctagcacttcttgaat

SEQ ID NO: 276619 - DNA, 1295 bp, Homo sapiens
atttttccgcaaggaatccatggccgcctgcacagccagcggagcgcccacgggagctccccgcagccgcaagctgttgccgcgcggtctcactaccccttggcgcaggctagagcgccctatagcagaaaccatagataagcggccggctagagaggacctgctcgaggaaacgtttggaatccggagcgcttggatctcagggagaagcaaggaggatgggctttggactagaaatagcccaggctcctcccagcatccagaaagtcccaggctgcccaaccctctctgggacagaggaaaaattggcaaggttgaaggtcaccagcacattcaggatttctctcaaaagtcccatctgccgtctattgtggtggaatccagtgaggtgaatgaagagagtggggatctccatttgccccatgaggagctgctgctgctcactgatggtgaggaagaggatgctgaggccttcttccaagaccaaagtgaagagccaggctgggcttggagcccacaggaccctagaagtcctttaagaacatttaacgctggactcagctgggggcaggaccaggatgaagaagatgcttgttggattcttgaggacacagcatgtctggaagccaccaaccactgtcccttctgggactcaacaggctcccgtgtttgtagaagtggctttgtggaatattcccatctcctgcctcctaatagctttgagggagctgaagaagaagctgttcaaacgccggcgggtgttgaatcgggagcggcgtctgaggcaccgggtggtcggggctgtgatagaccaagggctgatcacgcggcaccacctcaagaagcgggcgtccagtgcacgtgccaacattacactgtcagggaagaagcgcagaaaactcctccagcagatccggcttgcccagaaagagaagacagccatggaagtggaagccccttcaaagccagccaggactagtgaaccacagctcaaaaggcaaaagaagacaaaagccccccaggatgtagaaatgaaggaccttgaagatgagagctaaacctcttccactagaagattctcaactggagccagccttcagactcagtggttgtttcagaggactttgacaaaagcaaggccccttttcactctccagatttcctcctacctaatggcctactgacctcccctagagggatgtctttgggagggaagaaggtacagaagaaagattggagaagggcctctctagcagtcaactccatttgtaataaagccctagcacttcttgaat

SEQ ID NO: 276620 - DNA, 809 bp, Homo sapiens
ctgagcggaagtacggaccgtgaactggagtggaatcgcgactatgggagctccggggggaaagatcaaccggccccgaacggtgactgtgtgggggccgcgactttgtttcctcaagcgttcctgagcccttttatctcgcacgagatgggatcagtgaggggccggggctgcctggtggaggggccccgggtcgcggcgagcccactccatctgattcgcatctttctccccggcaggagctgaagaagaagctgttcaaacgccggcgggtgttgaatcgggagcggcgtctgaggcaccgggtggtcggggctgtgatagaccaagggctgatcacgcggcaccacctcaagaagcgggcgtccagtgcacgtgccaacattacactgtcagggaagaagcgcagaaaactcctccagcagatccggcttgcccagaaagagaagacagccatggaagtggaagccccttcaaagccagccaggactagtgaaccacagctcaaaaggcaaaagaagacaaaagccccccaggatgtagaaatgaaggaccttgaagatgagagctaaacctcttccactagaagattctcaactggagccagccttcagactcagtggttgtttcagaggactttgacaaaagcaaggccccttttcactctccagatttcctcctacctaatggcctactgacctcccctagagggatgtctttgggagggaagaaggtacagaagaaagattggagaagggcctctctagcagtcaactccatttgtaataaagccctagcacttcttgaat

SEQ ID NO: 276621 - DNA, 1321 bp, Homo sapiens
atttttccgcaaggaatccatggccgcctgcacagccagcggagcgcccacgggagctccccgcagccgcaagctgttgccgcgcggtctcactaccccttggcgcaggctagagcgccctatagcagaaaccatagataagcggccggctagagaggacctgctcgaggaaacgtttggaatccggagcgcttggatctcagaatcaccaccatggcccttgtgccagggagaagcaaggaggatgggctttggactagaaatagcccaggctcctcccagcatccagaaagtcccaggctgcccaaccctctctgggacagaggaaaaattggcaaggttgaaggtcaccagcacattcaggatttctctcaaaagtcccatctgccgtctattgtggtggaatccagtgaggtgaatgaagagagtggggatctccatttgccccatgaggagctgctgctgctcactgatggtgaggaagaggatgctgaggccttcttccaagaccaaagtgaagagccaggctgggcttggagcccacaggaccctagaagtcctttaagaacatttaacgctggactcagctgggggcaggaccaggatgaagaagatgcttgttggattcttgaggacacagcatgtctggaagccaccaaccactgtcccttctgggactcaacaggctcccgtgtttgtagaagtggctttgtggaatattcccatctcctgcctcctaatagctttgagggagctgaagaagaagctgttcaaacgccggcgggtgttgaatcgggagcggcgtctgaggcaccgggtggtcggggctgtgatagaccaagggctgatcacgcggcaccacctcaagaagcgggcgtccagtgcacgtgccaacattacactgtcagggaagaagcgcagaaaactcctccagcagatccggcttgcccagaaagagaagacagccatggaagtggaagccccttcaaagccagccaggactagtgaaccacagctcaaaaggcaaaagaagacaaaagccccccaggatgtagaaatgaaggaccttgaagatgagagctaaacctcttccactagaagattctcaactggagccagccttcagactcagtggttgtttcagaggactttgacaaaagcaaggccccttttcactctccagatttcctcctacctaatggcctactgacctcccctagagggatgtctttgggagggaagaaggtacagaagaaagattggagaagggcctctctagcagtcaactccatttgtaataaagccctagcacttcttgaat

SEQ ID NO: 276622 - DNA, 3663 bp, Homo sapiens
cacgcccggctggtattgctttttgttttgcttcgttttcttttttgctttttgagacagagtctcactctgttgcccagctggagtgcagtggcgtgatctcggctcactgcaagctctgcctcccgggttcacgccattctcctgcctcagcctcccgagtagctgggactacaggcgcccgccaccacggccggctaattttttgtatttttagtagagaaagagtttcactatgtaggtcaggctggtctcgaactcctgacctcgtgatccgcccaatccgcccacctcggcctcccaaagtgctgggattacaggtgtgagccaccgcgcccggctgttttgctttgttttcaaccactaaaaggctggattcgtgtaacatactgaattctgctttacagaagaaaacacctcttagctgtgtgactgattataggcaagttcttgtgccccggtttctgcatcagaaaatgaagcttataacaacagtacttgtctcacagttttaggataattaaattagttatatgtaaagcaattaaaacagctcctgccaaagagtaaacaccatataaatattcattaaataacatacaaacataccaggttgggaaaaatcagtaagcataggagtcaggaaattccaagttggttatcacaactcttggcccacagggctttaatccaggtgcccttgtctcctacccttgttgccatcccagtgtctccagggagtaagtagaaataaagatcctatctcacctcttgggcattttcccctgccctgaaagcgtataatcgcttagcacagtcggtgcttaaggggccaggctccaaagaagattaaaggaacagtttgtggggtgcactgggcagcagtactctcctctgagttcaatcatcttgcactctaagaatcaccaccatggcccttgtgccagggagaagcaaggaggatgggctttggactagaaatagcccaggctcctcccagcatccagaaagtcccaggctgcccaaccctctctgggacagaggaaaaattggcaaggttgaaggtcaccagcacattcaggatttctctcaaaagtcccatctgccgtctattgtggtggaatccagtgaggtgaatgaagagagtggggatctccatttgccccatgaggagctgctgctgctcactgatggtgaggaagaggatgctgaggccttcttccaagaccaaagtgaagagccaggctgggcttggagcccacaggaccctagaagtcctttaagaacatttaacgctggactcagctgggggcaggaccaggatgaagaagatgcttgttggattcttgaggacacagcatgtctggaagccaccaaccactgtcccttctgggactcaacaggctcccgtgtttgtagaagtggctttgtggaatattcccatctcctgcctcctaatagctttgagggtaagtattgttccctccccctcaaatatctcatccaggtttatgaagctccttatacccatcctcttacaatctccttttacaggtgacaaaaatgaggcttacaggttaggccactagattatacaagtcagtcagcgcaggggttttgattcagttcctgtctgctgcttttaggagctccagttagttgaaactggggaatgacccaattgtaccttctcttttcagcattcattttgtgctaaatattgcgcacatcattgtatgtaatctccgtaactccaagttattctcactctgcagatgagtaaactggggaacagaaacattcagcaatatggcacccagctagtaaatgtggaagccaggactcaaattctcactttgcagccagatagcttgcaaagacagttcttcagccctctccttgcccacagaaatactagggtcaggactactaaaatgtctttaatgagagccttgaatcaagtaagcaaagtaggtgatgcccctgaacgggcctagctcctgcacagtcacagtccagccataggacccttgttccaggcagggcagtcgcacatcagggtcctcatctgagaactgaatcagggtcccctgagggtttagaaccctcaagcattctgatagaagctggtaagccctaggcagacctccccgggcaacagcatcccatgtgcctttgtccagcagtagttggaaagagcctgaagaagccacagcccccaggttctgagcatcggcgtgcatgaagtggaggcttgaggcagggtgtccagggcatagaggtgtttggcctgggccaccctccaggaggctattcatgtgggccacagccacaggagaaaagtccacccccagcacatccactgggtgtggagatttggtgtagaggcctgtacataggctggaagtcccacagcccacatccagcactcgcagaggactggcagcctgtgcctcctgcagcaatggcagtaggagcccctggacttcgtcgtatccaaagaaccagtcgaaggtggggacagtgcccaaacgaggctgggcatgcagccgatcccagagacagcggtccgccaggcaactatcagccagtgagcctgtgggcacggttggagggtgtcacttggtctatgtcgccactgcaaaaacgtcgtatatacacactggcgtcttttttttttttgagacagggtctcactctgtgacccagggttgagtacagtagcacaatgatggctcactgaagcctccacctcagcctcctgagtagctaggactataggcgccatcgtgcccggttaattttttttgtagacagggtctcgctatgttgccctaggttggtctcgaactcctgggccaagcgatctgcccgcctcggcctggcaaagtgttagcattacagccgtgagccaccacgcacggcccaccgtagggtttgagaatcacaatttcagggactacactcctgactcacgaggaacccaccttaccctccccactctgcccccaccttgccctctccactctgcccccacctccctacccgcaaaggggcggcacgtccccatcatcaggctcggcaagtggagcattcgacgcagcgcggccatctggagattcgggtaagttcgaccagagaagcttatgtgaagcgtccaccctactccagccggagaggcctgaggtccaggggaagatctgcaaattccgcgtagcgaaaggcggcgtacagcttccccgaactctgcagtcccggaaaaaagaacgcggacacagactatggtaggaacggcctttattggctgcagcgggaagtggaggagggtatacagcgtccgcagacctgaaatcaaatgagaaagtgtgagcaccccgatggaggagccagctggatctcggttgtccttctccgagattcccggtgtcccggcgtttgaggatagaaccagcggatgggaagccgccagcaccgaagacatgacgccgagggggccagagccctttccctcttcctccgtacattacggggagcggcaccacaagcccgatccccgccaagaaaaggagggtcctgagaccccgcccagagccttccacccggcacccccaccactcccggccgcccaatctggctactacagctaaaaccaccctcgtgccg

SEQ ID NO: 276623 - DNA, 2940 bp, Homo sapiens
cacgcccggctggtattgctttttgttttgcttcgttttcttttttgctttttgagacagagtctcactctgttgcccagctggagtgcagtggcgtgatctcggctcactgcaagctctgcctcccgggttcacgccattctcctgcctcagcctcccgagtagctgggactacaggcgcccgccaccacggccggctaattttttgtatttttagtagagaaagagtttcactatgtaggtcaggctggtctcgaactcctgacctcgtgatccgcccaatccgcccacctcggcctcccaaagtgctgggattacaggtgtgagccaccgcgcccggctgttttgctttgttttcaaccactaaaaggctggattcgtgtaacatactgaattctgctttacagaagaaaacacctcttagctgtgtgactgattataggcaagttcttgtgccccggtttctgcatcagaaaatgaagcttataacaacagtacttgtctcacagttttaggataattaaattagttatatgtaaagcaattaaaacagctcctgccaaagagtaaacaccatataaatattcattaaataacatacaaacataccaggttgggaaaaatcagtaagcataggagtcaggaaattccaagttggttatcacaactcttggcccacagggctttaatccaggtgcccttgtctcctacccttgttgccatcccagtgtctccagggagtaagtagaaataaagatcctatctcacctcttgggcattttcccctgccctgaaagcgtataatcgcttagcacagtcggtgcttaaggggccaggctccaaagaagattaaaggaacagtttgtggggtgcactgggcagcagtactctcctctgagttcaatcatcttgcactctaagaatcaccaccatggcccttgtgccagggagaagcaaggaggatgggctttggactagaaatagcccaggctcctcccagcatccagaaagtcccaggctgcccaaccctctctgggacagaggaaaaattggcaaggttgaaggtcaccagcacattcaggatttctctcaaaagtcccatctgccgtctattgtggtggaatccagtgaggtgaatgaagagagtggggatctccatttgccccatgaggagctgctgctgctcactgatggtgaggaagaggatgctgaggccttcttccaagaccaaagtgaagagccaggctgggcttggagcccacaggaccctagaagtcctttaagaacatttaacgctggactcagctgggggcaggaccaggatgaagaagatgcttgttggattcttgaggacacagcatgtctggaagccaccaaccactgtcccttctgggactcaacaggctcccgtgtttgtagaagtggctttgtggaatattcccatctcctgcctcctaatagctttgagggtaagtattgttccctccccctcaaatatctcatccaggtttatgaagctccttatacccatcctcttacaatctccttttacaggtgacaaaaatgaggcttacaggttaggccactagattatacaagtcagtcagcgcaggggttttgattcagttcctgtctgctgcttttaggagctccagttagttgaaactggggaatgacccaattgtaccttctcttttcagcattcattttgtgctaaatattgcgcacatcattgtatgtaatctccgtaactccaagttattctcactctgcagatgagtaaactggggaacagaaacattcagcaatatggcacccagctagtaaatgtggaagccaggactcaaattctcactttgcagccagatagcttgcaaagacagttcttcagccctctccttgcccacagaaatactagggtcaggactactaaaatgtctttaatgagagccttgaatcaagtaagcaaagtaggtgatgcccctgaacgggcctagctcctgcacagtcacagtccagccataggacccttgttccaggcagggcagtcgcacatcagggtcctcatctgagaactgaatcagggtcccctgagggtttagaaccctcaagcattctgatagaagctggtaagccctaggcagacctccccgggcaacagcatcccatgtgcctttgtccagcagtagttggaaagagcctgaagaagccacagcccccaggttctgagcatcggcgtgcatgaagtggaggcttgaggcagggtgtccagggcatagaggtgtttggcctgggccaccctccaggaggctattcatctacccgcaaaggggcggcacgtccccatcatcaggctcggcaagtggagcattcgacgcagcgcggccatctggagattcgggtaagttcgaccagagaagcttatgtgaagcgtccaccctactccagccggagaggcctgaggtccaggggaagatctgcaaattccgcgtagcgaaaggcggcgtacagcttccccgaactctgcagtcccggaaaaaagaacgcggacacagactatggtaggaacggcctttattggctgcagcgggaagtggaggagggtatacagcgtccgcagacctgaaatcaaatgagaaagtgtgagcaccccgatggaggagccagctggatctcggttgtccttctccgagattcccggtgtcccggcgtttgaggatagaaccagcggatgggaagccgccagcaccgaagacatgacgccgagggggccagagccctttccctcttcctccgtacattacggggagcggcaccacaagcccgatccccgccaagaaaaggagggtcctgagaccccgcccagagccttccacccggcacccccaccactcccggccgcccaatctggctactacagctaaaaccaccctcgtgccg

SEQ ID NO: 276624 - DNA, 505 bp, Homo sapiens
ggttacggcgtgtgggctgtacaaacaaggtctgatcagcggcacccctcaagaagcggcgtccagtgcacgtgccaacattacactgtcagggaagaagcgcagaaaactcctccagcagatccggcttgcccagaaagagaagacagccatggaagtggaagccccttcaaagccagccaggactagtgaaccacagctcaaaaggcaaaagaagacaaaagccccccaggatgtagaaatgaaggaccttgaagatgagagctaaacctcttccactagaagattctcaactggagccagccttcagactcagtggttgtttcagaggactttgacaaaagcaaggccccttttcactctccagatttcctcctacctaatggcctactgacctcccctagagggatgtctttgggagggaagaaggtacagaagaaagattggagaagggcctctctagcagtcaactccatttgtaataaagccctagcacttcttgaat

SEQ ID NO: 276625 - DNA, 731 bp, Homo sapiens
cagtaagcataggagtcaggaaattccaagttggttatcacaactcttggcccacagggctttaatccaggtgcccttgtctcctacccttgttgccatcccagtgtctccagggagtaagtagaaataaagatcctatctcacctcttgggcattttcccctgccctgaaagcgtataatcgcttagcacagtcggtgcttaaggggccaggctccaaagaagattaaaggaacagtttgtggggtgcactgggcagcagtactctcctctgagttcaatcatcttgcactctaagaatcaccaccatggcccttgtgccagggagaagcaaggaggatgggctttggactagaaatagcccaggctcctcccagcatccagaaagtcccaggctgcccaaccctctctgggacagaggaaaaattggcaaggttgaaggtcaccagcacattcaggttagtacttcctcagcctgtgtctggcagctggcttaccctccagtttggcccaacctccctgctgtccctattcaggatttctctcaaaagtcccatctgccgtctattgtggtggaatccagtgaggtgaatgaagagagtggggatctccatttgccccatgaggagctgctgctgctcactgatggtgaggaagaggatgctgaggccttcttccaagaccaaagtgaagagccaggtgagggaggtggctcattcagggggccactgt

SEQ ID NO: 276626 - DNA, 960 bp, Homo sapiens
ccgaggattagaggataggggatctgccgtctattgtggtggaatccagtgaggtgaatgaagagagtggggatctccatttgccccatgaggagctgctgctgctcactgatggtgaggaagaggatgctgaggccttcttccaagaccaaagtgaagagccaggctgggcttggagcccacaggaccctagaagtcctttaagaacatttaacgctggactcagctgggggcaggaccaggatgaagaagatgcttgttggattcttgaggacacagcatgtctggaagccaccaaccactgtcccttctgggactcaacaggctcccgtgtttgtagaagtggctttgtggaatattcccatctcctgcctcctaatagctttgagggagctgaagaagaagctgttcaaacgccggcgggtgttgaatcgggagcggcgtctgaggcaccgggtggtcggggctgtgatagaccaagggctgatcacgcggcaccacctcaagaagcgggcgtccagtgcacgtgccaacattacactgtcagggaagaagcgcagaaaactcctccagcagatccggcttgcccagaaagagaagacagccatggaagtggaagccccttcaaagccagccaggactagtgaaccacagctcaaaaggcaaaagaagacaaaagccccccaggatgtagaaatgaaggaccttgaagatgagagctaaacctcttccactagaagattctcaactggagccagccttcagactcagtggttgtttcagaggactttgacaaaagcaaggccccttttcactctccagatttcctcctacctaatggcctactgacctcccctagagggatgtctttgggagggaagaaggtacagaagaaagattggagaagggcctctctagcagtcaactccatttgtaataaagccctagcacttcttgaat

SEQ ID NO: 276627 - DNA, 3367 bp, Homo sapiens
cacgcccggctggtattgctttttgttttgcttcgttttcttttttgctttttgagacagagtctcactctgttgcccagctggagtgcagtggcgtgatctcggctcactgcaagctctgcctcccgggttcacgccattctcctgcctcagcctcccgagtagctgggactacaggcgcccgccaccacggccggctaattttttgtatttttagtagagaaagagtttcactatgtaggtcaggctggtctcgaactcctgacctcgtgatccgcccaatccgcccacctcggcctcccaaagtgctgggattacaggtgtgagccaccgcgcccggctgttttgctttgttttcaaccactaaaaggctggattcgtgtaacatactgaattctgctttacagaagaaaacacctcttagctgtgtgactgattataggcaagttcttgtgccccggtttctgcatcagaaaatgaagcttataacaacagtacttgtctcacagttttaggataattaaattagttatatgtaaagcaattaaaacagctcctgccaaagagtaaacaccatataaatattcattaaataacatacaaacataccaggttgggaaaaatcagtaagcataggagtcaggaaattccaagttggttatcacaactcttggcccacagggctttaatccaggtgcccttgtctcctacccttgttgccatcccagtgtctccagggagtaagtagaaataaagatcctatctcacctcttgggcattttcccctgccctgaaagcgtataatcgcttagcacagtcggtgcttaaggggccaggctccaaagaagattaaaggaacagtttgtggggtgcactgggcagcagtactctcctctgagttcaatcatcttgcactctaagaatcaccaccatggcccttgtgccagggagaagcaaggaggatgggctttggactagaaatagcccaggctcctcccagcatccagaaagtcccaggctgcccaaccctctctgggacagaggaaaaattggcaaggttgaaggtcaccagcacattcaggatttctctcaaaagtcccatctgccgtctattgtggtggaatccagtgaggtgaatgaagagagtggggatctccatttgccccatgaggagctgctgctgctcactgatggtgaggaagaggatgctgaggccttcttccaagaccaaagtgaagagccaggctgggcttggagcccacaggaccctagaagtcctttaagaacatttaacgctggactcagctgggggcaggaccaggatgaagaagatgcttgttggattcttgaggacacagcatgtctggaagccaccaaccactgtcccttctgggactcaacaggctcccgtgtttgtagaagtggctttgtggaatattcccatctcctgcctcctaatagctttgagggtaagtattgttccctccccctcaaatatctcatccaggtttatgaagctccttatacccatcctcttacaatctccttttacaggtgacaaaaatgaggcttacaggttaggccactagattatacaagtcagtcagcgcaggggttttgattcagttcctgtctgctgcttttaggagctccagttagttgaaactggggaatgacccaattgtaccttctcttttcagcattcattttgtgctaaatattgcgcacatcattgtatgtaatctccgtaactccaagttattctcactctgcagatgagtaaactggggaacagaaacattcagcaatatggcacccagctagtaaatgtggaagccaggactcaaattctcactttgcagccagatagcttgcaaagacagttcttcagccctctccttgcccacagaaatactagggtcaggactactaaaatgtctttaatgagagccttgaatcaagtaagcaaagtaggtgatgcccctgaacgggcctagctcctgcacagtcacagtccagccataggacccttgttccaggcagggcagtcgcacatcagggtcctcatctgagaactgaatcagggtcccctgagggtttagaaccctcaagcattctgatagaagctggtaagccctaggcagacctccccgggcaacagcatcccatgtgcctttgtccagcagtagttggaaagagcctgaagaagccacagcccccaggttctgagcatcggcgtgcatgaagtggaggcttgaggcagggtgtccagggcatagaggtgtttggcctgggccaccctccaggaggctattcatgtgggccacagccacaggagaaaagtccacccccagcacatccactgggtgtggagatttggtgtagaggcctgtacataggctggaagtcccacagcccacatccagcactcgcagaggactggcagcctgtgcctcctgcagcaatggcagtaggagcccctggacttcgtcgtatccaaagaaccagtcgaaggtggggacagtgcccaaacgaggctgggcatgcagccgatcccagagacagcggtccgccaggcaactatcagccagtgagcctgtgggcacggttggagggtgtcacttggtctatgtcgccactgcaaaaacgtcgtatatacacactggcgtcttttttttttttgagacagggtctcactctgtgacccagggttgagtacagtagcacaatgatggctcactgaagcctccacctcagcctcctgagtagctaggactataggcgccatcgtgcccggttaattttttttgtagacagggtctcgctatgttgccctaggttggtctcgaactcctgggccaagcgatctgcccgcctcggcctggcaaagtgttagcattacagccgtgagccaccacgcacggcccaccgtagggtttgagaatcacaatttcagggactacactcctgactcacgaggaacccaccttaccctccccactctgcccccaccttgccctctccactctgcccccacctccctacccgcaaaggggcggcacgtccccatcatcaggctcggcaagtggagcattcgacgcagcgcggccatctggagattcgggtaagttcgaccagagaagcttatgtgaagcgtccaccctactccagccggagaggcctgaggtccaggggaagatctgcaaattccgcgtagcgaaaggcggcgtacagcttccccgaactctgcagtcccggaaaaaagaacgcggacacagactatggtaggaacggcctttattggctgcagcgggaagtggaggagggtatacagcgtcctagctcaccaccctccgaaaaagccgct

SEQ ID NO: 276628 - DNA, 3260 bp, Homo sapiens
cacgcccggctggtattgctttttgttttgcttcgttttcttttttgctttttgagacagagtctcactctgttgcccagctggagtgcagtggcgtgatctcggctcactgcaagctctgcctcccgggttcacgccattctcctgcctcagcctcccgagtagctgggactacaggcgcccgccaccacggccggctaattttttgtatttttagtagagaaagagtttcactatgtaggtcaggctggtctcgaactcctgacctcgtgatccgcccaatccgcccacctcggcctcccaaagtgctgggattacaggtgtgagccaccgcgcccggctgttttgctttgttttcaaccactaaaaggctggattcgtgtaacatactgaattctgctttacagaagaaaacacctcttagctgtgtgactgattataggcaagttcttgtgccccggtttctgcatcagaaaatgaagcttataacaacagtacttgtctcacagttttaggataattaaattagttatatgtaaagcaattaaaacagctcctgccaaagagtaaacaccatataaatattcattaaataacatacaaacataccaggttgggaaaaatcagtaagcataggagtcaggaaattccaagttggttatcacaactcttggcccacagggctttaatccaggtgcccttgtctcctacccttgttgccatcccagtgtctccagggagtaagtagaaataaagatcctatctcacctcttgggcattttcccctgccctgaaagcgtataatcgcttagcacagtcggtgcttaaggggccaggctccaaagaagattaaaggaacagtttgtggggtgcactgggcagcagtactctcctctgagttcaatcatcttgcactctaagaatcaccaccatggcccttgtgccagggagaagcaaggaggatgggctttggactagaaatagcccaggctcctcccagcatccagaaagtcccaggctgcccaaccctctctgggacagaggaaaaattggcaaggttgaaggtcaccagcacattcaggatttctctcaaaagtcccatctgccgtctattgtggtggaatccagtgaggtgaatgaagagagtggggatctccatttgccccatgaggagctgctgctgctcactgatggtgaggaagaggatgctgaggccttcttccaagaccaaagtgaagagccaggctgggcttggagcccacaggaccctagaagtcctttaagaacatttaacgctggactcagctgggggcaggaccaggatgaagaagatgcttgttggattcttgaggacacagcatgtctggaagccaccaaccactgtcccttctgggactcaacaggctcccgtgtttgtagaagtggctttgtggaatattcccatctcctgcctcctaatagctttgagggtaagtattgttccctccccctcaaatatctcatccaggtttatgaagctccttatacccatcctcttacaatctccttttacaggtgacaaaaatgaggcttacaggttaggccactagattatacaagtcagtcagcgcaggggttttgattcagttcctgtctgctgcttttaggagctccagttagttgaaactggggaatgacccaattgtaccttctcttttcagcattcattttgtgctaaatattgcgcacatcattgtatgtaatctccgtaactccaagttattctcactctgcagatgagtaaactggggaacagaaacattcagcaatatggcacccagctagtaaatgtggaagccaggactcaaattctcactttgcagccagatagcttgcaaagacagttcttcagccctctccttgcccacagaaatactagggtcaggactactaaaatgtctttaatgagagccttgaatcaagtaagcaaagtaggtgatgcccctgaacgggcctagctcctgcacagtcacagtccagccataggacccttgttccaggcagggcagtcgcacatcagggtcctcatctgagaactgaatcagggtcccctgagggtttagaaccctcaagcattctgatagaagctggtaagccctaggcagacctccccgggcaacagcatcccatgtgcctttgtccagcagtagttggaaagagcctgaagaagccacagcccccaggttctgagcatcggcgtgcatgaagtggaggcttgaggcagggtgtccagggcatagaggtgtttggcctgggccaccctccaggaggctattcatgtgggccacagccacaggagaaaagtccacccccagcacatccactgggtgtggagatttggtgtagaggcctgtacataggctggaagtcccacagcccacatccagcactcgcagaggactggcagcctgtgcctcctgcagcaatggcagtaggagcccctggacttcgtcgtatccaaagaaccagtcgaaggtggggacagtgcccaaacgaggctgggcatgcagccgatcccagagacagcggtccgccaggcaactatcagccagtgagcctgtgggcacggttggagggtgtcacttggtctatgtcgccactacccgcaaaggggcggcacgtccccatcatcaggctcggcaagtggagcattcgacgcagcgcggccatctggagattcgggtaagttcgaccagagaagcttatgtgaagcgtccaccctactccagccggagaggcctgaggtccaggggaagatctgcaaattccgcgtagcgaaaggcggcgtacagcttccccgaactctgcagtcccggaaaaaagaacgcggacacagactatggtaggaacggcctttattggctgcagcgggaagtggaggagggtatacagcgtccgcagacctgaaatcaaatgagaaagtgtgagcaccccgatggaggagccagctggatctcggttgtccttctccgagattcccggtgtcccggcgtttgaggatagaaccagcggatgggaagccgccagcaccgaagacatgacgccgagggggccagagccctttccctcttcctccgtacattacggggagcggcaccacaagcccgatccccgccaagaaaaggagggtcctgagaccccgcccagagccttccacccggcacccccaccactcccggccgcccaatctggctactacagctaaaaccaccctcgtgccg

SEQ ID NO: 276629 - DNA, 1642 bp, Homo sapiens
aaaaagaaagaaaagaaaacacaggaaaaggaactcacctcttttatcatcttagtatttagtactaatggtttagagcaggaattgacaaactgtggcctggactcatggaccaactctggcccaccacctgtttctcagaagaaaattttattggaactcagccacacttactcatttacatgttgtccttgactgcctttgtgtccagtgtcagaactgagtagctgcagcggaggttgtgcctctgggctttaatatcacaaacagagcagcttataagcaacagaaacttacttctcacagttttggaggctgggaagtccaagatcaaggtgtcaacatatttagggtctagggaaggtctgcttcttggttaatagaaagcacctttcactgtgtcttcacatggtagaaggggagagctctggtatcttcagccccttataagggcactaatcccattcatgagagctccaccctcacgacctaatcacctccaaaaggccccatttcgtaataccgtcagttaagtttcattatatgactttgatggggatatagcccatagtaggttgtatgtccctgaaagcctaaaatatttactgtttggctctttacagaaaatattttcttggcccctgttccagagcattcatcaagtcagataaagggtttaaaccagtcagagaaactaggtggaatggaaaagtactgagagataattggggacagaaaaataaaagagatgggaaatgctgcatcaaaatactcctacctctaggatgttactatatattgttaggagaattcaagttattgaaacttgccaaattcttgagtgaagaggaattcatttgagagccaaaatttgactaaggaaagaagaccaacatgggctttccaaagttgagtttgaattctgccatccccactaagcagtcatgtgaccttggaaaaactccctactctgagtctcagtttctttatctgtattaggtttcaacaaagggaataaatcattggcttctcatgaggttgtcataaggattaaataagacaatgcatataaaagaactggcagacaataaatatagagtcccccactcctgcttggtgctctctttctctctccttctctacatagagaagtgccagagcatccgtcagtagaagttacttaaggttggctgtgtcttccacatcttttgtttacccatgaagaactgtgaccatcttgttctgtgtcttgtcataaagatgggacgtgacttctttctgctcttgcttccatctggtgctgttttctgcacagcctccttgagaccttccagaaccttcttttttcctacttcgtatcacttaaccagtagctatctgggatggttccagaggctgaagtttgcagttgaataacattttaaatagtgttaagcgacttgggatctctggccctttgcgtttcagtatttgtcctttttatgcctgatgtttaacctgccacatgtttgtactgcaacatgaatcttggaaattttaatgttatgcatttcaaatgtttttggttatctgtaaactaaatgtgcccttattggctcacttgtcaataaagatgtttgtatatgtattgtcagaaaaaaat

SEQ ID NO: 276630 - DNA, 603 bp, Homo sapiens
agcttgccagccaccaggcgctcagcctccaccgccgacttcagcaccagctccttgacctgtgcatccagcttctgcatttcgctcacctggccgaggcaagagcagggcaggacttgtgagctgtcctcccaccccactcagcaggccccaccatctcccaggcctacagaccccagagctccacagggtcaagacctgctctgtgatgcaggctaccttcatcctggcttctgcggctggatcctgaaggaaggagaggcaccatgtgtgacaacatccaggcttgggtccactctgaccttatctcccaaagaacatctgccaccagcagccatccaaaaatgaaatgccaccttcttggaaagtcaaagtcaaacccctactgatacctaatctggaccaggttcagcaatgggcaaaactagggccataaagatgagcagaccagccgggcctggtggctcatgcctgtaatcccagcactttgggaggccaaggtgggcagatcacgaggtcaggagttcaagaccagcctgaccaatatggtgacatcccatctctactaaaaatagaaaaaaaaattagccgggcatggtggca

SEQ ID NO: 276631 - DNA, 612 bp, Homo sapiens
gcgttacttcctggagacttcaggtgtggtagccggcgccgcgcccatagccggacggggatctgagctggcaggatgaatgtgggggtggcacacagcgaagtaaaccccaacacccgagtgatgaatagccgaggcatctggctggcctacatcatcttggtaggattgctgcatatggttctactcagcatccccttcttcagcattcctgttgtctggaccctgaccaacgtcatccataacctggctacgtatgtcttccttcatacggtgaaagggacaccctttgagactcctgaccaaggaaaggctcggctactgacacactgggagcaaatggactatgggctccagtttacctcttcccgcaagttcctcagcatctctcctattgtgctctatctcctggccagcttctataccaagtatgatgctgcgcacttcctcatcaacacagcctcattgctaagtgtactgctgccgaagttgccccagttccatggggttcgtgtctttggcatcaacaaatactgagggatgggttttgggacagctccatgggcatggggaaggcactgaaacagaggactataaaacatccttctctta

SEQ ID NO: 276632 - DNA, 1564 bp, Homo sapiens
ccagacatcatcagctttagagctaccacaattttaaagatccgagttcagataatcactgctgcccctggagtcagagccaaggctccacctttcgaggatgaatgtgggggtggcacacagcgaagtaaaccccaacacccgagtgatgaatagccgaggcatctggctggcctacatcatcttggtaggattgctgcatatggttctactcagcatccccttcttcagcattcctgttgtctggaccctgaccaacgtcatccataacctggctacgtatgtcttccttcatacggtgaaagggacaccctttgagactcctgaccaaggaaaggctcggctactgacacactgggagcaaatggactatgggctccagtttacctcttcccgcaagttcctcagcatctctcctattgtgctctatctcctggccagcttctataccaagtatgatgctgcgcacttcctcatcaacacagcctcattgctaagtgtactgctgccgaagttgccccagttccatggggttcgtgtctttggcatcaacaaatactgagggatgggttttgggacagctccatgggcatggggaaggcactgaaacagaggactataaaacatccttctcttattctccatactgtcttctacacctttaaagcctgagaactatacaacctttcccagactcccaagaagagaagagattggcaaatggggctcctgggcccagtcctgctagtggcaagtttctttgaatcaggaaggcaggtgaggtaagggccaaatcactctcctccatagcaggaagccatttgggcagcttctttggtgattacatctttccatatcttttacacttaccaccttccagctctgttttgctgtgtatttttcttacaataatttttttcagctatagctgcagtttaatcaggatgggtagagagctgtcctcataaggctgggggtgggaagatggaatactgacctaatgtataaaacttaaaacaattctccaatcccctctcctttggtccagtaggaggtgcccttcactctaagcttaacacttagtagggaagagattctcaaatgagaaaaagggctccggctatatgggcaacaaagagggaagatacaggttgccagttatacatttatagaaagataatcccctggctttaaatagtcatgtacatacaaatatgaacaaacttaaaaaaaaaatacaaacccttggatcacatgggggcttctgggaacccccgtattcttccccctcacccaagggcagtgggcatgaatctactttttaaaaatgattaattttggccatccttgcagaaaagagcctaaaattgggtgatttacccacaaagtgaaagtcgagggaaaattcagtttccagtctctgaactctatgcgataatctcctatcattagggctacatgctttcttgttctgtcttttaaatattatatcaggataaaggagagggctccctcctgaaatgggtcaagaaagaagatagacttgtagctttaaaagggtggg

SEQ ID NO: 276633 - DNA, 804 bp, Homo sapiens
gcgttacttcctggagacttcaggtgtggtagccggcgccgcgcccatagccggacggggatctgagctggcaggatgaatgtgggggtggcacacagcgaagtaaaccccaacacccgagtgatgaatagccgaggcatctggctggcctacatcatcttggtaggattgctgcatatggttctactcagcatccccttcttcagcattcctgttgtctggaccctgaccaacgtcatccataacctggctacgtatgtcttccttcatacggtgaaagggacaccctttgagactcctgaccaaggaaaggctcggctactgacacactgggagcaaatggactatgggctccagtttacctcttcccgcaagttcctcagcatctctcctattgtgctctatctcctggccagcttctataccaagtatgatgctgcgcacttcctcatcaacacagcctcattgctaagtgtactgctgccgaagttgccccagttccatggggttcgtgtctttggcatcaacaaatactgagggatgggttttgggacagctccatgggcatggggaaggcactgaaacagaggactataaaacatccttctcttaaaaaaaaaagaaaaaaaaaaaaactttgtgggcggcctggcccggaaaagttttgaacccttgggggggggggccctggttaggaactggccagggggccgggaaacgggcggacgggcgggttccccaaaaaacgccgggcccgggtttgaacaccgagggtcgggccggtcccacacgggccggcgtaga

SEQ ID NO: 276634 - DNA, 701 bp, Homo sapiens
  misc_feature (11)..(12): n is a, c, g, or t
  misc_feature (14)..(14): n is a, c, g, or t
  misc_feature (19)..(21): n is a, c, g, or t
  misc_feature (23)..(23): n is a, c, g, or t
  misc_feature (25)..(25): n is a, c, g, or t
  misc_feature (28)..(28): n is a, c, g, or t
attcggcacanngngccgnnntncncgnggccgcgcccatagccggacggggatctgagctgatgaatgtgggggtggcacacagcgaagtaaaccccaacacccgagtgatgaatagccgaggcatctggctggcctacatcatcttggtaggattgctgcatatggttctactcagcatccccttcttcagcattcctgttgtctggaccctgaccaacgtcatccataacctggctacgtatgtcttccttcatacggtgaaagggacaccctttgagactcctgaccaaggaaaggctcggctactgacacactgggagcaaatggactatgggctccagtttacctcttcccgcaagttcctcagcatctctcctattgtgctctatctcctggccagcttctataccaagtatgatgctgcgcacttcctcatcaacacagcctcattgctaagtgtactgctgccgaagttgccccagttccatggggttcgtgtctttggcatcaacaaatactgagggatgggttttgggacagctccatgggcatggggaaggcactgaaacagaggactataaaacatccttctcttaccggaacttaaaacctggtaggcaacctcaggggggggcccggttcccaattcgccttataaggaagtcggtttacaaattaatggcccgttgcttaaaaag

SEQ ID NO: 276635 - DNA, 437 bp, Homo sapiens
gcgttacttcctggagacttcaggtgtggtagccggcgccgcgcccatagccggacggggatctgagctggcaggctacgtatgtcttccttcatacggtgaaagggacaccctttgagactcctgaccaaggaaaggctcggctactgacacactgggagcaaatggactatgggctccagtttacctcttcccgcaagttcctcagcatctctcctattgtgctctatctcctggccagcttctataccaagtatgatgctgcgcacttcctcatcaacacagcctcattgctaagtgtactgctgccgaagttgccccagttccatggggttcgtgtctttggcatcaacaaatactgagggatgggttttgggacagctccatgggcatggggaaggcactgaaacagaggactataaaacatccttctctta

SEQ ID NO: 276636 - DNA, 537 bp, Homo sapiens
gcgttacttcctggagacttcaggtgtggtagccggcgccgcgcccatagccggacggggatctgagctggcaggattgctgcatatggttctactcagcatccccttcttcagcattcctgttgtctggaccctgaccaacgtcatccataacctggctacgtatgtcttccttcatacggtgaaagggacaccctttgagactcctgaccaaggaaaggctcggctactgacacactgggagcaaatggactatgggctccagtttacctcttcccgcaagttcctcagcatctctcctattgtgctctatctcctggccagcttctataccaagtatgatgctgcgcacttcctcatcaacacagcctcattgctaagtgtactgctgccgaagttgccccagttccatggggttcgtgtctttggcatcaacaaatactgagggatgggttttgggacagctccatgggcatggggaaggcactgaaacagaggactataaaacatccttctcttaaaaaaaaaaaaaaaaac

SEQ ID NO: 276637 - DNA, 1493 bp, Homo sapiens
cgaggatcccgaaaccactactggctctgatgaatgtgggggtggcacacagcgaagtaaaccccaacacccgagtgatgaatagccgaggcatctggctggcctacatcatcttggtaggattgctgcatatggttctactcagcatccccttcttcagcattcctgttgtctggaccctgaccaacgtcatccataacctggctacgtatgtcttccttcatacggtgaaagggacaccctttgagactcctgaccaaggaaaggctcggctactgacacactgggagcaaatggactatgggctccagtttacctcttcccgcaagttcctcagcatctctcctattgtgctctatctcctggccagcttctataccaagtatgatgctgcgcacttcctcatcaacacagcctcattgctaagtgtactgctgccgaagttgccccagttccatggggttcgtgtctttggcatcaacaaatactgagggatgggttttgggacagctccatgggcatggggaaggcactgaaacagaggactataaaacatccttctcttattctccatactgtcttctacacctttaaagcctgagaactatacaacctttcccagactcccaagaagagaagagattggcaaatggggctcctgggcccagtcctgctagtggcaagtttctttgaatcaggaaggcaggtgaggtaagggccaaatcactctcctccatagcaggaagccatttgggcagcttctttggtgattacatctttccatatcttttacacttaccaccttccagctctgttttgctgtgtatttttcttacaataatttttttcagctatagctgcagtttaatcaggatgggtagagagctgtcctcataaggctgggggtgggaagatggaatactgacctaatgtataaaacttaaaacaattctccaatcccctctcctttggtccagtaggaggtgcccttcactctaagcttaacacttagtagggaagagattctcaaatgagaaaaagggctccggctatatgggcaacaaagagggaagatacaggttgccagttatacatttatagaaagataatcccctggctttaaatagtcatgtacatacaaatatgaacaaacttaaaaaaaaaatacaaacccttggatcacatgggggcttctgggaacccccgtattcttccccctcacccaagggcagtgggcatgaatctactttttaaaaatgattaattttggccatccttgcagaaaagagcctaaaattgggtgatttacccacaaagtgaaagtcgagggaaaattcagtttccagtctctgaactctatgcgataatctcctatcattagggctacatgctttcttgttctgtcttttaaatattatatcaggataaaggagagggctccctcctgaaatgggtcaagaaagaagatagacttgtagctttaaaagggtggg

SEQ ID NO: 276638 - DNA, 1447 bp, Homo sapiens
gcgttacttcctggagacttcaggtgtggtagccggcgccgcgcccatagccggacggggatctgagctggcaggattgctgcatatggttctactcagcatccccttcttcagcattcctgttgtctggaccctgaccaacgtcatccataacctggctacgtatgtcttccttcatacggtgaaagggacaccctttgagactcctgaccaaggaaaggctcggctactgacacactgggagcaaatggactatgggctccagtttacctcttcccgcaagttcctcagcatctctcctattgtgctctatctcctggccagcttctataccaagtatgatgctgcgcacttcctcatcaacacagcctcattgctaagtgtactgctgccgaagttgccccagttccatggggttcgtgtctttggcatcaacaaatactgagggatgggttttgggacagctccatgggcatggggaaggcactgaaacagaggactataaaacatccttctcttattctccatactgtcttctacacctttaaagcctgagaactatacaacctttcccagactcccaagaagagaagagattggcaaatggggctcctgggcccagtcctgctagtggcaagtttctttgaatcaggaaggcaggtgaggtaagggccaaatcactctcctccatagcaggaagccatttgggcagcttctttggtgattacatctttccatatcttttacacttaccaccttccagctctgttttgctgtgtatttttcttacaataatttttttcagctatagctgcagtttaatcaggatgggtagagagctgtcctcataaggctgggggtgggaagatggaatactgacctaatgtataaaacttaaaacaattctccaatcccctctcctttggtccagtaggaggtgcccttcactctaagcttaacacttagtagggaagagattctcaaatgagaaaaagggctccggctatatgggcaacaaagagggaagatacaggttgccagttatacatttatagaaagataatcccctggctttaaatagtcatgtacatacaaatatgaacaaacttaaaaaaaaaatacaaacccttggatcacatgggggcttctgggaacccccgtattcttccccctcacccaagggcagtgggcatgaatctactttttaaaaatgattaattttggccatccttgcagaaaagagcctaaaattgggtgatttacccacaaagtgaaagtcgagggaaaattcagtttccagtctctgaactctatgcgataatctcctatcattagggctacatgctttcttgttctgtcttttaaatattatatcaggataaaggagagggctccctcctgaaatgggtcaagaaagaagatagacttgtagctttaaaagggtggg

SEQ ID NO: 276639 - DNA, 1422 bp, Homo sapiens
cgaggatcccgaaaccactactggctctgatgaatgtgggggtggcacacagcgaagtaaaccccaacacccgagtgatgaatagccgaggcatctggctggcctacatcatcttggtaggattgctgcatatggttctactcagcatccccttcttcagcattcctgttgtctggaccctgaccaacgtcatccataacctggctacgtatgtcttccttcatacggtgaaagggacaccctttgagactcctgaccaaggaaaggctcggctactgacacactgggagcaaatggactatgggctccagtttacctcttcccgcaagttcctcagcatctctcctattgtgctctatctcctggccagcttctataccaagtatgatgctgcgcacttcctcaatcaacaaatactgagggatgggttttgggacagctccatgggcatggggaaggcactgaaacagaggactataaaacatccttctcttattctccatactgtcttctacacctttaaagcctgagaactatacaacctttcccagactcccaagaagagaagagattggcaaatggggctcctgggcccagtcctgctagtggcaagtttctttgaatcaggaaggcaggtgaggtaagggccaaatcactctcctccatagcaggaagccatttgggcagcttctttggtgattacatctttccatatcttttacacttaccaccttccagctctgttttgctgtgtatttttcttacaataatttttttcagctatagctgcagtttaatcaggatgggtagagagctgtcctcataaggctgggggtgggaagatggaatactgacctaatgtataaaacttaaaacaattctccaatcccctctcctttggtccagtaggaggtgcccttcactctaagcttaacacttagtagggaagagattctcaaatgagaaaaagggctccggctatatgggcaacaaagagggaagatacaggttgccagttatacatttatagaaagataatcccctggctttaaatagtcatgtacatacaaatatgaacaaacttaaaaaaaaaatacaaacccttggatcacatgggggcttctgggaacccccgtattcttccccctcacccaagggcagtgggcatgaatctactttttaaaaatgattaattttggccatccttgcagaaaagagcctaaaattgggtgatttacccacaaagtgaaagtcgagggaaaattcagtttccagtctctgaactctatgcgataatctcctatcattagggctacatgctttcttgttctgtcttttaaatattatatcaggataaaggagagggctccctcctgaaatgggtcaagaaagaagatagacttgtagctttaaaagggtggg

SEQ ID NO: 276640 - DNA, 541 bp, Homo sapiens
gcgttacttcctggagacttcaggtgtggtagccggcgccgcgcccatagccggacggggatctgagctggcaggatgaatgtgggggtggcacacagcgaagtaaaccccaacacccgagtgatgaatagccgaggcatctggctggcctacatcatcttggtaggattgctgcatatggttctactcagcatccccttcttcagcattcctgttgtctggaccctgaccaacgtcatccataacctggctacgtatgtcttccttcatacggtgaaagggacaccctttgagactcctgaccaaggaaaggctcggctactgacacactgggagcaaatggactatgggctccagtttacctcttcccgcaagttcctcagcatctctcctattgtgctctatctcctggccagcttctataccaagtatgatgctgcgcacttcctcaatcaacaaatactgagggatgggttttgggacagctccatgggcatggggaaggcactgaaacagaggactataaaacatccttctctta

SEQ ID NO: 276641 - DNA, 239 bp, Homo sapiens
tactttctgcccctcacactgccaccttccctgttcccaggctacgtatgtcttccttcatacggtgaaagggacaccctttgagactcctgaccaaggaaaggctcggctactgacacactgggagcaaatggactatgggctccagtttacctcttcccgcaagttcctcagcatctctcctattgtgctgtgagtctatgggggaaatgagatatgctgggttagaaagagctcca

SEQ ID NO: 276642 - DNA, 1539 bp, Homo sapiens
gcgttacttcctggagacttcaggtgtggtagccggcgccgcgcccatagccggacggggatctgagctggcaggatgaatgtgggggtggcacacagcgaagtaaaccccaacacccgagtgatgaatagccgaggcatctggctggcctacatcatcttggtaggattgctgcatatggttctactcagcatccccttcttcagcattcctgttgtctggaccctgaccaacgtcatccataacctggctacgtatgtcttccttcatacggtgaaagggacaccctttgagactcctgaccaaggaaaggctcggctactgacacactgggagcaaatggactatgggctccagtttacctcttcccgcaagttcctcagcatctctcctattgtgctctatctcctggccagcttctataccaagtatgatgctgcgcacttcctcatcaacacagcctcattgctaagtgtactgctgccgaagttgccccagttccatggggttcgtgtctttggcatcaacaaatactgagggatgggttttgggacagctccatgggcatggggaaggcactgaaacagaggactataaaacatccttctcttattctccatactgtcttctacacctttaaagcctgagaactatacaacctttcccagactcccaagaagagaagagattggcaaatggggctcctgggcccagtcctgctagtggcaagtttctttgaatcaggaaggcaggtgaggtaagggccaaatcactctcctccatagcaggaagccatttgggcagcttctttggtgattacatctttccatatcttttacacttaccaccttccagctctgttttgctgtgtatttttcttacaataatttttttcagctatagctgcagtttaatcaggatgggtagagagctgtcctcataaggctgggggtgggaagatggaatactgacctaatgtataaaacttaaaacaattctccaatcccctctcctttggtccagtaggaggtgcccttcactctaagcttaacacttagtagggaagagattctcaaatgagaaaaagggctccggctatatgggcaacaaagagggaagatacaggttgccagttatacatttatagaaagataatcccctggctttaaatagtcatgtacatacaaatatgaacaaacttaaaaaaaaaatacaaacccttggatcacatgggggcttctgggaacccccgtattcttccccctcacccaagggcagtgggcatgaatctactttttaaaaatgattaattttggccatccttgcagaaaagagcctaaaattgggtgatttacccacaaagtgaaagtcgagggaaaattcagtttccagtctctgaactctatgcgataatctcctatcattagggctacatgctttcttgttctgtcttttaaatattatatcaggataaaggagagggctccctcctgaaatgggtcaagaaagaagatagacttgtagctttaaaagggtggg

SEQ ID NO: 276643 - DNA, 638 bp, Homo sapiens
  misc_feature (11)..(12): n is a, c, g, or t
  misc_feature (14)..(14): n is a, c, g, or t
  misc_feature (19)..(21): n is a, c, g, or t
  misc_feature (23)..(23): n is a, c, g, or t
  misc_feature (25)..(25): n is a, c, g, or t
  misc_feature (28)..(28): n is a, c, g, or t
attcggcacanngngccgnnntncncgnggccgcgcccatagccggacggggatctgagctgatgaatgtgggggtggcacacagcgaagtaaaccccaacacccgagtgatgaatagccgaggcatctggctggcctacatcatcttggtaggattgctgcatatggttctactcagcatccccttcttcagcattcctgttgtctggaccctgaccaacgtcatccataacctggctacgtatgtcttccttcatacggtgaaagggacaccctttgagactcctgaccaaggaaaggctcggctactgacacactgggagcaaatggactatgggctccagtttacctcttcccgcaagttcctcagcatctctcctattgtgctctatctcctggccagcttctataccaagtatgatgctgcgcacttcctcatcaacacagcctcattgctaagtgtactgctgccgaagttgccccagttccatggggttcgtgtctttggcatcaacaaatactgagggatgggttttgggacagctccatgggcatggggaaggcactgaaacagaggactataaaacatccttctcttaaaaaaaaaaacacaaaagacacaaaaaaaaaaaaaaaac

SEQ ID NO: 276644 - DNA, 1633 bp, Homo sapiens
tttaaagttttccccaagtcttcagtttttattttctgcgtgatgggtaagttcttcattcccaatagagttcaggggattggggctatctgagagacaactgggagatagctcaagaggggttgagaaaaaactgagctggactcctgcctgatcccccattacggcgatgaatgtgggggtggcacacagcgaagtaaaccccaacacccgagtgatgaatagccgaggcatctggctggcctacatcatcttggtaggattgctgcatatggttctactcagcatccccttcttcagcattcctgttgtctggaccctgaccaacgtcatccataacctggctacgtatgtcttccttcatacggtgaaagggacaccctttgagactcctgaccaaggaaaggctcggctactgacacactgggagcaaatggactatgggctccagtttacctcttcccgcaagttcctcagcatctctcctattgtgctctatctcctggccagcttctataccaagtatgatgctgcgcacttcctcatcaacacagcctcattgctaagtgtactgctgccgaagttgccccagttccatggggttcgtgtctttggcatcaacaaatactgagggatgggttttgggacagctccatgggcatggggaaggcactgaaacagaggactataaaacatccttctcttattctccatactgtcttctacacctttaaagcctgagaactatacaacctttcccagactcccaagaagagaagagattggcaaatggggctcctgggcccagtcctgctagtggcaagtttctttgaatcaggaaggcaggtgaggtaagggccaaatcactctcctccatagcaggaagccatttgggcagcttctttggtgattacatctttccatatcttttacacttaccaccttccagctctgttttgctgtgtatttttcttacaataatttttttcagctatagctgcagtttaatcaggatgggtagagagctgtcctcataaggctgggggtgggaagatggaatactgacctaatgtataaaacttaaaacaattctccaatcccctctcctttggtccagtaggaggtgcccttcactctaagcttaacacttagtagggaagagattctcaaatgagaaaaagggctccggctatatgggcaacaaagagggaagatacaggttgccagttatacatttatagaaagataatcccctggctttaaatagtcatgtacatacaaatatgaacaaacttaaaaaaaaaatacaaacccttggatcacatgggggcttctgggaacccccgtattcttccccctcacccaagggcagtgggcatgaatctactttttaaaaatgattaattttggccatccttgcagaaaagagcctaaaattgggtgatttacccacaaagtgaaagtcgagggaaaattcagtttccagtctctgaactctatgcgataatctcctatcattagggctacatgctttcttgttctgtcttttaaatattatatcaggataaaggagagggctccctcctgaaatgggtcaagaaagaagatagacttgtagctttaaaagggtggg

SEQ ID NO: 276645 - DNA, 1526 bp, Homo sapiens
  misc_feature (11)..(12): n is a, c, g, or t
  misc_feature (14)..(14): n is a, c, g, or t
  misc_feature (19)..(21): n is a, c, g, or t
  misc_feature (23)..(23): n is a, c, g, or t
  misc_feature (25)..(25): n is a, c, g, or t
  misc_feature (28)..(28): n is a, c, g, or t
attcggcacanngngccgnnntncncgnggccgcgcccatagccggacggggatctgagctgatgaatgtgggggtggcacacagcgaagtaaaccccaacacccgagtgatgaatagccgaggcatctggctggcctacatcatcttggtaggattgctgcatatggttctactcagcatccccttcttcagcattcctgttgtctggaccctgaccaacgtcatccataacctggctacgtatgtcttccttcatacggtgaaagggacaccctttgagactcctgaccaaggaaaggctcggctactgacacactgggagcaaatggactatgggctccagtttacctcttcccgcaagttcctcagcatctctcctattgtgctctatctcctggccagcttctataccaagtatgatgctgcgcacttcctcatcaacacagcctcattgctaagtgtactgctgccgaagttgccccagttccatggggttcgtgtctttggcatcaacaaatactgagggatgggttttgggacagctccatgggcatggggaaggcactgaaacagaggactataaaacatccttctcttattctccatactgtcttctacacctttaaagcctgagaactatacaacctttcccagactcccaagaagagaagagattggcaaatggggctcctgggcccagtcctgctagtggcaagtttctttgaatcaggaaggcaggtgaggtaagggccaaatcactctcctccatagcaggaagccatttgggcagcttctttggtgattacatctttccatatcttttacacttaccaccttccagctctgttttgctgtgtatttttcttacaataatttttttcagctatagctgcagtttaatcaggatgggtagagagctgtcctcataaggctgggggtgggaagatggaatactgacctaatgtataaaacttaaaacaattctccaatcccctctcctttggtccagtaggaggtgcccttcactctaagcttaacacttagtagggaagagattctcaaatgagaaaaagggctccggctatatgggcaacaaagagggaagatacaggttgccagttatacatttatagaaagataatcccctggctttaaatagtcatgtacatacaaatatgaacaaacttaaaaaaaaaatacaaacccttggatcacatgggggcttctgggaacccccgtattcttccccctcacccaagggcagtgggcatgaatctactttttaaaaatgattaattttggccatccttgcagaaaagagcctaaaattgggtgatttacccacaaagtgaaagtcgagggaaaattcagtttccagtctctgaactctatgcgataatctcctatcattagggctacatgctttcttgttctgtcttttaaatattatatcaggataaaggagagggctccctcctgaaatgggtcaagaaagaagatagacttgtagctttaaaagggtggg

SEQ ID NO: 276646 - DNA, 651 bp, Homo sapiens
gcgttacttcctggagacttcaggtgtggtagccggcgccgcgcccatagccggacggggatctgagctggcaggatgaatgtgggggtggcacacagcgaagtaaaccccaacacccgagtgatgaatagccgaggcatctggctggcctacatcatcttggtaggattgctgcatatggttctactcagcatccccttcttcagcattcctgttgtctggaccctgaccaacgtcatccataacctggctacgtatgtcttccttcatacggtgaaagggacaccctttgagactcctgaccaaggaaaggctcggctactgacacactgggagcaaatggactatgggctccagtttacctcttcccgcaagttcctcagcatctctcctattgtgctctatctcctggccagcttctataccaagtatgatgctgcgcacttcctcatcaacacagcctcattgctaagtgtactgctgccgaagttgccccagttccatggggttcgtgtctttggcatcaacaaatactgagggatgggttttgggacagctccatgggcatggggaaggcactgaaacagaggactataaaacatccttctcttaaaaaaaaaaacacaaaagacacaaaaaaaaaaaaaaaac

SEQ ID NO: 276647 - DNA, 516 bp, Homo sapiens
ttttttttaacgtttccagttttgcattaaaaaaaaaaaatggagttggcagttggaaccgcctgagggttttcacagcaattaccctaaacagttaggtggtgtctattcgttgagaaagattccttttttcttttcaaaaggaagatagtataccactgtttaaacaccaaaaagggcttgccttcacgctgctagaggattctcccgagggccaaaagcacagtgggaattcctcaaaaggggcctacctggctgcagtcagcggcttgagcggctctgatggtggtcagagccccctggaccaagatgcatggaatgtgccctcttgaagagctagtctcatccctcccatctgtagccctaagaggcaagcctgtatctgtgcaaggtatggacccgggcaagggacatggcgcctcccccacccatccgatcctcattcctaaactaagagaggcagacaatggcccgggcttggtgagaggtctggtcactcaccttactctgctttct

SEQ ID NO: 276648 - DNA, 3843 bp, Homo sapiens
acgtgccctgccagtggggcccccgcagctctcgtcccgggcgccgctggtgaccactcgccgcccctccggaggcttcacccgcgccctcccccaggacgcgccagcggagctccggctccttcgccctggacgcggaggccgcggtgtgcggggcgacggcgaggccggaagatggcctgggtgctcaagatggacgaggtgatcgagtccgggctggtgcacgacttcgacgccagcctctcgggcatcgggcaggaactgggcgccggcgcttacagcatgagtgatgtcttggcattgcccattttcaagcaggaagattccagccttccattggatggtgaaacagagcacccaccctttcagtatgtgatgtgtgctgcaacgtcaccagcagtaaaactgcatgatgaaacgcttacttatttgaaccaaggtcagtcatatgaaattcggatgctggataatcggaaaatgggtgatatgcctgagatcaatggaaaattagtaaagagcatcataagggttgtattccatgacagacggctacaatacacagagcatcagcaacttgaaggatggaagtggaatcgcccaggagacagacttcttgatttagatattccaatgtctgtgggaataattgacacaaggacgaatccaagccagttaaatgcggttgaatttctgtgggacccagcaaaacgcacctctgctttcattcaggtacactgcatcagcacagaatttactccacggaagcacggaggtgaaaagggagtgccctttaggatccaggttgacacctttaagcagaatgaaaatggagaatacacagatcatctacactcagctagctgccaaatcaaagtttttaagcctaaaggtgcagacaggaaacaaaaaactgaccgagagaagatggagaagagaacagctcatgaaaaagaaaagtatcagccgtcctatgataccacaatcctcacagagatgaggcttgagcctataattgaagatgcagttgaacatgagcagaaaaagtccagcaagcggactttgccagcagactacggtgattctctggcaaagcgaggcagttgttctccgtggcccgatgcccccacagcctatgtgaataacagcccttccccagcgcccactttcacctccccacagcagagcacttgcagtgtcccagacagcaattcttcttccccaaatcatcagggagatggagcttcacagacctctggtgaacaaattcagccttcagctacgatccaggaaacacagcaatggctgctcaaaaacagattctcttcctacacaagactgttctctaatttttcaggtgccgacttattaaaactgacaaaggaggatttagttcaaatttgtggtgcagccgatggaattcggctctataattcactgaagtcaaggtcggttagaccccgtttaaccatctatgtctgccgggagcagccaagcagcacagtgctgcaagggcagcagcaagctgcaagcagtgcaagcgagaatggcagtggggcaccctatgtttatcatgcaatctacttggaagaaatgattgcctcagaagttgctcgaaaacttgcgctggtgtttaatatccctctccaccaaattaatcaggtttacagacagggtcccaccggtattcacattcttgttagtgatcagatggttcagaattttcaagatgagagttgttttttattctccacagtaaaagctgaaagtagtgatggcatccacataattttgaagtgatgtcttatatagactgaactgtattcagtaccaaatagtcacgcttaaaagtgtgtgaagactgaatccaagaagtcttgggattggattttaccatatgaaatgtttcatattgaaaacacaagatgacctttctaatgagctgtatgagaggtgaatctcctcactgtcactgccatagccaagcatcctcatgagagtgagcacatcggcacagcatgcatccagctctggaggccacggtgcaggcatagctgcctgctgctctggcagaggccagtaaatacagttcctagaagcagcctttgctgtctttttacactgtatgcggtttggaaatgaatgtagaaacttactgtgggcatttacctttctgtgccagtttggcttttattgcctgaaccttatgctgacctggagaggagatgggggacagtgctgttgtggggccagcagtgaatctgtatgcggagagttgtgttgtgctgatgtggccgttggtggtcaggtaagaggctcggcaccttcttggaagaaatcatgtctgagggtgtaccgtttgatatgatcatgccagattggagaagatccaagccaggaagatgggcttgaagcaaactgcattatcaggagtaccttggtgagaggatcagtgtaaatcctaataggtacaaagacttttgtgttttggctttgtcacagatttattgaaaaacttttttgcttctgcttccatttttagcattttagtttctggttttcatttttggagattccttgccttttaaactcgtggtttttctctcattttcttccctctctccctccatctctgaccacccccaccctaaccccccacccccaccatcctattaaacatttttaaagccctaccccagacattggaaataggtgacccaagtagggggagaaagtattattgttgatagcttctgactaggtgttaagggatcttcattatgaacaagatgaatttttttctggaaacactagatgttatcaatcaaacactaaaatgtaccatacaaatcccttaagcctctcaaatattgagctttagtacaatcatggatagacattctggtgatgatttaggggctttttatacaccacatactagcttctttctctataagagtgcctctttcataaaaccaaatgcttgtctgctagcatacttttcaaagggaatccactgttttctcactttgaaaagtatgctagcagacaagcatttgagggaatccactgttttctcactttcctcccatatctccgtccttcatccaaaaccttcccagaatccatcagcaagcatgtttgaggcctgtggtgtaggggactgaattttttttttaacttctattccattttaattgtaggatatctttgtccatatacccaggtgtcctgatttgaatgtactatttgatcctcattgtgttcaggcaaaaaataggaaatgagtaattttgagtttgaaatctctcccagaagacaaactacttcagtgagtaaaagctttgacattttatgttttattcataaagggggttaattatttgctacaaagaagcacgatctattttcatcatcgatttgaaaatatctgtaactcctatagatcctataggcagagagttttcctttctgactttttccctttgctttcgtgtgaccacatgttttctgtaccagtcactggggaaagaagtgagtttatctcgtttgttttaaaagttttgcttgtctatttagcattcctttttgggtctcaagatttatggaacaataaatgtcatttaatgctgtgtgcttattttgaattcctcatcaggttttagaagcggggtaaaaatacttagatgcttatcagacttgaaattatactgagtggcattgaacgtgagtttgtcccagtgaaacaggctaaataaattttggcaccagcaaatttgttactttgtttttttaatagtaggatgtacacatttcagtataataaatgttttctgattgttttgc

SEQ ID NO: 276649 - DNA, 382 bp, Homo sapiens
acagacttaccaaggtcaataagaatcgcatgctgctgggaagtcagctgctttaagagttctttgtatggcacaatattgtgtccgctaatgaggtggttctcaatgtcgctctcctcgaaggagctgaagaagccgctgcttcggaggcccccatcctgcagctccttcctaaaggccagcgagcgcaggccgggctgggagaaggacttgcgcatgggcctgcgcacaggctcctggctccctgtgggcgcggcatggggcgggttggggcgggggctctcggacccccggctgccgctgacgtgattgaacttctcgatgcactcgtcgatcagggccggcggagccttcttgtgcgccaccgtcacgcggccgcaga

SEQ ID NO: 276650 - DNA, 438 bp, Homo sapiens
agcaaaaggatatctccttaaaatttttctccaatgctatttttttggtgtcaggactgatgaggtaaacttcagactggccaatcgtgaagagcatagttcgattttcctcgatatctgtgggctgcacaatattgtgtccgctaatgaggtggttctcaatgtcgctctcctcgaaggagctgaagaagccgctgcttcggaggcccccatcctgcagctccttcctaaaggccagcgagcgcaggccgggctgggagaaggacttgcgcatgggcctgcgcacaggctcctggctccctgtgggcgcggcatggggcgggttggggcgggggctctcggacccccggctgccgctgacgtgattgaacttctcgatgcactcgtcgatcagggccggcggagccttcttgtgcgccaccgtcacgcggccgcaga

SEQ ID NO: 276651 - DNA, 425 bp, Homo sapiens
tcgctccataaagcagattttctcttgaaagcgtatggcagactggggctgtgcacgagctgggtgatattttaccgtgaagagcatagttcgattttcctcgatatctgtgggctgcacaatattgtgtccgctaatgaggtggttctcaatgtcgctctcctcgaaggagctgaagaagccgctgcttcggaggcccccatcctgcagctccttcctaaaggccagcgagcgcaggccgggctgggagaaggacttgcgcatgggcctgcgcacaggctcctggctccctgtgggcgcggcatggggcgggttggggcgggggctctcggacccccggctgccgctgacgtgattgaacttctcgatgcactcgtcgatcagggccggcggagccttcttgtgcgccaccgtcacgcggccgc

SEQ ID NO: 276652 - DNA, 1790 bp, Homo sapiens
tactaaccatgctgaccactgttcggaacgggattgaatcacagaaaaacagcaaatggctctctcttacagagtgtctgaacttcaaagcacaattcctgagcacattttgcagagcacctttgttcacgttatctcttctaactggtctggattacagacagaatcaataccagaggaaatgaaacagattgttgaggaacagggaaataaactgcactgggcagctcttctgatactcatggtgataatacccacaattggtggaaatacccttgttattctggctgtttcactggagaagaagctgcagtatgctactaattactttctaatgtccttggcggtggctgatttgctggttggattgtttgtgatgccaattgccctcttgacaataatgtttgaggctatgtggcccctcccacttgttctatgtcctgcctggttatttcttgacgttctcttttcaaccgcatccatcatgcatctctgtgccatttcagtggatcgttacatagccatcaaaaagccaatccaggccaatcaatataactcacgggctacagcattcatcaagattacagtggtgtggttaatttcaataggcattgccattccagtccctattaaagggatagagactgatgtggacaacccaaacaatatcacttgtgtgctgacaaaggaacgttttggcgatttcatgctctttggctcactggctgccttcttcacacctcttgcaattatgattgtcacctactttctcactatccatgctttacagaagaaggcttacttagtcaaaaacaagccacctcaacgcctaacatggttgactgtgtctacagttttccaaagggatgaaacaccttgctcgtcaccggaaaaggtggcaatgctggatggttctcgaaaggacaaggctctgcccaactcaggtgatgaaacacttatgcgaagaacatccacaattgggaaaaagtcagtgcagaccatttccaacgaacagagagcctcaaaggtcctagggattgtgtttttcctctttttgcttatgtggtgtcccttctttattacaaatataactttagttttatgtgattcctgtaaccaaactactctccaaatgctcctggagatatttgtgtggataggctatgtttcctcaggagtgaatcctttggtctacaccctcttcaataagacatttcgggatgcatttggccgatatatcacctgcaattaccgggccacaaagtcagtaaaaactctcagaaaacgctccagtaagatctacttccggaatccaatggcagagaactctaagtttttcaagaaacatggaattcgaaatgggattaaccctgccatgtaccagagtccaatgaggctccgaagttcaaccattcagtcttcatcaatcattctactagatacgcttctcctcactgaaaatgaaggtgacaaaactgaagagcaagttagttatgtatagcagaactggcagttgtcatcaaacataatgatgagtaagatgatgaatgagatgtaaatgtgccaagaatatattatataaagaattttatgtcatatatcaaatcatctctttaacctaagatgtaagtattaagaatatctaattttcctaatttggacaagattattccatgaggaaaataattttatatagctacaaatgaaaacaatccagcactctggttaaattttaaggtattcgaatgaaataaagtcaaatcaataaatttcaggctttaaaaaaaaaa

SEQ ID NO: 276653 - DNA, 450 bp, Homo sapiens
taaactgcactgggcagctcttctgatactcatggtgataatacccacaattggtggaaatacccttgttattctggctgtttcactggagaagaagctgcagtatgctactaattactttctaatgtccttggcggtggctgatttgctggttggattgtttgtgatgccaattgccctcttgacaataatgtttggtaagtatttcactttgtttgtgccatcaaaccacagaactatgatatactattagagaatggacactcatttaatctttacttttcttgaaataaaagatgaacttggactatttaaagatacggcaagtaaacagtcccttgttttatatcattctctatggttgatcagcagttttaaagagcaaaaaatattttttgtaaactatttttctccctcctaagctatctaataaaatcatttaaaaagtca

SEQ ID NO: 276654 - DNA, 416 bp, Homo sapiens
ctttcttccagatctcctctggcacgtatccagacgcaggcctgtgaaggaattcccgatgcgcgtctatgaaaaggatgggaagggggtggagagaggaggagagtactgtaagcacacttgtgtcatcgcacagagtgaaaggcacacagattatcaactggcaagaacattagattttctcaactattctgaattagcaaaaatttactacagcttggtgaggaatatatggaaactatatcatctttgcaattttttaatctaaaattattccaaatatttaaaagtttattttcaaaagtttacactgtgatgtcatgactacttaataataggatggactggaaatatctatgcattctcctgtgtatattcatttctataaagtaaatgacaaaaataaaaacgttttt

SEQ ID NO: 276655 - DNA, 413 bp, Homo sapiens
ggtggctggtgcctgtaatcccagctacttgggaggctgagataggagaattgcttgaactgaggaggcggaggttgcattacaccactgcactccagcctgggagacagagtgagactttgtccaaaaaaaaaaaaaaggaaaaaaaaaaaagaaaaagaaaaaaagaaaattataaagctttttctaaaatagttataaatttacactcccaccaaaaaatatatgagagttctgataattctgtatcctagctaacctttggtgtttaattctttttaatggtagctactctaatgttataatcctatctcattttatttttaatttttctatttttaatatttgtgagtacatagtaggtgtatgtatttatggggtacatgaaatattttgatacaggcatgcaatat

SEQ ID NO: 276656 - DNA, 458 bp, Homo sapiens
  misc_feature (114)..(114): n is a, c, g, or t
gcgcgaagaaggcggccatgagtccgttgcaggcccgccacagcgctggcgccatggctcggagaacacggcgcggggcggcccctaaggtaaaagccttgctccaagtccccnttctgacttctagtcacttccgtgctgccagcagagggcgtgggattcttcctgaggagcctgagtctcagctttgccaggtccttgctgtgtgaccttgggcacctgtgctcccttgacaaagaggaataaaacctcttcagactactctcctatcgattctctcctggaacatatgaccaccatcaattataggcaagaacatgaacacgggagtcccaaagacttgggttcaaatgtcagccccttcactcgctggctgtaggtgtgaggccctgggtaaggtccttacctccccaagtgtctgagcctgttcccgtataatgttcacttgccttgaatat

SEQ ID NO: 276657 - DNA, 838 bp, Homo sapiens
  misc_feature (1)..(1): n is a, c, g, or t
nggagttatcgctaggtacgaggctgggtgtgctccctactggccgctcgaagcttgaagctgcagttcactttcgcgaatgtaaggaacccagcttctgtgtggtgggcactgagagcagaaccgcattgagtcggagtggagcacagaagtgtaggtccttttgcgctgtttcaagctaaacccgtgtcactgatgccgtacagaagttacagaatgggacgccaccccaaacattacgtcatccgctgaccatttccttgcggtcttcccaccgtctaaatcgccatataatctgatggatggggtcctcgcgcggttcagctcctgggcgacagcgtaacccgtcgctcctccctctgcgggagggcgtggacggggcacgggatttggagcgtggaaggaatcgggaccgaaaggagtcccaggacaccggaaccaggactccccggcgcacccggagagtttccgagctcctttgaagtatgaatcagaacttctggatgggaatcctggagccaccacttgccctatggtcgcaatgggcaagtcgctcaacctcccagatcctgttttctcatgagtaaaacggggattataatacccacctgacaatattatttttgtgagaattaaatgagtttagaatgtaaacaaaacacaacacacaaaaaaactctccggggcgctctatgccgggggcggaacaagggggttcggaatggcgcctgggccatagcggtttcctggacccagttttcttgtccacggtgggactctcggccggtcgcctatagggagccgttaaattccgaaaacccgtaactctagttcgcca

SEQ ID NO: 276658 - DNA, 1166 bp, Homo sapiens
cggttcggcctccccactccctctcctccctccgcgctccaggtctgggctgcccgttttcgcactcgccattggcccttgcccccgtcgctcagccctgtgccccttccagccccgcactgggttggccctaaatactgccgctcggaactagccccgcacagtcctcttatgctcattgggcaaggggccgaggccctctgaagatacctctccccattggctgcgccggggtccgtctgccccatctacgagtctcgtaaacgattggcctccgccactgtcgcttagaaagaagccagcctgcttcccagcttgcctactggaagggggagcacccaggtgcgtctccgcccctcgctccctactggccgctcgaagcttgaagctgcagttcactttcgcgaatgtaaggaacccagcttctgtgtggtgggcactgagagcagaaccgcattgagtcggagtggagcacagaagtgtaggtccttttgcgctgtttcaagctaaacccgtgtcactgatgccgtacagaagttacagaatgggacgccaccccaaacattacgtcatccgctgaccatttccttgcggtcttcccaccgtctaaatcgccatataatctgatggatggggtcctcgcgcggttcagctcctgggcgacagcgtaacccgtcgctcctccctctgcgggagggcgtggacggggcacgggatttggagcgtggaaggaatcgggaccgaaaggagtcccaggacaccggaaccaggactccccggcgcacccggagagtttccgagctcctttgaagtatgaatcagaacttctggatgggaatcctggagccaccacttgccctatggtcgcaatgggcaagtcgctcaacctcccagatcctgttttctcatgagtaaaacggggattataatacccacctgacaatattatttttgtgagaattaaatgagtttagaatgtaaacaaaacacaacacacaaaaaaactctccggggcgctctatgccgggggcggaacaagggggttcggaatggcgcctgggccatagcggtttcctggacccagttttcttgtccacggtgggactctcggccggtcgcctatagggagccgttaaattccgaaaacccgtaactctagttcgcca

SEQ ID NO: 276659 - DNA, 900 bp, Homo sapiens
cggttcggcctccccactccctctcctccctccgcgctccaggtctgggctgcccgttttcgcactcgccattggcccttgcccccgtcgctcagccctgtgccccttccagccccgcactgggttggccctaaatactgccgctcggaactagccccgcacagtcctcttatgctcattgggcaaggggccgaggccctctgaagatacctctccccattggctgcgccggggtccgtctgccccatctacgagtctcgtaaacgattggcctccgccactgtcgcttagaaagaagccagcctgcttcccagcttgcctactggaagggggagcacccaggtgcgtctccgcccctcgctccctactggccgctcgaagcttgaagctgcagttcactttcgcgaatgtaaggaacccagcttctgtgtggtgggcactgagagcagaaccgcattgagtcggagtggagcacagaagtgagtcccaggacaccggaaccaggactccccggcgcacccggagagtttccgagctcctttgaagtatgaatcagaacttctggatgggaatcctggagccaccacttgccctatggtcgcaatgggcaagtcgctcaacctcccagatcctgttttctcatgagtaaaacggggattataatacccacctgacaatattatttttgtgagaattaaatgagtttagaatgtaaacaaaacacaacacacaaaaaaactctccggggcgctctatgccgggggcggaacaagggggttcggaatggcgcctgggccatagcggtttcctggacccagttttcttgtccacggtgggactctcggccggtcgcctatagggagccgttaaattccgaaaacccgtaactctagttcgcca

SEQ ID NO: 276660 - DNA, 416 bp, Homo sapiens
gtgacccaccgggcccggcaaagtttttaaaagtggtttcgttaccctgcccaggagtcccaggacaccggaaccaggactccccggcgcacccggagagtttccgagctcctttgaagtatgaatcagaacttctggatgggaatcctggagccaccacttgccctatggtcgcaatgggcaagtcgctcaacctcccagatcctgttttctcatgagtaaaacggggattataatacccacctgacaatattatttttgtgagaattaaatgagtttagaatgtaaacacgctttgtaaagtaattggcagttgggattagtgtgccctttctcccggagccttgcatcctgtgcatttgctcaggtgctgttccttctctgagcaactaattaaaggtccctaacccgatgta

SEQ ID NO: 276661 - DNA, 670 bp, Homo sapiens
catgtactgagctttcatatttattttgagatatataatttcaaaatatatatagtatataaacagacattcattaaaaaacaaacgaggaaaacgatgttaacataatttcagtaccctctctgaggtcagctttgaactcattcatactctgacaagctgagaatcactgtgcattctcaagcatagcacgctccacagttttaggctgcatcccccagatctgcatcacagccttcttgtagcattcttctgttggtcgatagtgagcagctaaccacagtcagaagacattggttctattgggatgagcactttattctttatttttggtctaaatgtacttaacttgagtaagtggtataaggtcctttcattagtctagatcaccagtgtatcaggagggtagtgtggggatgacagttgaggattctgaagttgactacaagggtttgaatcctggcacttattacgtgtgtagccttagatgagttatttcacctctacctcagttttcttatgtgaaacatgaaggtaatgaaaatagaaaaatgagaattgagaaatggatgtccatctgttgtacactaaatgttcagtgtccttatcagtgccatattcatcaccactagtcttttcccacccaacctctgcaggatgtgaagtgata

SEQ ID NO: 276662 - DNA, 768 bp, Homo sapiens
cgaagtctggaaagttggcagggtctctctgggctgcccaggaaggtgacccagggtcctgggaagccaggtactgccagaagaggatggctggggcccagagcacaaaggaaaccagccaggccaggccgatcatcagagctgcccggcggggtgtgcgcttggcacggtagctcaggggccgagtcacggagaagtagcggtcaaagctgatgagcagcagattcatgacggaggcattgctggccacatagtccagggccagccagaggtcacaagccagcgtgcccagagcccagtggcccatgagcaggtcctgctatccccagtttgcaaaaggcctaacctgaggcttcaagacctgaaggaccttacagctcatcagcgatgcaaccaggatttggatccaggccgtctgcctccgagaccaacctcttgaaccctactcctgcccttgaggggttgcgggggtttgccagcctccttgcccacctcagctagcttactcaagcccaactttgaatcagttaacgatgagcaatcggtccttctttcagaatctggcctcctttgtgtgcgcggcagtgtctgtcgtatatctgtgtgatgtgtgataacagtgctgtgggaagagggtgggtctactggagctctttaaagggcagggtaagggctgcgtctgtctcattcaatgctttatcccagggcttggcagatagtagttgctcaataaatacctgtggaataaatgtacgtgtgtgtactcaa

SEQ ID NO: 276663 - DNA, 5744 bp, Homo sapiens
  misc_feature (1)..(1): n is a, c, g, or t
  misc_feature (4)..(4): n is a, c, g, or t
  misc_feature (8)..(10): n is a, c, g, or t
nccngcgnnnggggaagtccaggagcatgggtggtttttttccccctaccgaggtccgtgaggtgtgtgctaaccaaggggcggctcacaaccgtgacagactgccattcctgagtctcttctggccatgggcccccggagccgtgagcgtcgggcaggcgcggtacagaacaccaacgacagcagcgccctcagcaagcgttccctggccgcgcgcgggtacgtgcaggacccctttgccgcgttgctggttccgggcgcggcgcgccgcgcaccgctcattcaccgaggctactacgtccgcgcacgcgccgtgaggcactgcgtgcgcgcttttttggagcagattggcgcgccccaggccgcgcttcgcgcgcagatcttgtctctcggcgctggcttcgactcgctctattttcgcttaaaaaccgcgggccgcctggcccgggctgcagtctgggaggtggattttccggacgtggcgcggcgcaaagcagaaaggattggagagacgccagagctgtgcgcgttaaccgggcctttcgagaggggggagcccgcgtccgcgctgtgctttgagagcgcagactactgcatcctgggtctggacttgcggcagctccagcgagtggaggaggccctgggcgccgcggggctcgacgcagcctcacccactctgctcctggccgaggcggtgctgacctacctcgagccggagagtgccgcggccctcatcgcctgggcagcccagcgttttcctaatgcccttttcgtggtctatgagcagatgaggcctcaagacgcctttggccagttcatgctgcaacattttcggcagctaaactcccccctgcatggcctggagcgttttcctgacgtggaggcgcagcggcgccgcttccttcaagctggctggaccgcctgcggtgccgtggacatgaatgaattctatcactgctttcttcccgcagaagaacgccggcgggtggaaaatattgaaccctttgacgaatttgaggagtggcatctgaagtgcgcccattatttcattctggcagcttctaggggagacaccctctcccacaccctagtgtttccatcctcagaggcatttcctcgcgtaaatcctgcttcgccttcaggggtattccctgccagcgtagtcagtagcgagggccaggtcccaaacctgaagagatatggccacgcctctgtcttcttgagcccagacgttattctcagtgcaggaggatttggagagcaggaggggcggcactgccgagtgagccagtttcacttgctctcaagagattgtgactctgaatggaaaggcagccaaataggcagttgtgggactggagttcagtgggatggacgcctttatcacaccatgacaagactctcagagagtcgggttctggttctgggagggagactgtccccagtaagtccagccttgggggttctccagcttcatttttttaagagtgaggataataacactgaggacctgaaagtgacaataacaaaggctggccgaaaggatgattccactttgtgttgttggcggcattcaacaacagaagtgtcctgtcagaatcaggaatatttgtttgtgtatgggggtcgaagcgtggtggaacctgtactaagtgactggcatttcctccatgtagggacaatggcttgggtcaggatcccagtggagggagaagtacctgaagcccggcattctcacagtgcctgcacttggcaagggggagcccttattgctggaggtctcggggcttctgaggagccattgaactctgtgctctttctgagaccaatctcttgtggattcctctgggagtcagtagacatccagcctcccattaccccaaggtactcccacacagctcatgtgctcaatggaaagctgttactggttggagggatctggattcattcctcctcatttcctggagtgactgtgatcaatttgactacaggattgagctctgagtatcagattgacacaacatatgtgccatggccattaatgttacacaaccatactagtatccttcttcctgaagagcaacagctcctgctccttggaggtggtgggaactgcttttcctttggtacctacttcaacccccatacagtcacattagacctttcttccttaagtgctgggcagtaaggactggactaatattcaggacccactaaagtagacaataaagttttccacaaataggatgaccctctagctatagatactgccactcctcctttccccatcctttttttcccttagcactattcagtgcaaaaagtgaaaaaggttggtaaaataggtaaaatacctagaaacaatcactacagaaaacagctgaagacagtggccatgcagtccgagaggagtagtggtctgcctctaattttctaatctaagttcgtttattgagttacagtggtctttagtaaagtaaaacaatttcccaatcccaggccttgtgatttgagatggtaccttagaaaaagttacacgcagttccgtggttgaatatatttgagatggtaccttagaaaaagtttcacgcagatccttggttgaatatagttgagggagcgtagtattgacaattcttcatgtaggaaacctgaaatgaacacagtcacagtttgattaaaacattgtcctgtttgttgcaacagaaaactcggatagttttaacaacaggaaacacttgtaggacttcctttaccaacatactttttaaatgttttgctattggttccatatttatttagatttataagtgtcaataaagcaaacttttgatgcctcaattcattttgcacggggtataataatgttttgttccagatatactctccacctttcactgttctgtgctccaagaggctgacctttatgggctgcatcaaggagctctctttactttttggttgagttccaccagtcagaggcaccagaggggaatgggggcaaaaagaagagtgagagtgagttggtatttattcccaattcttcccctgttggtttgcaagttggcagtggcagcattcttctgtcaaaggctacagctcctgccgtgtaatcctttcctgaagacagagttctaattctgcatcatcccaggtttcagtaattgttcctttacttcaccttttcaggcctaggagttgtgatggctctttgctagacctgaactgtactgtccaatgtggtagctattgacaacatgtgactatttaaacgaattaataaattcagtggcttagtcacattgaccacattttaagtgcttaataactatgtgtggctttggctactgtattagacaatgtagatgtagaacatttcatcgttacagaaatttctactggacactgctgactggatatcttgacttggtttcccttaaccctactcagccccttatagttagcatcccattaaactcaattatcccttttaaatgggaatctgttgcctagtgagccatgtgagatcaatgaaatagctattcatccttaaaatttgagccttaatttgtcatctaaattatgcataccttgtgaaatatacacctcaaaaaatgtagtggctttggtggtaataagtgtattactttagtatttcttcttagtcctagaaaccttagtagttttcattctacaagtgcctaaatgattattatgaaccatcattgatgacaaattgcatcctttatttctattaattttgcatataaatggatgtgaaaggtgattaatataaaaaccaagtagcaaacacaaacctaagtgtatggagaggacagtcttggctctgttagatgaagcctccccgggggagaccagctgaatgagggttgtggtataggctgggcatggtggctcacgcctataattccagcactttgggaggccaagacagaaggatcacttaaagccaggagtttaagaccagcccaggcaacaaagtcagatccccatctctacaaaaaaataagtaggcacggtggtgtgtgcttgtagtcttggatactctggaggctgaggtgatagtgagctgtgattgtgccactgcactcctgcctggttgacagagtgagaccccgtctcttaaaaagaaaaaaaaaaaaggttgttgtccaacttcagctttcctgagactttgtaagagccatttctagggaaagcattggttatggctatgactgagtcctgggaaacagggcttattacagctgggaagacatctggcaaggcgatcagtgggccaggtagtagaaaactggcagggaatatgatcagcaggagaaaatggctgttctgtatttcctgtttctaagtttactacagcacaccccagctttcaggagcagataaaagcagaacactgtgatgaggccaggcgcagtggcacatgccttgatcccagcactttgggaggccaaggctggcagatcacttgaactcaggagttggagaccagcctggccaatatggtgaaactccgtctctacccaaaaaaaaaaaaaaaaggaagttaatgaaaaatatcatcaaacaaaagggtaaacaagtcttagtgaaaaagggcaaactattggtgcaataatataccctttaaagacatcatcatttcaaatagggctgtacaaatatagaaagatgtaggatgaattcaaaacctatgactaaataatttaaaccaaacgcaataatgatgagaaagaaagaagatccatgttcaattggggatttatagtttctttataaagatgaagtacagtgactctagtgtagtggttctcaatgggggacaatttcatcccccacatttagcaatgtctggagacattttggttgtcaatactgaggggtgctactaatgttaggagtcaggtatgccactaaatatcctccaatgcacaggacaactttaacaaagaattacttatacagtctaaactgtctatactgccatttttgacaaatcctgcttcagcctatgtctgtcattatgttgataattaactgagtaattttgaggccatacctcacagtattaaacagttggatgtgtagttgtgtgggtgtattattgaaagacagtaggcttttaaggacttgagtgactttgaggccttaccttatgaagcagtgagcagcagtgataagccagctgttactaagccatgtggctccgcgtcggtagacattgttctgtggaaggctagcttgccagggccattctccttcctcagcatccagaccctctgctattctgttgccagagggagttattgtgcattgtccacaacctgctcaaaatacagttctgcttatgcacgtatattggtatagtagaacctaccacagagaatctatcccataaaaggaactcaagaaatatttgtagaaatgaagtccatattgggccaggtgcggtggctcccgcctgtgtaatgccagcattttgggaggccaaggtgggcagatcacaaggttaggagatcgagaccatcctggtcaacatggtgaaagccagtctctactaaaaatacaaaaattagctgggtgtggtggtgtgtgcttgtaatcccagctactcaggaggctgaggcaagagaatcacttgaaccagggagtcagaggttgcagtgagccgagattacaccactgcactccagcctggcaacagagcaagactctgtctc

SEQ ID NO: 276664 - DNA, 2636 bp, Homo sapiens
cgctcattcaccgaggctactacgtccgcgcacgcgcgcgggtacgtgcaggacccctttgccgcgttgctggttccgggcgcggcgcgccgcgcaccgctcattcaccgaggctactacgtccgcgcttttttggagcagattggcgcgccccaggccgcgcttcgcgcgcagatcttgtctctcggcgctggcttcgactcgctctattttcgcttaaaaaccgcgggccgcctggcccgggctgcagtctgggaggtggattttccggacgtggcgcggcgcaaagcagaaaggattggagagacgccagagctgtgcgcgttaaccgggcctttcgagaggggggagcccgcgtccgcgctgtgctttgagagcgcagactactgcatcctgggtctggacttgcggcagctccagcgagtggaggaggccctgggcgccgcggggctcgacgcagcctcacccactctgctcctggccgaggcggtgctgacctacctcgagccggagagtgccgcggccctcatcgcctgggcagcccagcgttttcctaatgcccttttcgtggtctatgagcagatgaggcctcaagacgcctttggccagttcatgctgcaacattttcggcagctaaactcccccctgcatggcctggagcgttttcctgacgtggaggcgcagcggcgccgcttccttcaagctggctggaccgcctgcggtgccgtggacatgaatgaattctatcactgctttcttcccgcagaagaacgccggcgggtggaaaatattgaaccctttgacgaatttgaggagtggcatctgaagtgcgcccattatttcattctggcagcttctaggggagacaccctctcccacaccctagtgtttccatcctcagaggcatttcctcgcgtaaatcctgcttcgccttcaggggtattccctgccagcgtagtcagtagcgagggccaggtcccaaacctgaagagatatggccacgcctctgtcttcttgagcccagacgttattctcagtgcaggaggatttggagagcaggaggggcggcactgccgagtgagccagtttcacttgctctcaagagattgtgactctgaatggaaaggcagccaaataggcagttgtgggactggagttcagtgggatggacgcctttatcacaccatgacaagactctcagagagtcgggttctggttctgggagggagactgtccccagtaagtccagccttgggggttctccagcttcatttttttaagagtgaggataataacactgaggacctgaaagtgacaataacaaaggctggccgaaaggatgattccactttgtgttgttggcggcattcaacaacagaagtgtcctgtcagaatcaggaatatttgtttgtgtatgggggtcgaagcgtggtggaacctgtactaagtgactggcatttcctccatgtagggacaatggcttgggtcaggatcccagtggagggagaagtacctgaagcccggcattctcacagtgcctgcacttggcaagggggagcccttattgctggaggtctcggggcttctgaggagccattgaactctgtgctctttctgagaccaatctcttgtggattcctctgggagtcagtagacatccagcctcccattaccccaaggtactcccacacagctcatgtgctcaatggaaagctgttactggttggagggatctggattcattcctcctcatttcctggagtgactgtgatcaatttgactacaggattgagctctgagtatcagattgacacaacatatgtgccatggccattaatgttacacaaccatactagtatccttcttcctgaagagcaacagctcctgctccttggaggtggtgggaactgcttttcctttggtacctacttcaacccccatacagtcacattagacctttcttccttaagtgctgggcagtaaggactggactaatattcaggacccactaaagtagacaataaagttttccacaaataggatgaccctctagctatagatactgccactcctcctttccccatcctttttttcccttagcactattcagtgcaaaaagtgaaaaaggttggtaaaataggtaaaatacctagaaacaatcactacagaaaacagctgaagacagtggccatgcagtccgagaggagtagtggtctgcctctaattttctaatctaagttcgtttattgagttacagtggtctttagtaaagtaaaacaatttcccaatcccaggccttgtgatttgagatggtaccttagaaaaagttacacgcagttccgtggttgaatatatttgagatggtaccttagaaaaagtttcacgcagatccttggttgaatatagttgagggagcgtagtattgacaattcttcatgtaggaaacctgaaatgaacacagtcacagtttgattaaaacattgtcctgtttgttgcaacagaaaactcggatagttttaacaacaggaaacacttgtaggacttcctttaccaacatactttttaaatgttttgctattggttccatatttatttagatttataagtgtcaataaagcaaacttttgatgcctcaa

SEQ ID NO: 276665 - DNA, 3138 bp, Homo sapiens
  misc_feature (1)..(1): n is a, c, g, or t
  misc_feature (4)..(4): n is a, c, g, or t
  misc_feature (8)..(10): n is a, c, g, or t
nccngcgnnnggggaagtccaggagcatgggtggtttttttccccctaccgaggtccgtgaggtgtgtgctaaccaaggggcggctcacaaccgtgacagactgccattcctgagtctcttctggccatgggcccccggagccgtgagcgtcgggcaggcgcggtacagaacaccaacgacagcagcgccctcagcaagcgttccctggccgcgcgcgggtacgtgcaggacccctttgccgcgttgctggttccgggcgcggcgcgccgcgcaccgctcattcaccgaggctactacgtccgcgcacgcgccgtgaggcactgcgtgcgcgcttttttggagcagattggcgcgccccaggccgcgcttcgcgcgcagatcttgtctctcggcgctggcttcgactcgctctattttcgcttaaaaaccgcgggccgcctggcccgggctgcagtctgggaggtggattttccggacgtggcgcggcgcaaagcagaaaggattggagagacgccagagctgtgcgcgttaaccgggcctttcgagaggggggagcccgcgtccgcgctgtgctttgagagcgcagactactgcatcctgggtctggacttgcggcagctccagcgagtggaggaggccctgggcgccgcggggctcgacgcagcctcacccactctgctcctggccgaggcggtgctgacctacctcgagccggagagtgccgcggccctcatcgcctgggcagcccagcgttttcctaatgcccttttcgtggtctatgagcagatgaggcctcaagacgcctttggccagttcatgctgcaacattttcggcagctaaactcccccctgcatggcctggagcgttttcctgacgtggaggcgcagcggcgccgcttccttcaagctggctggaccgcctgcggtgccgtggacatgaatgaattctatcactgctttcttcccgcagaagaacgccggcgggtggaaaatattgaaccctttgacgaatttgaggagtggcatctgaagtgcgcccattatttcattctggcagcttctaggggagacaccctctcccacaccctagtgtttccatcctcagaggcatttcctcgcgtaaatcctgcttcgccttcaggggtattccctgccagcgtagtcagtagcgagggccaggtcccaaacctgaagagatatggccacgcctctgtcttcttgagcccagacgttattctcagtgcaggaggatttggagagcaggaggggcggcactgccgagtgagccagtttcacttgctctcaagagattgtgactctgaatggaaaggcagccaaataggcagttgtgggactggagttcagtgggatggacgcctttatcacaccatgacaagactctcagagagtcgggttctggttctgggagggagactgtccccagtaagtccagccttgggggttctccagcttcatttttttaagagtgaggataataacactgaggacctgaaagtgacaataacaaaggctggccgaaaggatgattccactttgtgttgttggcggcattcaacaacagaagtgtcctgtcagaatcaggaatatttgtttgtgtatgggggtcgaagcgtggtggaacctgtactaagtgactggcatttcctccatgtagggacaatggcttgggtcaggatcccagtggagggagaagtacctgaagcccggcattctcacagtgcctgcacttggcaagggggagcccttattgctggaggtctcggggcttctgaggagccattgaactctgtgctctttctgagaccaatctcttgtggattcctctgggagtcagtagacatccagcctcccattaccccaaggtactcccacacagctcatgtgctcaatggaaagctgttactggttggagggatctggattcattcctcctcatttcctggagtgactgtgatcaatttgactacaggattgagctctgagtatcagattgacacaacatatgtgccatggccattaatgttacacaaccatactagtatccttcttcctgaagagcaacagctcctgctccttggaggtggtgggaactgcttttcctttggtacctacttcaacccccatacagtcacattagacctttcttccttaagtgctgggcagtaaggactggactaatattcaggacccactaaagtagacaataaagttttccacaaataggatgaccctctagctatagatactgccactcctcctttccccatcctttttttcccttagcactattcagtgcaaaaagtgaaaaaggttggtaaaataggtaaaatacctagaaacaatcactacagaaaacagctgaagacagtggccatgcagtccgagaggagtagtggtctgcctctaattttctaatctaagttcgtttattgagttacagtggtctttagtaaagtaaaacaatttcccaatcccaggccttgtgatttgagatggtaccttagaaaaagttacacgcagttccgtggttgaatatatttgagatggtaccttagaaaaagtttcacgcagatccttggttgaatatagttgagggagcgtagtattgacaattcttcatgtaggaaacctgaaatgaacacagtcacagtttgattaaaacattgtcctgtttgttgcaacagaaaactcggatagttttaacaacaggaaacacttgtaggacttcctttaccaacatactttttaaatgttttgctattggttccatatttatttagatttataagtgtcaataaagcaaacttttgatgcctcaaaaaaaacaagaaaacaacacacaaacaaaaaactaacaagcggggccatacacaaaacgaagaacagacacaaacaactagtggtgagacaccgacgcgacaccaacaaggagacgtttctacaacaaaaccacctggagtgagagcgcgcgcgacccaacagagtaaacacgcaacgcaacccgcacacacggtctcaaagaaagaaagacgcggggcaagaaccggtggtgggggtccccacaaaaaaaacagccgcgggggaaacacgcgtttcaaacacaccaccgagggtcg

SEQ ID NO: 276666 - DNA, 1111 bp, Homo sapiens
cggacgcgtgggtcggacgcgtgggtcgacccacgcgtgcgggtggaggtctcggggcttctgaggagccattgaactctgtgctctttctgagaccaatctcttgtggattcctctgggagtcagtagacatccagcctcccattaccccaaggtactcccacacagctcatgtgctcaatggaaagctgttactggttggagggatctggattcattcctcctcatttcctggagtgactgtgatcaatttgactacaggattgagctctgagtatcagattgacacaacatatgtgccatggccattaatgttacacaaccatactagtatccttcttcctgaagagcaacagctcctgctccttggaggtggtgggaactgcttttcctttggtacctacttcaacccccatacagtcacattagacctttcttccttaagtgctgggcagtaaggactggactaatattcaggacccactaaagtagacaataaagttttccacaaataggatgaccctctagctatagatactgccactcctcctttccccatcctttttttcccttagcactattcagtgcaaaaagtgaaaaaggttggtaaaataggtaaaatacctagaaacaatcactacagaaaacagctgaagacagtggccatgcagtccgagaggagtagtggtctgcctctaattttctaatctaagttcgtttattgagttacagtggtctttagtaaagtaaaacaatttcccaatcccaggccttgtgatttgagatggtaccttagaaaaagttacacgcagttccgtggttgaatatatttgagatggtaccttagaaaaagtttcacgcagatccttggttgaatatagttgagggagcgtagtattgacaattcttcatgtaggaaacctgaaatgaacacagtcacagtttgattaaaacattgtcctgtttgttgcaacagaaaactcggatagttttaacaacaggaaacacttgtaggacttcctttaccaacatactttttaaatgttttgctattggttccatatttatttagatttataagtgtcaataaagcaaacttttgatgcctcaa

SEQ ID NO: 276667 - DNA, 2136 bp, Homo sapiens
  misc_feature (1)..(1): n is a, c, g, or t
  misc_feature (4)..(4): n is a, c, g, or t
  misc_feature (8)..(10): n is a, c, g, or t
nccngcgnnnggggaagtccaggagcatgggtggtttttttccccctaccgaggtccgtgaggtgtgtgctaaccaaggggcggctcacaaccgtgacagactgccattcctgagtctcttctggccatgggcccccggagccgtgagcgtcgggcaggcgcggtacagaacaccaacgacagcagcgccctcagcaagcgttccctggccgcgcgcgggtacgtgcaggacccctttgccgcgttgctggttccgggcgcggcgcgccgcgcaccgctcattcaccgaggctactacgtccgcgcacgcgccgtgaggcactgcgtgcgcgcttttttggagcagattggcgcgccccaggccgcgcttcgcgcgcagatcttgtctctcggcgctggcttcgactcgctctattttcgcttaaaaaccgcgggccgcctggcccgggctgcagtctgggaggtggattttccggacgtggcgcggcgcaaagcagaaaggattggagagacgccagagctgtgcgcgttaaccgggcctttcgagaggggggagcccgcgtccgcgctgtgctttgagagcgcagactactgcatcctgggtctggacttgcggcagctccagcgagtggaggaggccctgggcgccgcggggctcgacgcagcctcacccactctgctcctggccgaggcggtgctgacctacctcgagccggagagtgccgcggccctcatcgcctgggcagcccagcgttttcctaatgcccttttcgtggtctatgagcagatgaggcctcaagacgcctttggccagttcatgctgcaacattttcggcagctaaactcccccctgcatggcctggagcgttttcctgacgtggaggcgcagcggcgccgcttccttcaagctggctggaccgcctgcggtgccgtggacatgaatgaattctatcactgctttcttcccgcagaagaacgccggcgggtggaaaatattgaaccctttgacgaatttgaggagtggcatctgaagtgcgcccattatttcattctggcagcttctaggggagacaccctctcccacaccctagtgtttccatcctcagaggcatttcctcgcgtaaatcctgcttcgccttcaggggtattccctgccagcgtagtcagtagcgagggccaggtcccaaacctgaagagatatggccacgcctctgtcttcttgagcccagacgttattctcagtgcaggaggatttggagagcaggaggggcggcactgccgagtgagccagtttcacttgctctcaagagattgtgactctgaatggaaaggcagccaaataggcagttgtgggactggagttcagtgggatggacgcctttatcacaccatgacaagactctcagagagtcgggttctggttctgggagggagactgtccccagtaagtccagccttgggggttctccagcttcatttttttaagagtgaggataataacactgaggacctgaaagtgacaataacaaaggctggccgaaaggatgattccactttgtgttgttggcggcattcaacaacagaagtgtcctgtcagaatcaggaatatttgtttgtgtatgggggtcgaagcgtggtggaacctgtactaagtgactggcatttcctccatgtagggacaatggcttgggtcaggatcccagtggagggagaagtacctgaagcccggcattctcacagtgcctgcacttggcaagggggagcccttattgctggaggtctcggggcttctgaggagccattgaactctgtgctctttctgagaccaatctcttgtggattcctctgggagtcagtagacatccagcctcccattaccccaaggtactcccacacagctcatgtgctcaatggaaagctgttactggttggagggatctggattcattcctcctcatttcctggagtgactgtgatcaatttgactacaggattgagctctgagtatcagattgacacaacatatgtgccatggccattaatgttacacaaccatactagtatccttctgccgctaaagatcaacaatgcttctgagttgagggtcggtagtcctggggatggagtgtgcattca

SEQ ID NO: 276668 - DNA, 2232 bp, Homo sapiens
gcgcggtgacctagaggatcccactagtccacggtggctttaaaatgagccttaatttgtcatctaaattatgcataccttgtgaaatatacacctcaaaaaatgtagtggctttggtggtaataagtgtattactttagtatttcttcttagtcctagaaaccttagtagttttcattctacaagtgcctaaatgattattatgaaccatcattgatgacaaattgcatcctttatttctattaattttgcatataaatggatgtgaaaggtgattaatataaaaaccaagtagcaaacacaaacctaagtgtatggagaggacagtcttggctctgttagatgaagcctccccgggggagaccagctgaatgagggttgtggtataggctgggcatggtggctcacgcctataattccagcactttgggaggccaagacagaaggatcacttaaagccaggagtttaagaccagcccaggcaacaaagtcagatccccatctctacaaaaaaataagtaggcacggtggtgtgtgcttgtagtcttggatactctggaggctgaggtgatagtgagctgtgattgtgccactgcactcctgcctggttgacagagtgagaccccgtctcttaaaaagaaaaaaaaaaaaggttgttgtccaacttcagctttcctgagactttgtaagagccatttctagggaaagcattggttatggctatgactgagtcctgggaaacagggcttattacagctgggaagacatctggcaaggcgatcagtgggccaggtagtagaaaactggcagggaatatgatcagcaggagaaaatggctgttctgtatttcctgtttctaagtttactacagcacaccccagctttcaggagcagataaaagcagaacactgtgatgaggccaggcgcagtggcacatgccttgatcccagcactttgggaggccaaggctggcagatcacttgaactcaggagttggagaccagcctggccaatatggtgaaactccgtctctacccaaaaaaaaaaaaaaaaggaagttaatgaaaaatatcatcaaacaaaagggtaaacaagtcttagtgaaaaagggcaaactattggtgcaataatataccctttaaagacatcatcatttcaaatagggctgtacaaatatagaaagatgtaggatgaattcaaaacctatgactaaataatttaaaccaaacgcaataatgatgagaaagaaagaagatccatgttcaattggggatttatagtttctttataaagatgaagtacagtgactctagtgtagtggttctcaatgggggacaatttcatcccccacatttagcaatgtctggagacattttggttgtcaatactgaggggtgctactaatgttaggagtcaggtatgccactaaatatcctccaatgcacaggacaactttaacaaagaattacttatacagtctaaactgtctatactgccatttttgacaaatcctgcttcagcctatgtctgtcattatgttgataattaactgagtaattttgaggccatacctcacagtattaaacagttggatgtgtagttgtgtgggtgtattattgaaagacagtaggcttttaaggacttgagtgactttgaggccttaccttatgaagcagtgagcagcagtgataagccagctgttactaagccatgtggctccgcgtcggtagacattgttctgtggaaggctagcttgccagggccattctccttcctcagcatccagaccctctgctattctgttgccagagggagttattgtgcattgtccacaacctgctcaaaatacagttctgcttatgcacgtatattggtatagtagaacctaccacagagaatctatcccataaaaggaactcaagaaatatttgtagaaatgaagtccatattgggccaggtgcggtggctcccgcctgtgtaatgccagcattttgggaggccaaggtgggcagatcacaaggttaggagatcgagaccatcctggtcaacatggtgaaagccagtctctactaaaaatacaaaaattagctgggtgtggtggtgtgtgcttgtaatcccagctactcaggaggctgaggcaagagaatcacttgaaccagggagtcagaggttgcagtgagccgagattacaccactgcactccagcctggcaacagagcaagactctgtctc

SEQ ID NO: 276669 - DNA, 2841 bp, Homo sapiens
  misc_feature (1)..(1): n is a, c, g, or t
  misc_feature (4)..(4): n is a, c, g, or t
  misc_feature (8)..(10): n is a, c, g, or t
nccngcgnnnggggaagtccaggagcatgggtggtttttttccccctaccgaggtccgtgaggtgtgtgctaaccaaggggcggctcacaaccgtgacagactgccattcctgagtctcttctggccatgggcccccggagccgtgagcgtcgggcaggcgcggtacagaacaccaacgacagcagcgccctcagcaagcgttccctggccgcgcgcgggtacgtgcaggacccctttgccgcgttgctggttccgggcgcggcgcgccgcgcaccgctcattcaccgaggctactacgtccgcgcacgcgccgtgaggcactgcgtgcgcgcttttttggagcagattggcgcgccccaggccgcgcttcgcgcgcagatcttgtctctcggcgctggcttcgactcgctctattttcgcttaaaaaccgcgggccgcctggcccgggctgcagtctgggaggtggattttccggacgtggcgcggcgcaaagcagaaaggattggagagacgccagagctgtgcgcgttaaccgggcctttcgagaggggggagcccgcgtccgcgctgtgctttgagagcgcagactactgcatcctgggtctggacttgcggcagctccagcgagtggaggaggccctgggcgccgcggggctcgacgcagcctcacccactctgctcctggccgaggcggtgctgacctacctcgagccggagagtgccgcggccctcatcgcctgggcagcccagcgttttcctaatgcccttttcgtggtctatgagcagatgaggcctcaagacgcctttggccagttcatgctgcaacattttcggcagctaaactcccccctgcatggcctggagcgttttcctgacgtggaggcgcagcggcgccgcttccttcaagctggctggaccgcctgcggtgccgtggacatgaatgaattctatcactgctttcttcccgcagaagaacgccggcgggtggaaaatattgaaccctttgacgaatttgaggagtggcatctgaagtgcgcccattatttcattctggcagcttctaggggagacaccctctcccacaccctagtgtttccatcctcagaggcatttcctcgcgtaaatcctgcttcgccttcaggggtattccctgccagcgtagtcagtagcgagggccaggtcccaaacctgaagagatatggccacgcctctgtcttcttgagcccagacgttattctcagtgcaggaggatttggagagcaggaggggcggcactgccgagtgagccagtttcacttgctctcaagagattgtgactctgaatggaaaggcagccaaataggcagttgtgggactggagttcagtgggatggacgcctttatcacaccatgacaagactctcagagagtcgggttctggttctgggagggagactgtccccagtaagtccagccttgggggttctccagcttcatttttttaagagtgaggataataacactgaggacctgaaagtgacaataacaaaggctggccgaaaggatgattccactttgtgttgttggcggcattcaacaacagaagtgtcctgtcagaatcaggaatatttgtttgtgtatgggggtcgaagcgtggtggaacctgtactaagtgactggcatttcctccatgtagggacaatggcttgggtcaggatcccagtggagggagaagtacctgaagcccggcattctcacagtgcctgcacttggcaagggggagcccttattgctggaggtctcggggcttctgaggagccattgaactctgtgctctttctgagaccaatctcttgtggattcctctgggagtcagtagacatccagcctcccattaccccaaggtactcccacacagctcatgtgctcaatggaaagctgttactggttggagggatctggattcattcctcctcatttcctggagtgactgtgatcaatttgactacaggattgagctctgagtatcagattgacacaacatatgtgccatggccattaatgttacacaaccatactagtatccttcttcctgaagagcaacagctcctgctccttggaggtggtgggaactgcttttcctttggtacctacttcaacccccatacagtcacattagacctttcttccttaagtgctgggcagtaaggactggactaatattcaggacccactaaagtagacaataaagttttccacaaataggatgaccctctagctatagatactgccactcctcctttccccatcctttttttcccttagcactattcagtgcaaaaagtgaaaaaggttggtaaaataggtaaaatacctagaaacaatcactacagaaaacagctgaagacagtggccatgcagtccgagaggagtagtggtctgcctctaattttctaatctaagttcgtttattgagttacagtggtctttagtaaagtaaaacaatttcccaatcccaggccttgtgatttgagatggtaccttagaaaaagttacacgcagttccgtggttgaatatatttgagatggtaccttagaaaaagtttcacgcagatccttggttgaatatagttgagggagcgtagtattgacaattcttcatgtaggaaacctgaaatgaacacagtcacagtttgattaaaacattgtcctgtttgttgcaacagaaaactcggatagttttaacaacaggaaacacttgtaggacttcctttaccaacatactttttaaatgttttgctattggttccatatttatttagatttataagtgtcaataaagcaaacttttgatgcctcaa

SEQ ID NO: 276670 - DNA, 1773 bp, Homo sapiens
ggctggtacaggcccggagtgtatgggatcatcctcagaggcatttcctcgcgtaaatcctgcttcgccttcaggggtattccctgccagcgtagtcagtagcgagggccaggtcccaaacctgaagagatatggccacgcctctgtcttcttgagcccagacgttattctcagtgcaggaggatttggagagcaggaggggcggcactgccgagtgagccagtttcacttgctctcaagagattgtgactctgaatggaaaggcagccaaataggcagttgtgggactggagttcagtgggatggacgcctttatcacaccatgacaagactctcagagagtcgggttctggttctgggagggagactgtccccagtaagtccagccttgggggttctccagcttcatttttttaagagtgaggataataacactgaggacctgaaagtgacaataacaaaggctggccgaaaggatgattccactttgtgttgttggcggcattcaacaacagaagtgtcctgtcagaatcaggaatatttgtttgtgtatgggggtcgaagcgtggtggaacctgtactaagtgactggcatttcctccatgtagggacaatggcttgggtcaggatcccagtggagggagaagtacctgaagcccggcattctcacagtgcctgcacttggcaagggggagcccttattgctggaggtctcggggcttctgaggagccattgaactctgtgctctttctgagaccaatctcttgtggattcctctgggagtcagtagacatccagcctcccattaccccaaggtactcccacacagctcatgtgctcaatggaaagctgttactggttggagggatctggattcattcctcctcatttcctggagtgactgtgatcaatttgactacaggattgagctctgagtatcagattgacacaacatatgtgccatggccattaatgttacacaaccatactagtatccttcttcctgaagagcaacagctcctgctccttggaggtggtgggaactgcttttcctttggtacctacttcaacccccatacagtcacattagacctttcttccttaagtgctgggcagtaaggactggactaatattcaggacccactaaagtagacaataaagttttccacaaataggatgaccctctagctatagatactgccactcctcctttccccatcctttttttcccttagcactattcagtgcaaaaagtgaaaaaggttggtaaaataggtaaaatacctagaaacaatcactacagaaaacagctgaagacagtggccatgcagtccgagaggagtagtggtctgcctctaattttctaatctaagttcgtttattgagttacagtggtctttagtaaagtaaaacaatttcccaatcccaggccttgtgatttgagatggtaccttagaaaaagttacacgcagttccgtggttgaatatatttgagatggtaccttagaaaaagtttcacgcagatccttggttgaatatagttgagggagcgtagtattgacaattcttcatgtaggaaacctgaaatgaacacagtcacagtttgattaaaacattgtcctgtttgttgcaacagaaaactcggatagttttaacaacaggaaacacttgtaggacttcctttaccaacatactttttaaatgttttgctattggttccatatttatttagatttataagtgtcaataaagcaaacttttgatgcctcaa

SEQ ID NO: 276671 - DNA, 2182 bp, Homo sapiens
  misc_feature (1)..(1): n is a, c, g, or t
  misc_feature (4)..(4): n is a, c, g, or t
  misc_feature (8)..(10): n is a, c, g, or t
nccngcgnnnggggaagtccaggagcatgggtggtttttttccccctaccgaggtccgtgaggtgtgtgctaaccaaggggcggctcacaaccgtgacagactgccattcctgagtctcttctggccatgggcccccggagccgtgagcgtcgggcaggcgcggtacagaacaccaacgacagcagcgccctcagcaagcgttccctggccgcgcgcgggtacgtgcaggacccctttgccgcgttgctggttccgggcgcggcgcgccgcgcaccgctcattcaccgaggctactacgtccgcgcacgcgccgtgaggcactgcgtgcgcgcttttttggagcagattggcgcgccccaggccgcgcttcgcgcgcagatcttgtctctcggcgctggcttcgactcgctctattttcgcttaaaaaccgcgggccgcctggcccgggctgcagtctgggaggtggattttccggacgtggcgcggcgcaaagcagaaaggattggagagacgccagagctgtgcgcgttaaccgggcctttcgagaggggggagcccgcgtccgcgctgtgctttgagagcgcagactactgcatcctgggtctggacttgcggcagctccagcgagtggaggaggccctgggcgccgcggggctcgacgcagcctcacccactctgctcctggccgaggcggtgctgacctacctcgagccggagagtgccgcggccctcatcgcctgggcagcccagcgttttcctaatgcccttttcgtggtctatgagcagatgaggcctcaagacgcctttggccagttcatgctgcaacattttcggcagctaaactcccccctgcatggcctggagcgttttcctgacgtggaggcgcagcggcgccgcttccttcaagctggctggaccgcctgcggtgccgtggacatgaatgaattctatcactgctttcttcccgcagaagaacgccggcgggtggaaaatattgaaccctttgacgaatttgaggagtggcatctgaagtgcgcccattatttcattctggcagcttctaggggagacaccctctcccacaccctagtgtttccatcctcagaggcatttcctcgcgtaaatcctgcttcgccttcaggggtattccctgccagcgtagtcagtagcgagggccaggtcccaaacctgaagagatatggccacgcctctgtcttcttgagcccagacgttattctcagtgcaggaggatttggagagcaggaggggcggcactgccgagtgagccagtttcacttgctctcaagagattgtgactctgaatggaaaggcagccaaataggcagttgtgggactggagttcagtgggatggacgcctttatcacaccatgacaagactctcagagagtcgggttctggttctgggagggagactgtccccagtaagtccagccttgggggttctccagcttcatttttttaagagtgaggataataacactgaggacctgaaagtgacaataacaaaggctggccgaaaggatgattccactttgtgttgttggcggcattcaacaacagaagtgtcctgtcagaatcaggaatatttgtttgtgtatgggggtcgaagcgtggtggaacctgtactaagtgactggcatttcctccatgtagggacaatggcttgggtcaggatcccagtggagggagaagtacctgaagcccggcattctcacagtgcctgcacttggcaagggggagcccttattgctggaggtctcggggcttctgaggagccattgaactctgtgctctttctgagaccaatctcttgtggattcctctgggagtcagtagacatccagcctcccattaccccaaggtactcccacacagctcatgtgctcaatggaaagctgttactggttggagggatctggattcattcctcctcatttcctggagtgactgtgatcaatttgactacaggattgagctctgagtatcagattgacacaacatatgtgccatggccattaatgttacacaaccatactagtatccttcttcctgaagagcaacagctcctgctccttggaggtggtgggaactgcttttcctttggtacctacttcaacccccatacagtcacagctacctttccggaccggctcgattgc

SEQ ID NO: 276672 - DNA, 3087 bp, Homo sapiens
ctgagtagattggaagcagtgacagcacgctcctttgaagaggaaggagagcatttgggcagtagaaaacacagaatgtccgaagaaaaagactgtggtggcggagatgctctctccaatggcatcaagaaacacagaacaagtttgccttctcctatgttttccagaaatgacttcagtatctggagcatcctcagaaaatgtattggaatggaactatccaagatcacgatgccagttatatttaatgagcctctgagcttcctacagcgcctaactgaatacatggagcatacttacctcatccacaaggccagttcactctctgatcctgtggaaaggatgcagtgtgtagctgcgtttgctgtatctgctgttgcttctcagtgggaacggactggaaaacctttcaacccactgctgggagagacttatgaattagtgcgagatgaccttggatttagactcatctccgaacaggtcagccatcacccaccaatcagtgcatttcatgctgaaggattaaacaatgacttcatctttcatggctctatctatcccaaactgaaattctgggggaagagtgtagaagcagaacccaaaggaaccatcaccttggagctccttgaacacaatgaggcatatacatggacaaatcccacctgctgtgtgcataatatcattgtgggtaaactgtggatcgaacagtatggcaatgtggaaattataaaccacaagactggggacaaatgtgtgttgaattttaagccatgtggcctttttggtaaggaattacacaaagttgaaggctacattcaagataaaagcaaaaagaagctctgtgccctctatgggaagtggactgaatgtttatacagtgttgaccctgccacgtttgacgcttacaaaaaaaatgataagaaaaatacagaagagaagaagaacagcaaacagatgagcacctctgaggagttggatgaaatgccagtgccggattctgaaagtgtattcattatccctggaagcgttcttctatggcgaatagccccacggcctccaaattctgcccagatgtataattttactagttttgcaatggttttgaatgaagtagacaaagacatggagagtgtgattcccaagacagactgcaggttacggcctgacatcagagccatggaaaatggagagatagatcaagctagtgaagaaaaaaaacgacttgaggaaaaacaaagagcagcccgcaaaaacaggtccaagtcagaagaggactggaagacgaggtggttccatcaaggtcctaatccctacaatggagcacaggactggatttactctggcagctactgggacagaaattacttcaatttgcctgacatttattaaaatgcatacaagtcagggtgtttggctaatctacaaataagtcttaaacctatgtttttaaatttttttcccttggtttctacttatcttttaaaaaaaaaatgaaaaaacactcatgagataactgcatttcacccaacaaaagcagggtataaggcgatattggtgatgaaagtcttaggaaaaatgcataattttgctataaaatgtacttatttggaatactattttatatagaggtaagagaacactgctggggaatatgctttttatggttgctgttgccatatttactgaaggtttatacctaaatgtaactttagctttatggaactatatagtaatcccaaatcaagttattttgaatatttttatgctgtcatgcttgaatgttttagatgtaacctttgacatatttagaactctcctcctatacaatgtttattctcagatatagaggttatgtcattttataaagacttcattgataagatggcttttattcatactaatcctcccaatgttaccccttccatcttccaagaagaaaaaaaatgcctgaatattcagaatagatatttctgatttgaaaattctaaagaattaaactggaaaagtatttcatttacttagtgctctgaatttacttttacagttttctgcagtcagtatcattaaaatggttaagtttacatttgaactgaaaatatgtataaaatctagcaattcacaaaaatgccctagaaatatagattttaatcaccattacataatgacaaaccttgttaaatgcttccacttccagtggcaaatgccactagggaaagtaagttgcactcatgtaagtatcaaactatataaaaggaggccttgtgcatttcaagtttgcaaagtacctgtgtacttaaaatatgtgtggagacctactgtacagtagttttgcccctttaattggggcacattcatcttaaatcttatagtatttatccacccaaaccccagactgagatactgctcccaggggcctaggtagctgccagtccgtgattttaattgctgtcttgaagttaacaagtgttataatgaaataatctacctgatgctaaataaaggctttagaatgttcaaaaaaaaaatggtttcttttaaaatttcaaatatactaatgttgccacttaatactatcctaaattgttagacgtgtcctacgaaagaagtccttgtggtaccatagctcccagggtcaaggagatgataaccagttacctggcatgcatagtggacacagcctgggcgcaccctgcaaagctggcttcttctcatactcaggtgtcagtttacatctgagcctgaacaccctacctaatagtgacaattaaaggaacagcaatgggcacttgcattgcaacatatctcaagacatctgactgtgaaacgacagcatgtccaggaagaggtttccatccctgtgcttcctgaacatttgagcctactaagataaaaggtggggcactggtcttcttggtgtcgcccatcacataagttggaaaagtgacttttggtggatgctgctgaaactgtggatccttaggattaggtaaatagagggttgcttggggaaaaggcccaggtgcaggtggcggtgatgggtgaccttgttgattcttatcagttagacaataaagggtccacatgtta

SEQ ID NO: 276673 - DNA, 1556 bp, Homo sapiens
gacccaggctagagggtaaacccgttagacaaatacattgtttcgagccaacctattagaagaccctgcttctgtcaagtagcttgctagatcctggtgggaaatccatatgccttttgcatggtatcattaccccttttggaatattattccacagacctgttccctacctaagcagaaatacagcatcacttcagcatctctttagaactatccctcactcacagaatgagttgctgcaatagaataatactgcaaactagtgaagaaacagcctgtgattttccatagtttcccctgtaagtcttgtcctttttcttttaacaggtggttccatcaaggtcctaatccctacaatggagcacaggactggatttactctggcagctactgggacagaaattacttcaatttgcctgacatttattaaaatgcatacaagtcagggtgtttggctaatctacaaataagtcttaaacctatgtttttaaatttttttcccttggtttctacttatcttttaaaaaaaaaatgaaaaaacactcatgagataactgcatttcacccaacaaaagcagggtataaggcgatattggtgatgaaagtcttaggaaaaatgcataattttgctataaaatgtacttatttggaatactattttatatagaggtaagagaacactgctggggaatatgctttttatggttgctgttgccatatttactgaaggtttatacctaaatgtaactttagctttatggaactatatagtaatcccaaatcaagttattttgaatatttttatgctgtcatgcttgaatgttttagatgtaacctttgacatatttagaactctcctcctatacaatgtttattctcagatatagaggttatgtcattttataaagacttcattgataagatggcttttattcatactaatcctcccaatgttaccccttccatcttccaagaagaaaaaaaatgcctgaatattcagaatagatatttctgatttgaaaattctaaagaattaaactggaaaagtatttcatttacttagtgctctgaatttacttttacagttttctgcagtcagtatcattaaaatggttaagtttacatttgaactgaaaatatgtataaaatctagcaattcacaaaaatgccctagaaatatagattttaatcaccattacataatgacaaaccttgttaaatgcttccacttccagtggcaaatgccactagggaaagtaagttgcactcatgtaagtatcaaactatataaaaggaggccttgtgcatttcaagtttgcaaagtacctgtgtacttaaaatatgtgtggagacctactgtacagtagttttgcccctttaattggggcacattcatcttaaatcttatagtatttatccacccaaaccccagactgagatactgctcccaggggcctaggtagctgccagtccgtgattttaattgctgtcttgaagttaacaagtgttataatgaaataatctacctgatgctaaataaaggctttagaatgttc

SEQ ID NO: 276674 - DNA, 773 bp, Homo sapiens
cgagcggccgcccgggcaggtacgcgggatgcttgaatgttttagatgtaacctttgacatatttagaactctcctcctatacaatgtttattctcagatatagaggttatgtcattttataaagacttcattgataagatggcttttattcatactaatcctcccaatgttaccccttccatcttccaagaagaaaaaaaatgcctgaatattcagaatagatatttctgatttgaaaattctaaagaattaaactggaaaagtatttcatttacttagtgctctgaatttacttttacagttttctgcagtcagtatcattaaaatggttaagtttacatttgaactgaaaatatgtataaaatctagcaattcacaaaaatgccctagaaatatagattttaatcaccattacataatgacaaaccttgttaaatgcttccacttccagtggcaaatgccactagggaaagtaagttgcactcatgtaagtatcaaactatataaaaggaggccttgtgcatttcaagtttgcaaagtacctgtgtacttaaaatatgtgtggagacctactgtacagtagttttgcccctttaattggggcacattcatcttaaatcttatagtatttatccacccaaaccccagactgagatactgctcccaggggcctaggtagctgccagtccgtgattttaattgctgtcttgaagttaacaagtgttataatgaaataatctacctgatgctaaataaaggctttagaatgttc

SEQ ID NO: 276675 - DNA, 566 bp, Homo sapiens
cgagcggccgcccgggcaggtacgcggggaaaattctaaagaattaaactggaaaagtatttcatttacttagtgctctgaatttacttttacagttttctgcagtcagtatcattaaaatggttaagtttacatttgaactgaaaatatgtataaaatctagcaattcacaaaaatgccctagaaatatagattttaatcaccattacataatgacaaaccttgttaaatgcttccacttccagtggcaaatgccactagggaaagtaagttgcactcatgtaagtatcaaactatataaaaggaggccttgtgcatttcaagtttgcaaagtacctgtgtacttaaaatatgtgtggagacctactgtacagtagttttgcccctttaattggggcacattcatcttaaatcttatagtatttatccacccaaaccccagactgagatactgctcccaggggcctaggtagctgccagtccgtgattttaattgctgtcttgaagttaacaagtgttataatgaaataatctacctgatgctaaataaaggctttagaatgttc

SEQ ID NO: 276676 - DNA, 654 bp, Homo sapiens
ctgagtagattggaagcagtgacagcacgctcctttgaagaggaaggagagcatttgggcagtagaaaacacagaatgtccgaagaaaaagactgtggtggcggagatgctctctccaatggcatcaagaaacacagaacaagtttgccttctcctatgttttccagaaatgacttcagtatctggagcatcctcagaaaatgtattggaatggaactatccaagatcacgatgccagttatatttaatgagcctctgagcttcctacagcgcctaactgaatacatggagcatacttacctcatccacaaggccagttcactctctgatcctgtggaaaggatgcagtgtgtagctgcgtttgctgtatctgctgttgcttctcagtgggaacggactggaaaacctttcaacccactgctgggagagacttatgaattagtgcgagagtgagccgttggagtttagagcgtcagtgcccgcgaagcagggtcaggccagtcagccgcggccaagtcagtggcagtttcagtagctgaagcagttaaacgatgacttcatctttcgaccggggttattctacagtcaacagacgttattatgagcgagcagagcacagtacgcaagccatgtgcatccacagcaagctatgaa

SEQ ID NO: 276677 - DNA, 485 bp, Homo sapiens
gatcctgtctctacaaaaaaacttctttttaattaggcaggcgtagtggcgcatgcctgtgtacccagttactctggaggctgaggtgggaggaacccttgagcccaggaggttgaggctacagtgagccatgattatacctctgtactccagcctgagtaacagagtgagactctgtgagtcgtacacacctttatagtaatattcaattgcagcaaaacagtctatggcgatgccaccctgaacacgcctgatctcatctgctcttggaagctaagcagggtcaggcctggttagtactcggatgggagaccgcctgggaataccaggtgctgtcggctttaaaaaaacaaacactggtttgttaactaaacatcagtttttcttgacagcaaaaagaagctctgtgccctctatgggaagtggactgaatgtttatacagtgttgaccctgccacgtttgacgcttacaaaaaaaatgataa

SEQ ID NO: 276678 - DNA, 547 bp, Homo sapiens
gtaggtgtgccataaatccaacaacagggtcagatgtgccataacgtgaaagcatagtggatctctgaggtggtccaaacagctggatcccaaggactgggaggactgagttcagatcagagcaatgctgaagacagaggagcagttgattgctacagaatctttcaggggccaaagtaggtataggtgaacaggtgcaaccctagattagccctgcttagccctgtctgtgatgacacacatttttaaagggtctttctgtgcctgcagctctcatgtgaatgaaagcagttcttccctcctgctgacaatggcattagaatgaactttatgtttttcttttcttttttcagaacaagtttgccttctcctatgttttccagaaatgacttcagtatctggagcatcctcagaaaatgtattggaatggtaaattaatggttttgtcatatgatattaagcagatatgtttaatcgcatattctttagaaaggaacctaaaagtttgcattaaagtggtgcacgacaacgtttatgggaacgtacg

SEQ ID NO: 276679 - DNA, 319 bp, Homo sapiens
  misc_feature (16)..(16): n is a, c, g, or t
cattttatataatctnccccatttccccccagccagtctcactgtggcctacttcgctgtctctggaacccccgtgttcttttctgccctaggacacagcctgggcgcaccctgcaaagctggcttcttctcatactcaggtgtcagtttacatctgagcctgaacaccctacctaatagtgacaattaaaggtaggcctgtgtcagcaccctgttttctccataatactttacatgttgtaatacacttttttgtctgtctccccaactaagatgtaggtcccatgtttttgctcacgctactgtccacacatagggg

SEQ ID NO: 276680 - DNA, 2515 bp, Homo sapiens
ctgagtagattggaagcagtgacagcacgctcctttgaagaggaaggagagcatttgggcagtagaaaacacagaatgtccgaagaaaaagactgtggtggcggagatgctctctccaatggcatcaagaaacacagaacaagtttgccttctcctatgttttccagaaatgacttcagtatctggagcatcctcagaaaatgtattggaatggaactatccaagatcacgatgccagttatatttaatgagcctctgagcttcctacagcgcctaactgaatacatggagcatacttacctcatccacaaggccagttcactctctgatcctgtggaaaggatgcagtgtgtagctgcgtttgctgtatctgctgttgcttctcagtgggaacggactggaaaacctttcaacccactgctgggagagacttatgaattagtgcgagatgaccttggatttagactcatctccgaacaggtcagccatcacccaccaatcagtgcatttcatgctgaaggattaaacaatgacttcatctttcatggctctatctatcccaaactgaaattctgggggaagagtgtagaagcagaacccaaaggaaccatcaccttggagctccttgaacacaatgaggcatatacatggacaaatcccacctgctgtgtgcataatatcattgtgggtaaactgtggatcgaacagtatggcaatgtggaaattataaaccacaagactggggacaaatgtgtgttgaattttaagccatgtggcctttttggtaaggaattacacaaagttgaaggctacattcaagataaaagcaaaaagaagctctgtgccctctatgggaagtggactgaatgtttatacagtgttgaccctgccacgtttgacgcttacaaaaaaaatgataagaaaaatacagaagagaagaagaacagcaaacagatgagcacctctgaggagttggatgaaatgccagtgccggattctgaaagtgtattcattatccctggaagcgttcttctatggcgaatagccccacggcctccaaattctgcccagatgtataattttactagttttgcaatggttttgaatgaagtagacaaagacatggagagtgtgattcccaagacagactgcaggttacggcctgacatcagagccatggaaaatggagagatagatcaagctagtgaagaaaaaaaacgacttgaggaaaaacaaagagcagcccgcaaaaacaggtccaagtcagaagaggactggaagacgaggtggttccatcaaggtcctaatccctacaatggagcacaggactggatttactctggcagctactgggacagaaattacttcaatttgcctgacatttattaaaatgcatacaagtcagggtgtttggctaatctacaaataagtcttaaacctatgtttttaaatttttttcccttggtttctacttatcttttaaaaaaaaaatgaaaaaacactcatgagataactgcatttcacccaacaaaagcagggtataaggcgatattggtgatgaaagtcttaggaaaaatgcataattttgctataaaatgtacttatttggaatactattttatatagaggtaagagaacactgctggggaatatgctttttatggttgctgttgccatatttactgaaggtttatacctaaatgtaactttagctttatggaactatatagtaatcccaaatcaagttattttgaatatttttatgctgtcatgcttgaatgttttagatgtaacctttgacatatttagaactctcctcctatacaatgtttattctcagatatagaggttatgtcattttataaagacttcattgataagatggcttttattcatactaatcctcccaatgttaccccttccatcttccaagaagaaaaaaaatgcctgaatattcagaatagatatttctgatttgaaaattctaaagaattaaactggaaaagtatttcatttacttagtgctctgaatttacttttacagttttctgcagtcagtatcattaaaatggttaagtttacatttgaactgaaaatatgtataaaatctagcaattcacaaaaatgccctagaaatatagattttaatcaccattacataatgacaaaccttgttaaatgcttccacttccagtggcaaatgccactagggaaagtaagttgcactcatgtaagtatcaaactatataaaaggaggccttgtgcatttcaagtttgcaaagtacctgtgtacttaaaatatgtgtggagacctactgtacagtagttttgcccctttaattggggcacattcatcttaaatcttatagtatttatccacccaaaccccagactgagatactgctcccaggggcctaggtagctgccagtccgtgattttaattgctgtcttgaagttaacaagtgttataatgaaataatctacctgatgctaaataaaggctttagaatgttc

SEQ ID NO: 276681 - DNA, 1857 bp, Homo sapiens
tctgagcaagctgggaacgtcttggagtccagatgaagctggaatgagccactctggatcagatctccgaagcgcccaaggagatccttgcccaccaaggctctctcaatgtcatgtaagtcaggaagagaagccactgggatgtcctcaagccgtgatttccatgtaacattcgctcctaaacgctccctggtcagacaacccacctgcacagaggagttgttgcagacaggaatggaaacagcaagtgcgaagaactctagaacaatacaaaagagaagaagaacagcaaacagatgagcacctctgaggagttggatgaaatgccagtgccggattctgaaagtgtattcattatccctggaagcgttcttctatggcgaatagccccacggcctccaaattctgcccagatgtataattttactagttttgcaatggttttgaatgaagtagacaaagacatggagagtgtgattcccaagacagactgcaggttacggcctgacatcagagccatggaaaatggagagatagatcaagctagtgaagaaaaaaaacgacttgaggaaaaacaaagagcagcccgcaaaaacaggtccaagtcagaagaggactggaagacgaggtggttccatcaaggtcctaatccctacaatggagcacaggactggatttactctggcagctactgggacagaaattacttcaatttgcctgacatttattaaaatgcatacaagtcagggtgtttggctaatctacaaataagtcttaaacctatgtttttaaatttttttcccttggtttctacttatcttttaaaaaaaaaatgaaaaaacactcatgagataactgcatttcacccaacaaaagcagggtataaggcgatattggtgatgaaagtcttaggaaaaatgcataattttgctataaaatgtacttatttggaatactattttatatagaggtaagagaacactgctggggaatatgctttttatggttgctgttgccatatttactgaaggtttatacctaaatgtaactttagctttatggaactatatagtaatcccaaatcaagttattttgaatatttttatgctgtcatgcttgaatgttttagatgtaacctttgacatatttagaactctcctcctatacaatgtttattctcagatatagaggttatgtcattttataaagacttcattgataagatggcttttattcatactaatcctcccaatgttaccccttccatcttccaagaagaaaaaaaatgcctgaatattcagaatagatatttctgatttgaaaattctaaagaattaaactggaaaagtatttcatttacttagtgctctgaatttacttttacagttttctgcagtcagtatcattaaaatggttaagtttacatttgaactgaaaatatgtataaaatctagcaattcacaaaaatgccctagaaatatagattttaatcaccattacataatgacaaaccttgttaaatgcttccacttccagtggcaaatgccactagggaaagtaagttgcactcatgtaagtatcaaactatataaaaggaggccttgtgcatttcaagtttgcaaagtacctgtgtacttaaaatatgtgtggagacctactgtacagtagttttgcccctttaattggggcacattcatcttaaatcttatagtatttatccacccaaaccccagactgagatactgctcccaggggcctaggtagctgccagtccgtgattttaattgctgtcttgaagttaacaagtgttataatgaaataatctacctgatgctaaataaaggctttagaatgttc

SEQ ID NO: 276682 - DNA, 2416 bp, Homo sapiens
cacctgaccaagaccctggagttacaatggcggcgcccatgctgcgctggggctgccgtggaagacgttgggctttcgcccgggttgacggtggttcttgccaccgaagaggggctccgactgggtccacatccaaccagattaggggagagagctcagtggctcagcagcccctccacacggcccagaagacgaggaaaggtgaacacaaatgggctgctgtggtaggtttggaaattcatgcccagatttcctccaactctaaactcttctctggatctcaagttcgcttttcagcacctccaaattctttggtttctttttttgatgcatctctacctggaactttgccggttctcaacaggaggtgtgtagaagcggcggtgatgacaggcctggctctgaactgccacataaacaagaagtccttgtttgacaggaagcactacttctatgcagacctccctgcaggctaccaaattacccagcagaggctcccaattgctgtgaatgggagcttgatatatggcgtctgtgcagggaagaagcagagtcaggtgatccccaagacggtgaggatcaagcagatccagttggagcaagacagtggcaaaagcctccacgacaacctgaggtctcagacgctcattgatttgaacagggcaggagtgggccttctggaggtggtcctggagcccgacatgtcctgtggagaagaggcggcaacagctgtcagggagctgcagctgatccttcaagccctggggaccagccaggcgaacatggcagagggccagttgagagtggatgccaatatatccgtgcatcaccctggggagcctttgggcgttcgaacggaagtgaagaatctcaacagcatcaggttcctggccaaagccatagactatgaaattcagaggcaaatcaatgaacttgagaatggaggtgaaattctgaacgaaacacgctcatttcatcacaagctggggtgcaccatgtcaatgagagacaaagaaggaaaacaggactacaggttcatgccagaacccaacctgcctcccctggtgctctacgacgccacatctctgcccgcaggtgcagacccacagcaagtgatcaatattgaccagattcgggagacactcccggagctccccagtgtgacccgagagaagcttgtccaacagtatgggatgctgctggaacacagcttcactttgctgaacgaagtcggcctactggagttcttccaaaatgtgataaaagaaactagggcagagccaaaaaaggtgactagttgggtcctcaacacttttctgggctatttaaagcaacagaacctcgctgtcagtgagagtcctgtcacaccctctgcactcgctgagcttcttgacctgctggacagcagaacaatttcttcatcagcagctaaacaggtgtttgaggaactgtggaagagggaaggcaagactccagggcagattgtttcagaaaagcagcttgaactgatgcaggaccagggggcactggagcagctctgccactctgtgatggaggcccatcctcaagtggtaatggatgtgaagaacagaaaccccagagctataaataaactgattgggttggtccggaaagcgactcaaagccgagcagatccagtcatgataaaggagatcctggagaagaagctgtcattgtgagatgtttgggatccccttgcccaagggacaacaacaaacagtgcagcctgactgggaacaggatcctgtgaaagctgatgcccatgtgccctgagagctgcctctcaatccctgtcccaagccacagctatggcgttaatgtcaccagtgttctcaccctctaggccctgtgcctggaggtgcctccacagccgaccagcagccaccccgcctgcttcatccacatcaggagggtccggtgaggctgcagcagtggttaaggagtaacaccttcttgtattaaggaattttaaactaaataaaatgtatgttggagatactgttacccattctaagaaaacttttcattctgcagttccttcaacaaatatttttgagcaactcctaagggccagccattgtaggtgatgggcattagcagtggtcaagagagactgtaatttggatgtattgttttcagacctaaacacaggttaacaaagatgaaaatacaaccaaataaactggcacagtataaacacatttgtttgtttaaggaggtctcaagagggtggggaaggaggatattattagaattaatcaacctatcgactgagtagaagtgatattgcctgttaaactccctccccatcccagaaggcacagtctgagaataaatgaattaaaaaaataagttttccaataaatttaatcaataaaatatatactgaaatatc

SEQ ID NO: 276683 - DNA, 1946 bp, Homo sapiens
cacctgaccaagaccctggagttacaatggcggcgcccatgctgcgctggggctgccgtggaagacgttgggctttcgcccgggttgacggtggttcttgccaccgaagaggggctccgactgggtccacatccaaccagattaggggagagagctcagtggctcagcagcccctccacacggcccagaagacgaggaaaggtgaacacaaatgggctgctgtggtaggtttggaaattcatgcccagatttcctccaactctaaactcttctctggatctcaagttcgcttttcagcacctccaaattctttggtttctttttttgatgcatctctacctggaactttgccggttctcaacaggaggtgtgtagaagcggcggtgatgacaggcctggctctgaactgccacataaacaagaagtccttgtttgacaggaagcactacttctatgcagacctccctgcaggctaccaaattacccagcagaggctcccaattgctgtgaatgggagcttgatatatggcgtctgtgcagggaagaagcagagtcaggtgatccccaagacggtgaggatcaagcagatccagttggagcaagacagtggcaaaagcctccacgacaacctgaggtctcagacgctcattgatttgaacagggcaggagtgggccttctggaggtggtcctggagcccgacatgtcctgtggagaagaggcggcaacagctgtcagggagctgcagctgatccttcaagccctggggaccagccaggcgaacatggcagagggccagttgagagtggatgccaatatatccgtgcatcaccctggggagcctttgggcgttcgaacggaagtgaagaatctcaacagcatcaggttcctggccaaagccatagactatgaaattcagaggcaaatcaatgaacttgagaatggaggtgaaattctgaacgaaacacgctcatttcatcacaagctggggtgcaccatgtcaatgagagacaaagaaggaaaacaggactacaggttcatgccagaacccaacctgcctcccctggtgctctacgacgccacatctctgcccgcaggtgcagacccacagcaagtgatcaatattgaccagattcgggagacactcccggagctccccagtgtgacccgagagaagcttgtccaacagtatgggatgctgctggaacacagcttcactttgctgaacgaagtcggcctactggagttcttccaaaatgtgataaaagaaactagggcagagccaaaaaaggtgactagttgggtcctcaacacttttctgggctatttaaagcaacagaacctcgctgtcagtgagaggtgtttgaggaactgtggaagagggaaggcaagactccagggcagattgtttcagaaaagcagcttgaactgatgcaggaccagggggcactggagcagctctgccactctgtgatggaggcccatcctcaagtggtaatggatgtgaagaacagaaaccccagagctataaataaactgattgggttggtccggaaagcgactcaaagccgagcagatccagtcatgataaaggagatcctggagaagaagctgtcattgtgagatgtttgggatccccttgcccaagggacaacaacaaacagtgcagcctgactgggaacaggatcctgtgaaagctgatgcccatgtgccctgagagctgcctctcaatccctgtcccaagccacagctatggcgttaatgtcaccagtgttctcaccctctaggccctgtgcctggaggtgcctccacagccgaccagcagccaccccgcctgcttcatccacatcaggagggtccggtgaggctgcagcagtggttaaggagtaacaccttcttgtattaaggaattttaaactaaataaaatgtatgttggagatactgtta

SEQ ID NO: 276684 - DNA, 2385 bp, Homo sapiens
cacctgaccaagaccctggagttacaatggcggcgcccatgctgcgctggggctgccgtggaagacgttgggctttcgcccgggttgacggtggttcttgccaccgaagaggggctccgactgggtccacatccaaccagattaggggagagagctcagtggctcagcagcccctccacacggcccagaagacgaggaaaggtgaacacaaatgggctgctgtggtaggtttggaaattcatgcccagatttcctccaactctaaactcttctctggatctcaagttcgcttttcagcacctccaaattctttggtttctttttttgatgcatctctacctggaactttgccggttctcaacaggaggtgtgtagaagcggcggtgatgacaggcctggctctgaactgccacataaacaagaagtccttgtttgacaggaagcactacttctatgcagacctccctgcaggctaccaaattacccagcagaggctcccaattgctgtgaatgggagcttgatatatggcgtctgtgcagggaagaagcagagtcaggtgatccccaagacggtgaggatcaagcagatccagttggagcaagacagtggcaaaagcctccacgacaacctgaggtctcagacgctcattgatttgaacagggcaggagtgggccttctggaggtggtcctggagcccgacatgtcctgtggagaagaggcggcaacagctgtcagggagctgcagctgatccttcaagccctggggaccagccaggcgaacatggcagagggccagttgagagtggatgccaatatatccgtgcatcaccctggggagcctttgggcgttcgaacggaagtgaagaatctcaacagcatcaggttcctggccaaagccatagactatgaaattcagaggcaaatcaatgaacttgagaatggaggtgaaattctgaacgaaacacgctcatttcatcacaagctggggtgcaccatgtcaatgagagacaaagaaggaaaacaggactacaggttcatgccagaacccaacctgcctcccctggtgctctacgacgccacatctctgcccgcaggtgcagacccacagcaagtgatcaatattgaccagattcgggagacactcccggagctccccagtgtgacccgagagaagcttgtccaacagtatgggatgctgctggaacacagcttcactttgctgaacgaagtcggcctactggagttcttccaaaatgtgataaaagaaactagggcagagccaaaaaaggtgactagttgggtcctcaacacttttctgggctatttaaagcaacagaacctcgctgtcagtgagagtcctgtcacaccctctgcactcgctgagcttcttgacctgctggacagcagaacaatttcttcatcagcagctaaacaggtgtttgaggaactgtggaagagggaaggcaagactccagggcagattgtttcagaaaagcagcttgaactgatgcaggaccagggggcactggagcagctctgccactctgtgatggaggcccatcctcaagtggtaatggatgtgaagaacagaaaccccagagctataaataaactgattgggttggtccggaaagcgactcaaagccgagcagatccagtcatgataaaggagatcctggagaagaagctgtcattgtgagatgtttgggatccccttgcccaagggacaacaacaaacagtgcagcctgactgggaacaggatcctgtgaaagctgatgcccatgtgccctgagagctgcctctcaatccctgtcccaagccacagctatggcgttaatgtcaccagtgttctcaccctctaggccctgtgcctggaggtgcctccacagccgaccagcagccaccccgcctgcttcatccacatcaggagggtccggtgaggctgcagcagtggttaaggagtaacaccttcttgtattaaggaattttaaactaaataaaatgtatgttggagatactgttaaacaaaaaaaaaaaaaaaaaaaaaaaaaaaaaaaaaaaaaaaaaagggggggagccgaccctagaagagtatattcccgcagggggggggcccacagccttcacgcgggatcccacagggttttcggtggaacacaaggggggggccccccctatagggcagagccgcgcattgtcatataagagggcgcaagggccccgggggcgcggcagcgtttaacaccacacgtcgctcgagcagggtggaaaacaccgcctgtgtcaccgcgggcgggacccccttgcgggagaaacgggagaccccttaaacgccggggggggcggcgggcggacacccatagtgggggcacaaagacagtcc

SEQ ID NO: 276685 - DNA, 2028 bp, Homo sapiens
cacctgaccaagaccctggagttacaatggcggcgcccatgctgcgctggggctgccgtggaagacgttgggctttcgcccgggttgacggtggttcttgccaccgaagaggggctccgactgggtccacatccaaccagattaggggagagagctcagtggctcagcagcccctccacacggcccagaagacgaggaaaggtgaacacaaatgggctgctgtggtaggtttggaaattcatgcccagatttcctccaactctaaactcttctctggatctcaagttcgcttttcagcacctccaaattctttggtttctttttttgatgcatctctacctggaactttgccggttctcaacaggaggtgtgtagaagcggcggtgatgacaggcctggctctgaactgccacataaacaagaagtccttgtttgacaggaagcactacttctatgcagacctccctgcaggctaccaaattacccagcagaggctcccaattgctgtgaatgggagcttgatatatggcgtctgtgcagggaagaagcagagtcaggtgatccccaagacggtgaggatcaagcagatccagttggagcaagacagtggcaaaagcctccacgacaacctgaggtctcagacgctcattgatttgaacagggcaggagtgggccttctggaggtggtcctggagcccgacatgtcctgtggagaagaggcggcaacagctgtcagggagctgcagctgatccttcaagccctggggaccagccaggcgaacatggcagagggccagttgagagtggatgccaatatatccgtgcatcaccctggggagcctttgggcgttcgaacggaagtgaagaatctcaacagcatcaggttcctggccaaagccatagactatgaaattcagaggcaaatcaatgaacttgagaatggaggtgaaattctgaacgaaacacgctcatttcatcacaagctggggtgcaccatgtcaatgagagacaaagaaggaaaacaggactacaggttcatgccagaacccaacctgcctcccctggtgctctacgacgccacatctctgcccgcaggtgcagacccacagcaagtgatcaatattgaccagattcgggagacactcccggagctccccagtgtgacccgagagaagcttgtccaacagtatgggatgctgctggaacacagcttcactttgctgaacgaagtcggcctactggagttcttccaaaatgtgataaaagaaactagggcagagccaaaaaaggtgactagttgggtcctcaacacttttctgggctatttaaagcaacagaacctcgctgtcagtgagagtcctgtcacaccctctgcactcgctgagcttcttgacctgctggacagcagaacaatttcttcatcagcagctaaacaggtgtttgaggaactgtggaagagggaaggcaagactccagggcagattgtttcagaaaagcagcttgaactgatgcaggaccagggggcactggagcagctctgccactctgtgatggaggcccatcctcaagtggtaatggatgtgaagaacagaaaccccagagctataaataaactgattgggttggtccggaaagcgactcaaagccgagcagatccagtcatgataaaggagatcctggagaagaagctgtcattgtgagatgtttgggatccccttgcccaagggacaacaacaaacagtgcagcctgactgggaacaggatcctgtgaaagctgatgcccatgtgccctgagagctgcctctcaatccctgtcccaagccacagctaccgtgtcatcgtcttccgtgttcttaccatggggtccgggtacatacacaggcatccaaaggggatggtcaccagtccgtcggggttgagctcaatgagaagggttataggagacagcagcactggccagggatgtagcgcgttggggcaagaagccatttgccagtatccaccgcgtttgtagtacagattgtatta

SEQ ID NO: 276686 - DNA, 1619 bp, Homo sapiens
cacctgaccaagaccctggagttacaatggcggcgcccatgctgcgctggggctgccgtggaagacgttgggctttcgcccgggttgacggtggttcttgccaccgaagaggggctccgactgggtccacatccaaccagattaggggagagagctcagtggctcagcagcccctccacacggcccagaagacgaggaaaggtgaacacaaatgggctgctgtggtaggtttggaaattcatgcccagatttcctccaactctaaactcttctctggatctcaagttcgcttttcagcacctccaaattctttggtttctttttttgatgcatctctacctggaactttgccggttctcaacaggaggtgtgtagaagcggcggtgatgacaggcctggctctgaactgccacataaacaagaagtccttgtttgacaggaagcactacttctatgcagacctccctgcaggctaccaaattacccagcagaggctcccaattgctgtgaatgggagcttgatatatggcgtctgtgcagggaagaagcagagtcaggtgatccccaagacggtgaggatcaagcagatccagttggagcaagacagtggcaaaagcctccacgacaacctgaggtctcagacgctcattgatttgaacagggcaggagtgggccttctggaggtggtcctggagcccgacatgtcctgtggagaagaggcggcaacagctgtcagggagctgcagctgatccttcaagccctggggaccagccaggcgaacatggcagagggccagttgagagtggatgccaatatatccgtgcatcaccctggggagcctttgggcgttcgaacggaagtgaagaatctcaacagcatcaggttcctggccaaagccatagactatgaaattcagaggcaaatcaatgaacttgagaatggaggtgaaattctgaacgaaacacgctcatttcatcacaagctggggtgcaccatgtcaatgagagacaaagaaggaaaacaggactacaggttcatgccagaacccaacctgcctcccctggtgctctacgacgccacatctctgcccgcaggtgcagacccacagcaagtgatcaatattgaccagattcgggagacactcccggagctccccagtgtgacccgagagaagcttgtccaacagtatgggatgctgctggaacacagcttcactttgctgaacgaagtcggcctactggagttcttccaaaatgtgataaaagaaactagggcagagccaaaaaaggtgactagttgggtcctcaacacttttctgggctatttaaagcaacagaacctcgctgtcagtgagagtcctgtcacaccctctgcactcgctgagcttcttgacctgctggacagcagaacaatttcttcatcagcagctaaacagacctgcacatcatctggcactggataatcacagaggagcatcccatcagaatgattcctgctttacctcacctgaaacgcaagtcagacacaaaaatgaggggacagcaagccctcaaaaaaaacttagtgtgcggtgagagaaaatttagcaagaagataaaataaacagactaaactcctt

SEQ ID NO: 276687 - DNA, 350 bp, Homo sapiens
ctttcctctcccttctctggtccataggtgtttgaggaactgtggaagagggaaggcaagactccagggcagattgtttcagaaaagcagcttgaactgatgcaggaccagggggcactggagcagctctgccactctgtgatggaggcccatcctcaagtggtgactatctcgggcaggggagagggccagagccagccccaggacatgcccaagagcctcgccatcgctccctgtggcagcccagaggctcttcctaagaatggctgacccagtttcatcaataattccctcactgtcatctttttagttaaggtcagaagagatgaaataggtggatattggaaaaa

SEQ ID NO: 276688 - DNA, 2025 bp, Homo sapiens
cacctgaccaagaccctggagttacaatggcggcgcccatgctgcgctggggctgccgtggaagacgttgggctttcgcccgggttgacggtggttcttgccaccgaagaggggctccgactgggtccacatccaaccagattaggggagagagctcagtggctcagcagcccctccacacggcccagaagacgaggaaaggtgaacacaaatgggctgctgtggtaggtttggaaattcatgcccagatttcctccaactctaaactcttctctggatctcaagttcgcttttcagcacctccaaattctttggtttctttttttgatgcatctctacctggaactttgccggttctcaacaggaggtgtgtagaagcggcggtgatgacaggcctggctctgaactgccacataaacaagaagtccttgtttgacaggaagcactacttctatgcagacctccctgcaggctaccaaattacccagcagaggctcccaattgctgtgaatgggagcttgatatatggcgtctgtgcagggaagaagcagagtcaggtgatccccaagacggtgaggatcaagcagatccagttggagcaagacagtggcaaaagcctccacgacaacctgaggtctcagacgctcattgatttgaacagggcaggagtgggccttctggaggtggtcctggagcccgacatgtcctgtggagaagaggcggcaacagctgtcagggagctgcagctgatccttcaagccctggggaccagccaggcgaacatggcagagggccagttgagagtggatgccaatatatccgtgcatcaccctggggagcctttgggcgttcgaacggaagtgaagaatctcaacagcatcaggttcctggccaaagccatagactatgaaattcagaggcaaatcaatgaacttgagaatggaggtgaaattctgaacgaaacacgctcatttcatcacaagctggggtgcaccatgtcaatgagagacaaagaaggaaaacaggactacaggttcatgccagaacccaacctgcctcccctggtgctctacgacgccacatctctgcccgcaggtgcagacccacagcaagtgatcaatattgaccagattcgggagacactcccggagctccccagtgtgacccgagagaagcttgtccaacagtatgggatgctgctggaacacagcttcactttgctgaacgaagtcggcctactggagttcttccaaaatgtgataaaagaaactagggcagagccaaaaaaggtgactagttgggtcctcaacacttttctgggctatttaaagcaacagaacctcgctgtcagtgagagtcctgtcacaccctctgcactcgctgagcttcttgacctgctggacagcagaacaatttcttcatcagcagctaaacaggtgtttgaggaactgtggaagagggaaggcaagactccagggcagattgtttcagaaaagcagcttgaactgatgcaggaccagggggcactggagcagctctgccactctgtgatggaggcccatcctcaagtggtaatggatgtgaagaacagaaaccccagagctataaataaactgattgggttggtccggaaagcgactcaaagccgagcagatccagtcatgataaaggagatcctggagaagaagctgtcattgtgagatgtttgggatccccttgcccaagggacaacaacaaacagtgcagcctgactgggaacaggatcctgtgaaagctgatgcccatgtgccctgagagctgcctctcaatccctgtcccaagccacagctatggcgttaatgtcaccagtgttctcaccctctaggccctgtgcctggaggtgcctccacagccgaccagcagccaccccgcctgcttcatccacatcaggagggtccggtgaggctgcagcagtggttaaggagtaacaccttcttgtattaaggaattttaaactaaataaaatgtatgttggagatactgtta

SEQ ID NO: 276689 - DNA, 633 bp, Homo sapiens
cacctgaccaagaccctggagttacaatggcggcgcccatgctgcgctggggctgccgtggaagacgttgggctttcgcccgggttgacggtggttcttgccaccgaagaggggctccgactgggtccacatccaaccagattaggggagagagctcagtggctcagcagcccctccacacggcccagaagacgaggaaaggtgaacacaaatgggctgctgtggtaggtttggaaattcatgcccagatttcctccaactctaaactcttctctggatctcaagttcgcttttcagcacctccaaattctttggtttctttttttgatgcatctctacctggaactttgccgagtgaagacagcccaagttgaattttcccattctgtatcctatcctcagaacatgctgacctggacttccatctgtcacaagcagcttgactaagatcctaggaaattcctttttttcttggcattcttctaactgacactctctgtttactgggccctctgtgcatctgtaacgtgtgatgactgatgcttataattctgaccttgaagtacttcatggcttctaaatcatcaaaaaaagattaaagcatattctcagtatcactgtaatgtttgtgtg

SEQ ID NO: 276690 - DNA, 1890 bp, Homo sapiens
cacctgaccaagaccctggagttacaatggcggcgcccatgctgcgctggggctgccgtggaagacgttgggctttcgcccgggttgacggtggttcttgccaccgaagaggggctccgactgggtccacatccaaccagattaggggagagagctcagtggctcagcagcccctccacacggcccagaagacgaggaaaggtgaacacaaatgggctgctgtggtaggtttggaaattcatgcccagatttcctccaactctaaactcttctctggatctcaagttcgcttttcagcacctccaaattctttggtttctttttttgatgcatctctacctggaactttgccggttctcaacaggaggtgtgtagaagcggcggtgatgacaggcctggctctgaactgccacataaacaagaagtccttgtttgacaggaagcactacttctatgcagacctccctgcaggctaccaaattacccagcagaggctcccaattgctgtgaatgggagcttgatatatggcgtctgtgcagggaagaagcagagtcaggtgatccccaagacggtgaggatcaagcagatccagttggagcaagacagtggcaaaagcctccacgacaacctgaggtctcagacgctcattgatttgaacagggcaggagtgggccttctggaggtggtcctggagcccgacatgtcctgtggagaagaggcggcaacagctgtcagggagctgcagctgatccttcaagccctggggaccagccaggcgaacatggcagagggccagttgagagtggatgccaatatatccgtgcatcaccctggggagcctttgggcgttcgaacggaagtgaagaatctcaacagcatcaggttcctggccaaagccatagactatgaaattcagaggcaaatcaatgaacttgagaatggaggtgaaattctgaacgaaacacgctcatttcatcacaagctggggtgcaccatgtcaatgagagacaaagaaggaaaacaggactacaggttcatgccagaacccaacctgcctcccctggtgctctacgacgccacatctctgcccgcaggtgcagacccacagcaagtgatcaatattgaccagattcgggagacactcccggagctccccagtgtgacccgagagaagcttgtccaacagtatgggatgctgctggaacacagcttcactttgctgaacgaagtcggcctactggagttcttccaaaatgtgataaaagaaactagggcagagccaaaaaaggtgactagttgggtcctcaacacttttctgggctatttaaagcaacagaacctcgctgtcagtgagagtcctgtcacaccctctgcactcgctgagcttcttgacctgctggacagcagaacaatttcttcatcagcagctaaacaggtaatggatgtgaagaacagaaaccccagagctataaataaactgattgggttggtccggaaagcgactcaaagccgagcagatccagtcatgataaaggagatcctggagaagaagctgtcattgtgagatgtttgggatccccttgcccaagggacaacaacaaacagtgcagcctgactgggaacaggatcctgtgaaagctgatgcccatgtgccctgagagctgcctctcaatccctgtcccaagccacagctatggcgttaatgtcaccagtgttctcaccctctaggccctgtgcctggaggtgcctccacagccgaccagcagccaccccgcctgcttcatccacatcaggagggtccggtgaggctgcagcagtggttaaggagtaacaccttcttgtattaaggaattttaaactaaataaaatgtatgttggagatactgtta

SEQ ID NO: 276691 - DNA, 1455 bp, Homo sapiens
ttcagtaaggcagggttttcctgaaacttaggcctaatttttctgttggtgaaattggagagctgcagtgaggctgactctgcccctctttggtaggagtgggccttctggaggtggtcctggagcccgacatgtcctgtggagaagaggcggcaacagctgtcagggagctgcagctgatccttcaagccctggggaccagccaggcgaacatggcagagggccagttgagagtggatgccaatatatccgtgcatcaccctggggagcctttgggcgttcgaacggaagtgaagaatctcaacagcatcaggttcctggccaaagccatagactatgaaattcagaggcaaatcaatgaacttgagaatggaggtgaaattctgaacgaaacacgctcatttcatcacaagctggggtgcaccatgtcaatgagagacaaagaaggaaaacaggactacaggttcatgccagaacccaacctgcctcccctggtgctctacgacgccacatctctgcccgcaggtgcagacccacagcaagtgatcaatattgaccagattcgggagacactcccggagctccccagtgtgacccgagagaagcttgtccaacagtatgggatgctgctggaacacagcttcactttgctgaacgaagtcggcctactggagttcttccaaaatgtgataaaagaaactagggcagagccaaaaaaggtgactagttgggtcctcaacacttttctgggctatttaaagcaacagaacctcgctgtcagtgagagtcctgtcacaccctctgcactcgctgagcttcttgacctgctggacagcagaacaatttcttcatcagcagctaaacaggtgtttgaggaactgtggaagagggaaggcaagactccagggcagattgtttcagaaaagcagcttgaactgatgcaggaccagggggcactggagcagctctgccactctgtgatggaggcccatcctcaagtggtaatggatgtgaagaacagaaaccccagagctataaataaactgattgggttggtccggaaagcgactcaaagccgagcagatccagtcatgataaaggagatcctggagaagaagctgtcattgtgagatgtttgggatccccttgcccaagggacaacaacaaacagtgcagcctgactgggaacaggatcctgtgaaagctgatgcccatgtgccctgagagctgcctctcaatccctgtcccaagccacagctatggcgttaatgtcaccagtgttctcaccctctaggccctgtgcctggaggtgcctccacagccgaccagcagccaccccgcctgcttcatccacatcaggagggtccggtgaggctgcagcagtggttaaggagtaacaccttcttgtattaaggaattttaaactaaataaaatgtatgttggagatactgtta

SEQ ID NO: 276692 - DNA, 1703 bp, Homo sapiens
cacctgaccaagaccctggagttacaatggcggcgcccatgctgcgctggggctgccgtggaagacgttgggctttcgcccgggttgacggtggttcttgccaccgaagaggggctccgactgggtccacatccaaccagattaggggagagagctcagtggctcagcagcccctccacacggcccagaagacgaggaaaggtgaacacaaatgggctgctgtggtaggtttggaaattcatgcccagatttcctccaactctaaactcttctctggatctcaagttcgcttttcagcacctccaaattctttggtttctttttttgatgcatctctacctggaactttgccggttctcaacaggaggtgtgtagaagcggcggtgatgacaggcctggctctgaactgccacataaacaagaagtccttgtttgacaggaagcactacttctatgcagacctccctagggccagttgagagtggatgccaatatatccgtgcatcaccctggggagcctttgggcgttcgaacggaagtgaagaatctcaacagcatcaggttcctggccaaagccatagactatgaaattcagaggcaaatcaatgaacttgagaatggaggtgaaattctgaacgaaacacgctcatttcatcacaagctggggtgcaccatgtcaatgagagacaaagaaggaaaacaggactacaggttcatgccagaacccaacctgcctcccctggtgctctacgacgccacatctctgcccgcaggtgcagacccacagcaagtgatcaatattgaccagattcgggagacactcccggagctccccagtgtgacccgagagaagcttgtccaacagtatgggatgctgctggaacacagcttcactttgctgaacgaagtcggcctactggagttcttccaaaatgtgataaaagaaactagggcagagccaaaaaaggtgactagttgggtcctcaacacttttctgggctatttaaagcaacagaacctcgctgtcagtgagagtcctgtcacaccctctgcactcgctgagcttcttgacctgctggacagcagaacaatttcttcatcagcagctaaacaggtgtttgaggaactgtggaagagggaaggcaagactccagggcagattgtttcagaaaagcagcttgaactgatgcaggaccagggggcactggagcagctctgccactctgtgatggaggcccatcctcaagtggtaatggatgtgaagaacagaaaccccagagctataaataaactgattgggttggtccggaaagcgactcaaagccgagcagatccagtcatgataaaggagatcctggagaagaagctgtcattgtgagatgtttgggatccccttgcccaagggacaacaacaaacagtgcagcctgactgggaacaggatcctgtgaaagctgatgcccatgtgccctgagagctgcctctcaatccctgtcccaagccacagctatggcgttaatgtcaccagtgttctcaccctctaggccctgtgcctggaggtgcctccacagccgaccagcagccaccccgcctgcttcatccacatcaggagggtccggtgaggctgcagcagtggttaaggagtaacaccttcttgtattaaggaattttaaactaaataaaatgtatgttggagatactgtta

SEQ ID NO: 276693 - DNA, 933 bp, Homo sapiens
atgatgctgagtccggaccaagcagcagattcggaccatcccagctcggcgcactcggatccggagtccctgggcggcacggacaccaaggtgctcggcagcgtgtcggacctggagccggtggaggaggccgagggcgacggcaagggcggcagccgagccgcgctctacccgcacccgcagcagctgagccgcgaggagaagcgccgccgccggcgcgccacggccaagtaccgctcggcccacgccacccgcgagcgcatccgcgtggaagccttcaacttggccttcgccgagctccgcaaattgctgcccacgctgcccccggacaagaagctctccaagatcgagatcctgcgcctggccatctgctacatctcctatctcaaccacgtcctggacgtgtagggcggggtgcgccgcggggggccgcctgtcccggcgtccgcgaaacgctacggatccggacgggcgccgtcgctcgggtggcggaggctgcggtggcccagcgagacggccgcctcgagagacggccggggaagaagctcgctacctgttctctctggtcagcagggcgacgagggaaggtttccgacgcaggcaggtggggttgtctggcgagcccgggggctcgcaggggggattttccaggccaggagaacctcgtggagacacccgagatgagccacttctggggctccccaagggttgtggttttaacccactggagactttgagttctcctacattcatccgccacaaatcttaatgtgttgaaagaatgagggcagaagttcagagtatgcaggctcataactttaggctatctggaatttttctaatggacaaatcaccaaacactgggaaggaggagagaggagggatctctcccatagagatggaaggcacagaaaggtgcgactggaaactttc

SEQ ID NO: 276694 - DNA, 459 bp, Homo sapiens
agtcccagggtgaagggaggcagcttcagtcctggggccaatagcacatccgaggaaatcagggcccctggaacacagcctgcgggactgggggcacatctgctgcccaatccagagcttgaatgctcctggtgagaaaggataacaaacagcacttccccatggcagatgcttcacagtccaagactcggggccttgaatgatccaggaaggccactgagatttccactttatctactgtttcttgtgcacgtacttaaccataaatcaaaacagcctctgtgttatcatccttcaatgttcaacacatcgcatcggagtcgccctttccctacagaatataagctctgggtctgggggctaatagtgtggggatccaccatcttgtcttgcccccacctgagacacagatgtggcttctattcgtatgtccctattaaatgcttttctctgagaaac

SEQ ID NO: 276695 - DNA, 290 bp, Homo sapiens
ccgcctcagcctttggagtagctgggactacagatccaggaaggccactgagatttccactttatctactgtttcttgtgcacgtacttaaccataaatcaaaacagcctctgtgttatcatccttcaatgttcaacacatcgcatcggagtcgccctttccctacagaatataagctctgggtctgggggctaatagtgtggggatccaccatcttgtcttgcccccacctgagacacagatgtggcttctattcgtatgtccctattaaatgcttttctctgagaaac

SEQ ID NO: 276696 - DNA, 481 bp, Homo sapiens
cacgaggggacacttccattttaagagtgtgagcagcttcctgggacacagcactcacttcctacattccttgtccaggaagttgtttctagtgctcttcaattccatgtctccaagaggcaatcccacctcaaaaggggttaaaagcaaaaacattcacaaccaaagacactgcagggaaagagttagaccttgtggagaactaatgtgcaatcttcgctttccttgaaccgagtcgacatcacggcgttgtctttggcacgtacagtctttgaataatagttgacgatcttgccgtccagtttatactgatggggaatgctctcgtagggcttgaggtcaaggtccagcacagacacggaaaaggcaaacctggacctcgatgaagggacgacaggcctttgatcagagctgcaagtaaaaagtaccatttcaggatacacaagccccccattcatttccctccctcccgttctctctc

SEQ ID NO: 276697 - DNA, 440 bp, Homo sapiens
gaagatttatggacaggaaaaagaaaatgatgtatgaacatgaaagtgaggtacacaaacagccagactggttatagctcagcattggcattatttgaacgagatctgaacagatggcctcctttgataggccgaaagtcagtgattggtggaagacacgcagttaccctgcaaccccagctggggacataatggagctctgagtgctggtggacagtgcccctcccaccttccttcttccccacaacagaagagaccagcgactcccgcaaagggacaaggttcctccctctcctgcagagtaggcatctgggcaccaagaccttccctcaacagaggacactgagcccaacggagttctgggatgggaggggtgggagcatgggaagggaggcatcccacccccaagaagaactgaataaagattgctgagcaaaaaa

SEQ ID NO: 276698 - DNA, 209 bp, Homo sapiens
tggctgatgctgcaggcttaggcgggcagatccttgggaaggggccaagagggtggggtgcaccaggctctctttttttcccagctcccctctccgaggagctgtgcccatgagcaccaagcccattcctgtctcagctggtgccggtccccgctctcctggaccatccagcaggtacctatacaagtcgtcgaccctcagcctggtcc

SEQ ID NO: 276699 - DNA, 975 bp, Homo sapiens
agagcggttcctctccgtggcgccctaccgccttcggcgcgaaggtggctggtgcgtaccgtcccgaaccctaggagccgaggtgagcgccgcgaagacccccgacattaagaagtggtgtccaccgcagcccccttaagccggataccctcccccaccccgaggagcaagcctgccttccgccacgcgccgcccgtcttccgcgcccgcgcagaacctcgcggctgtgcccgcctaaagccacgcccatcctctcttggccacgccctcagagactcctcccctgtcgcccagatcccacccgcaggaccccaaaacccaatgatcctgcagcagcccttgcagcgaggcccccagggaggggcccagcgcctcccgcgggccgccttgggggtgacttggggcctggacgccagctcccctctccgaggagctgtgcccatgagcaccaagcggcgcctggaggaggagcaggagcctctgcgcaagcagtttctgtctgaggagaacatggccacccacttctctcaactcagcctgcacaatgaccacccctactgcagcccccccatgaccttctccccagccctgcccccactcaggagcccttgctctgagctgcttctctggcgctatcctggcagcctcatccctgaggccctccgtctgctgaggctgggggacacccccagtcccccctaccctgcaaccccagctggggacataatggagctctgagtgctggtggacagtgcccctcccaccttccttcttccccacaacagaagagaccagcgactcccgcaaagggacaaggttcctccctctcctgcagagtaggcatctgggcaccaagaccttccctcaacagaggacactgagcccaacggagttctgggatgggaggggtgggagcatgggaagggaggcatcccacccccaagaagaactgaataaagattgctgagcaaaaaa

SEQ ID NO: 276700 - DNA, 788 bp, Homo sapiens
ataggctagtacgagcctggtggttaatcggcgaggcgctccggcgcgaaggtggctggtgcgtactggccgaacctaagagccgagactcctcccctgtcgcccagatcccacccgcaggaccccaaaacccaatgatcctgcagcagcccttgcagcgaggcccccagggaggggcccagcgcctcccgcgggccgccttgggggtgacttggggcctggacgccagctcccctctccgaggagctgtgcccatgagcaccaagcggcgcctggaggaggagcaggagcctctgcgcaagcagtttctgtctgaggagaacatggccacccacttctctcaactcagcctgcacaatgaccacccctactgcagcccccccatgaccttctccccagccctgcccccactcaggagcccttgctctgagctgcttctctggcgctatcctggcagcctcatccctgaggccctccgtctgctgaggctgggggacacccccagtcccccctaccctgcaaccccagctggggacataatggagctctgagtgctggtggacagtgcccctcccaccttccttcttccccacaacagaagagaccagcgactcccgcaaagggacaaggttcctccctctcctgcagagtaggcatctgggcaccaagaccttccctcaacagaggacactgagcccaacggagttctgggatgggaggggtgggagcatgggaagggaggcatcccacccccaagaagaactgaataaagattgctgagcaaaaaa

SEQ ID NO: 276701 - DNA, 1087 bp, Homo sapiens
agagcggttcctctccgtggcgccctaccgccttcggcgcgaaggtggctggtgcgtaccgtcccgaaccctaggagccgaggtgagcgccgcgaagacccccgacattaagaagtggtgtccaccgcagcccccttaagccggataccctcccccaccccgaggagcaagcctgccttccgccacgcgccgcccgtcttccgcgcccgcgcagaacctcgcggctgtgcccgcctaaagccacgcccatcctctcttggccacgccctcagagactcctcccctgtcgcccagatcccacccgcaggaccccaaaacccaatgatcctgcagcagcccttgcagcgaggcccccagggaggggcccagcgcctcccgcgggccgccttgggggtgacttggggcctggacgccagctcccctctccgaggagctgtgcccatgagcaccaagcggcgcctggaggaggagcagtgagtttgggggcagggagggactcccaacaagatctctgtcacctctggtccccaacaggctgcctcctgtgtcagtatcccagcctgcctctctgccatctctccccagggagcctctgcgcaagcagtttctgtctgaggagaacatggccacccacttctctcaactcagcctgcacaatgaccacccctactgcagcccccccatgaccttctccccagccctgcccccactcaggagcccttgctctgagctgcttctctggcgctatcctggcagcctcatccctgaggccctccgtctgctgaggctgggggacacccccagtcccccctaccctgcaaccccagctggggacataatggagctctgagtgctggtggacagtgcccctcccaccttccttcttccccacaacagaagagaccagcgactcccgcaaagggacaaggttcctccctctcctgcagagtaggcatctgggcaccaagaccttccctcaacagaggacactgagcccaacggagttctgggatgggaggggtgggagcatgggaagggaggcatcccacccccaagaagaactgaataaagattgctgagcaaaaaa

SEQ ID NO: 276702 - DNA, 918 bp, Homo sapiens
agagcggttcctctccgtggcgccctaccgccttcggcgcgaaggtggctggtgcgtaccgtcccgaaccctaggagccgaggtgagcgccgcgaagacccccgacattaagaagtggtgtccaccgcagcccccttaagccggataccctcccccaccccgaggagcaagcctgccttccgccacgcgccgcccgtcttccgcgcccgcgcagaacctcgcggctgtgcccgcctaaagccacgcccatcctctcttggccacgccctcagagactcctcccctgtcgcccagatcccacccgcaggaccccaaaacccaatgatcctgcagcagcccttgcagcgaggcccccagggaggggcccagcgcctcccgcgggccgccttgggggtgacttggggcctggacgccagggagcctctgcgcaagcagtttctgtctgaggagaacatggccacccacttctctcaactcagcctgcacaatgaccacccctactgcagcccccccatgaccttctccccagccctgcccccactcaggagcccttgctctgagctgcttctctggcgctatcctggcagcctcatccctgaggccctccgtctgctgaggctgggggacacccccagtcccccctaccctgcaaccccagctggggacataatggagctctgagtgctggtggacagtgcccctcccaccttccttcttccccacaacagaagagaccagcgactcccgcaaagggacaaggttcctccctctcctgcagagtaggcatctgggcaccaagaccttccctcaacagaggacactgagcccaacggagttctgggatgggaggggtgggagcatgggaagggaggcatcccacccccaagaagaactgaataaagattgctgagcaaaaaa

SEQ ID NO: 276703 - DNA, 706 bp, Homo sapiens
agagcggttcctctccgtggcgccctaccgccttcggcgcgaaggtggctggtgcgtaccgtcccgaaccctaggagccgagatcccacccgcaggaccccaaaacccaatgatcctgcagcagcccttgcagcgaggcccccagggaggggcccagcgcctcccgcgggccgccttgggggtgacttggggcctggacgccagggagcctctgcgcaagcagtttctgtctgaggagaacatggccacccacttctctcaactcagcctgcacaatgaccacccctactgcagcccccccatgaccttctccccagccctgcccccactcaggagcccttgctctgagctgcttctctggcgctatcctggcagcctcatccctgaggccctccgtctgctgaggctgggggacacccccagtcccccctaccctgcaaccccagctggggacataatggagctctgagtgctggtggacagtgcccctcccaccttccttcttccccacaacagaagagaccagcgactcccgcaaagggacaaggttcctccctctcctgcagagtaggcatctgggcaccaagaccttccctcaacagaggacactgagcccaacggagttctgggatgggaggggtgggagcatgggaagggaggcatcccacccccaagaagaactgaataaagattgctgagcaaaaaa

SEQ ID NO: 276704 - DNA, 1209 bp, Homo sapiens
agagcggttcctctccgtggcgccctaccgccttcggcgcgaaggtggctggtgcgtaccgtcccgaaccctaggagccgaggtgagcgccgcgaagacccccgacattaagaagtggtgtccaccgcagcccccttaagccggataccctcccccaccccgaggagcaagcctgccttccgccacgcgccgcccgtcttccgcgcccgcgcagaacctcgcggctgtgcccgcctaaagccacgcccatcctctcttggccacgccctcagagactcctcccctgtcgcccagatcccacccgcaggaccccaaaacccaatgatcctgcagcagcccttgcagcgaggcccccagggaggggcccagcgcctcccgcgggccgccttgggggtgacttggggcctggacgccagctcccctctccgaggagctgtgcccatgagcaccaagcggcgcctggaggaggagcaggagcctctgcgcaagcagtttctgtctgaggagaacatggccacccacttctctcaactcagcctgcacaatgaccacccctactgcagcccccccatgaccttctccccagccctgcccccactcaggtaggttcctccactggccaggccttctgcagaatcacaggcggtcctcacagctgacctcaggccctgcctcatcgtgccatttttagctctagctgacctctgggttgtttcccatcttggctctttggaaagtgctgggaacccaggagcccctggggacctggacctggtgggaggtgctcagctaggccagcctcagctccatgccctgacagtcatttcctcttctaggagcccttgctctgagctgcttctctggcgctatcctggcagcctcatccctgaggccctccgtctgctgaggctgggggacacccccagtcccccctaccctgcaaccccagctggggacataatggagctctgagtgctggtggacagtgcccctcccaccttccttcttccccacaacagaagagaccagcgactcccgcaaagggacaaggttcctccctctcctgcagagtaggcatctgggcaccaagaccttccctcaacagaggacactgagcccaacggagttctgggatgggaggggtgggagcatgggaagggaggcatcccacccccaagaagaactgaataaagattgctgagcaaaaaa

SEQ ID NO: 276705 - DNA, 860 bp, Homo sapiens
agagcggttcctctccgtggcgccctaccgccttcggcgcgaaggtggctggtgcgtaccgtcccgaaccctaggagccgaggtgagcgccgcgaagacccccgacattaagaagtggtgtccaccgcagcccccttaagccggataccctcccccaccccgaggagcaagcctgccttccgccacgcgccgcccgtcttccgcgcccgcgcagaacctcgcggctgtgcccgcctaaagccacgcccatcctctcttggccacgccctcagagactcctcccctgtcgcccagatcccacccgcaggaccccaaaacccaatgatcctgcagcagcccttgcagcgaggcccccagggaggggcccagcgcctcccgcgggccgccttgggggtgacttggggcctggacgccagctcccctctccgaggagctgtgcccatgagcaccaagcggcgcctggaggaggagcaggagcctctgcgcaagcagtttctgtctgaggagaacatggccacccacttctctcaactcagcctgcacaatgaccacccctactgcagcccccccatgaccttctccccagccctgcccccactcaggagcccttgctctgagctgcttctctggcgctatcctggcagcctcatccctgaggccctccgtctgctgaggctgggggacacccccagtcccccctaccctgcaaccccagctggggacataatggagctctgagtgctggtggacagtgcccctcccaccttccttcttccccacaacagaagagaccagcgactcccgcaaagggaggcatcccacccccaagaagaactgaataaagattgctgagcaaaaaa

SEQ ID NO: 276706 - DNA, 801 bp, Homo sapiens
agagcggttcctctccgtggcgccctaccgccttcggcgcgaaggtggctggtgcgtaccgtcccgaaccctaggagccgaggtgagcgccgcgaagacccccgacattaagaagtggtgtccaccgcagcccccttaagccggataccctcccccaccccgaggagcaagcctgccttccgccacgcgccgcccgtcttccgcgcccgcgcagaacctcgcggctgtgcccgcctaaagccacgcccatcctctcttggccacgccctcagagactcctcccctgtcgcccagatcccacccgcaggaccccaaaacccaatgatcctgcagcagcccttgcagcgaggcccccagggaggggcccagcgcctcccgcgggccgccttgggggtgacttggggcctggacgccagctcccctctccgaggagctgtgcccatgagcaccaagcggcgcctggaggaggagcaggagcctctgcgcaagcagtttctgtctgaggagaacatggccacccacttctctcaactcagcctgcacaatgaccacccctactgcagcccccccatgaccttctccccagccctgcccccactcagccacaacagaagagaccagcgactcccgcaaagggacaaggttcctccctctcctgcagagtaggcatctgggcaccaagaccttccctcaacagaggacactgagcccaacggagttctgggatgggaggggtgggagcatgggaagggaggcatcccacccccaagaagaactgaataaagattgctgagcaaaaaa

SEQ ID NO: 276707 - DNA, 753 bp, Homo sapiens
agagcggttcctctccgtggcgccctaccgccttcggcgcgaaggtggctggtgcgtaccgtcccgaaccctaggagccgaggtgagcgccgcgaagacccccgacattaagaagtggtgtccaccgcagcccccttaagccggataccctcccccaccccgaggagcaagcctgccttccgccacgcgccgcccgtcttccgcgcccgcgcagaacctcgcggctgtgcccgcctaaagccacgcccatcctctcttggccacgccctcagagactcctcccctgtcgcccagatcccacccgcaggaccccaaaacccaatgatcctgcagcagcccttgcagcgaggcccccagggaggggcccagcgcctcccgcgggccgccttgggggtgacttggggcctggacgccagctcccctctccgaggagctgtgcccatgagcaccaagcggcgcctggaggaggagcaggagcctctgcgcaagcagtttctgtctgaggagaacatggccacccacttctctcaactcagcctgcacaatgaccacccccacaacagaagagaccagcgactcccgcaaagggacaaggttcctccctctcctgcagagtaggcatctgggcaccaagaccttccctcaacagaggacactgagcccaacggagttctgggatgggaggggtgggagcatgggaagggaggcatcccacccccaagaagaactgaataaagattgctgagcaaaaaa

SEQ ID NO: 276708 - DNA, 896 bp, Homo sapiens
agagcggttcctctccgtggcgccctaccgccttcggcgcgaaggtggctgcccccttaagccggataccctcccccaccccgaggagcaagcctgccttccgccacgcgccgcccgtcttccgcgcccgcgcagaacctcgcggctgtgcccgcctaaagccacgcccatcctctcttggccacgccctcagagactcctcccctgtcgcccagatcccacccgcaggaccccaaaacccaatgatcctgcagcagcccttgcagcgaggcccccagggaggggcccagcgcctcccgcgggccgccttgggggtgacttggggcctggacgccagctcccctctccgaggagctgtgcccatgagcaccaagcggcgcctggaggaggagcaggagcctctgcgcaagcagtttctgtctgaggagaacatggccacccacttctctcaactcagcctgcacaatgaccacccctactgcagcccccccatgaccttctccccagccctgcccccactcaggagcccttgctctgagctgcttctctggcgctatcctggcagcctcatccctgaggccctccgtctgctgaggctgggggacacccccagtcccccctaccctgcaaccccagctggggacataatggagctctgagtgctggtggacagtgcccctcccaccttccttcttccccacaacagaagagaccagcgactcccgcaaagggacaaggttcctccctctcctgcagagtaggcatctgggcaccaagaccttccctcaacagaggacactgagcccaacggagttctgggatgggaggggtgggagcatgggaagggaggcatcccacccccaagaagaactgaataaagattgctgagcaaaaaa

SEQ ID NO: 276709 - DNA, 763 bp, Homo sapiens
agagcggttcctctccgtggcgccctaccgccttcggcgcgaaggtggctggtgcgtaccgtcccgaaccctaggagccgagatcccacccgcaggaccccaaaacccaatgatcctgcagcagcccttgcagcgaggcccccagggaggggcccagcgcctcccgcgggccgccttgggggtgacttggggcctggacgccagctcccctctccgaggagctgtgcccatgagcaccaagcggcgcctggaggaggagcaggagcctctgcgcaagcagtttctgtctgaggagaacatggccacccacttctctcaactcagcctgcacaatgaccacccctactgcagcccccccatgaccttctccccagccctgcccccactcaggagcccttgctctgagctgcttctctggcgctatcctggcagcctcatccctgaggccctccgtctgctgaggctgggggacacccccagtcccccctaccctgcaaccccagctggggacataatggagctctgagtgctggtggacagtgcccctcccaccttccttcttccccacaacagaagagaccagcgactcccgcaaagggacaaggttcctccctctcctgcagagtaggcatctgggcaccaagaccttccctcaacagaggacactgagcccaacggagttctgggatgggaggggtgggagcatgggaagggaggcatcccacccccaagaagaactgaataaagattgctgagcaaaaaa

SEQ ID NO: 276710 - DNA, 1200 bp, Homo sapiens
agagcggttcctctccgtggcgccctaccgccttcggcgcgaaggtggctggtgcgtaccgtcccgaaccctaggagccgaggtgagcgccgcgaagacccccgacattaagaagtggtgtccaccgcagcccccttaagccggataccctcccccaccccgaggagcaagcctgccttccgccacgcgccgcccgtcttccgcgcccgcgcagaacctcgcggctgtgcccgcctaaagccacgcccatcctctcttggccacgccctcagagactcctcccctgtcgcccagatcccacccgcaggaccccaaaacccaatgatcctgcagcagcccttgcagcgaggcccccagggaggggcccagcgcctcccgcgggccgccttgggggtgacttggggcctggacgccagctcccctctccgaggagctgtgcccatgagcaccaagcggcgcctggaggaggagcaggagcctctgcgcaagcagtttctgtctgaggagaacatggccacccacttctctcaactcagcctgcacaatgaccacccctactgcagcccccccatgaccttctccccagccctgcccccactcaggagcccttgctctgagctgcttctctggcgctatcctggcagcctcatccctgaggccctccgtctgctgaggctgggggacacccccagtcccccctaccctgcaaccccagctggggacataatggagctctgagtgctggtggacagtgcccctcccaccttccttcttccccacaacagaagagaccagcgactcccgcaaagggacaaggttcctccctctcctgcagagtaggcatctgggcaccaagaccttccctcaacagaggacactgagcccaacggagttctgggatgggaggggtgggagcatgggaagggaggcatcccacccccaagaagaactgaataaagattgctgagcaaaaaaacacaccagtactagtcagtgtgcctgcctccttctgttcgagtttcccctgttaaggaacttccaactcactgcctagcgccaaatcaccgctcttgcggcctcctgccctctccggccggctcacttcaacaatagcccttcgaaaccccggtgtctaacacactttatcttctctctcaaaggcccgcctggcaacctccctgctctcgctcagctctcccc

SEQ ID NO: 276711 - DNA, 898 bp, Homo sapiens
agagcggttcctctccgtggcgccctaccgccttcggcgcgaaggtggctggtgcgtaccgtcccgaaccctaggagccgaggtgagcgccgcgaagacccccgacattaagaagtggtgtccaccgcagcccccttaagccggataccctcccccaccccgaggagcaagcctgccttccgccacgcgccgcccgtcttccgcgcccgcgcagaacctcgcggctgtgcccgcctaaagccacgcccatcctctcttggccacgccctcagagactcctcccctgtcgcccagatcccacccgcaggaccccaaaacccaatgatcctgcagcagcccttgcagcgaggcccccagggaggggcccagcgcctcccgcgggccgccttgggggtgacttggggcctggacgccagctcccctctccgaggagctgtgcccatgagcaccaagcggcgcctggaggaggagcaggagcctctgcgcaagcagtttctgtctgaggagaacatggccacccacttctctcaactcagcctgcacaatgaccacccctactgcagcccccccatgaccttctccccagccctgcccccactcaggagcccttgctctgagctgcttctctggcgctatcctggcagcctcatccctgaggccctccgtctgctgaggctgggggacacccccagtccccccccacaacagaagagaccagcgactcccgcaaagggacaaggttcctccctctcctgcagagtaggcatctgggcaccaagaccttccctcaacagaggacactgagcccaacggagttctgggatgggaggggtgggagcatgggaagggaggcatcccacccccaagaagaactgaataaagattgctgagcaaaaaa

SEQ ID NO: 276712 - DNA, 522 bp, Homo sapiens
tttttttttttgcgtggtttagattggacgactgattattggacagaatggcatcttgtcaacacctgcggtctcctgcattatcaggaagatcaaggcagctggtggaatcattctaacagccagccactgccctggaggaccagggggagagtttggagtgaagtttaatgttgccaatggaggtatgtggttcagtatatgccttaataatcacgatttctttcctcttatattattatagtctcacagtgaccctttgatgatagacaagcaaggtgcagaggacctagctcagaaaaatttagtgaggtgcccaaagtgatccaacaaagaagtggcatgatgggctcatgaacccatttgggtgggtctcttggtcccctgtactcttcagcataaactattgaatagttgatgcttatctgatatggaaggactctgaattttaacattaaaacataccctgaaggtcattgtctaaatgacaatgaccctcattttacacatgaacaaatcaaa

SEQ ID NO: 276713 - DNA, 1364 bp, Homo sapiens
ctgttcgctgatggcaaaaggtttcagccccctcccaaatccctccccgtccttcttctaaagagaaactggtgcgtgtaggctgcgcactcccaaggagatagggagacgggccgggcgccggagaggaacccggactctgcccaaagtctcgccgcccgccggctgttttctggcagagggtgtgtcccggagggcggcgagcgcgggtgaaggctggggccaggcgcgggtggaggcgtcaccggggtcgggctagcaggccctggaatcaggcttttgggacatcccgaaagtgagtccaacttggggagaaactgagggcacctcgggcggtctggcagccgagaaggtgggcgggagaaaactttacaggaaggcagaagcaatctctgccgagggagtcagcgagcggccgcgcggagaggaggggcgggcggtccccaggcgggcgggtgcagggcgcagggcgccgacctgctggagagggggccccgggcgcgaggcggagtcccggcgcgcagccaggctggtgggggcccccggcaggctgcagattccctccggctccgggagccgcagcaggaccggccaggaggcgccatagaggggagccccatcccggtgctgacagtgcccaccgcaccctacgaggaccagcggccgtccggcggcgggggtctgcggcgacccaccggcctcttcgagggccagcgcaactacctgcccaactttatccagagcgtgctgtcgtccatcgacctgcgcgaccgtcagggctgcaccatggtggtgggcagcgacggcaggtactttagcaggacggccatcgagatcgtggtgcagatggccgcggccaacgggattggacgactgattattggacagaatggcatcttgtcaacacctgcggtctcctgcattatcaggaagatcaaggcagctggtggaatcattctaacagccagccactgccctggaggaccagggggagagtttggagtgaagtttaatgttgccaatggaggtatgtggttcagtatatgccttaataatcacgatttctttcctcttatattattatagtctcacagtgaccctttgatgatagacaagcaaggtgcagaggacctagctcagaaaaatttagtgaggtgcccaaagtgatccaacaaagaagtggcatgatgggctcatgaacccatttgggtgggtctcttggtcccctgtactcttcagcataaactattgaatagttgatgcttatctgatatggaaggactctgaattttaacattaaaacataccctgaaggtcattgtctaaatgacaatgaccctcattttacacatgaacaaatcaaa

SEQ ID NO: 276714 - DNA, 1104 bp, Homo sapiens
atctctgtctctgggagacttccaactgggaatctcccgctgaggccacacctctagattaggttagtggcccctgatccacgccgctccagcattctgccatgagaaacctcactctgctgcagctttatcttctaaatgacgtgctgagaacacccacgaaactgcaataccggctaatcagccccagcttcttcagaaaggcttctgcttgtgactccatgatctgtagcttatacacttcactctccttccagttttcaagtacggatacctgccagtagatcagaagacatatgagtattttacaaatgacagcctgaaactattttaaaggttaaaacttaaacattcaaaccactttcccatttctccttaaatgaagcatgacagaatcatcagaacttgattgtatcataggtgaacatgaattagactttgagatttgaaaacagaacaaaatgacatcacaaatgcataccttccatgatcctttttgcagatatgaataactgtacatggctttctgcttaagctatatataagcacagagccaggttaactgcatgtgtacacgagtgtgcattacctatggtcctgcagcagaataacccttaataaaggctgcatcctctgcaagtttagaaaagcctcagagaagctgttctcggcaagggcatcaaaagcttcggggtatgcttttaagattttagactctctgtggcttccccacaaaccaactggccatttttgtgagaatcactgcaggaaatgtaaaatggcctcatggtccaaatgatccattaaatagccttttaatccaggtgtcagtaaacttgacagggcccaccaggcaaacctgcttaccaaacggtggtgtgaattaaacaagctcaggaatacggatgctggtgtaggacccaaaaagtattcatactttggctctttttcctttcctgtccttagaagcaggtgcatagtcaattcttaattgaaaagcctaatgtttgcagactgtataaactaagtcttttcttactttaccagaataatcacagacacatatgccaataaatatcatttgtttctcagctacagaaacat

SEQ ID NO: 276715 - DNA, 980 bp, Homo sapiens
cccgccgtaccagttgcgcaaggcattcgctcctgagcggaatcctgcaaagatggagaaggaggagacaacccgggagctgctgctgcccaactggcagggtagtggctcccacgggctgaccatcgcccagagggacgacggcgtctttgtgcaggaggtgacgcagaactcccctgcggcccgcactggggtggtcaaggagggggaccagattgtgggtgccaccatctactttgacaacctgcagtcgggtgaggtgacccagctgctgaacaccatggggcaccacacggtgggcctgaagctgcaccgcaagggggaccgctctcccgagcctggccagacctggacccgtgaagtcttcagctcctgcagctctgaagtggttctgaacacaccacagccatcagcactggaatgcaaagaccagaacaaacagaaggaagccagcagccaagccggggcagtttcagtctccaccccaaatgcaggactgtagaagcggccaggaagaaaaccaccccctcttaaggttgtttttgtgaccgttctttggagcattgttctaaaaatgggaaattacatattgctgtgccaagggcaacaaacacctgcagttaaaggaataccttccgcgaggcggcttttcggagcatgcatgtttatagctccagccaggccagaccgagggctgctgcataagccctgcttggtgcatttctttacttgcaaggggacagagtgtgggcttaggtttgggactagagggggctttggcaactatggtgctcaggtgattatccttcgctcgtttatccaataaacatttcagcaaaaaaaaaaaaagggggggttaaaaatctcggggccaagttacggccgtttgcaaggcgtagagggtataaaagggggggtaaggtggaagtggctggggcctcggggatgaccagacgaaaattggcgccgtgtaaaaaagt

SEQ ID NO: 276716 - DNA, 1012 bp, Homo sapiens
gatgacacacactgagtgtgcagacgaggaatgaggggcgtgctcctggccatgtattcgctcctgcagcggcctcctgccacgatggagaaggaggagacaacccgggagctgctgctgcccaactggcagggtagtggctcccacgggctgaccatcgcccagagggacgacggcgtctttgtgcaggaggtgacgcagaactcccctgcggcccgcactggggtggtcaaggagggggaccagattgtgggtgccaccatctactttgacaacctgcagtcgggtgaggtgacccagctgctgaacaccatggggcaccacacggtgggcctgaagctgcaccgcaagggggaccgctctcccgagcctggccagacctggacccgtgaagtcttcagctcctgcagctctgaagtggttctgaacacaccacagccatcagcactggaatgcaaagaccagaacaaacagaaggaagccagcagccaagccggggcagtttcagtctccaccccaaatgcaggactgtagaagcggccaggaagaaaaccaccccctcttaaggttgtttttgtgaccgttctttggagcattgttctaaaaatgggaaattacatattgctgtgccaagggcaacaaacacctgcagttaaaggaataccttccgcgaggcggcttttcggagcatgcatgtttatagctccagccaggccagaccgagggctgctgcataagccctgcttggtgcatttctttacttgcaaggggacagagtgtgggcttaggtttgggactagagggggctttggcaactatggtgctcaggtgattatccttcgctcgtttatccaataaacatttcagcaaaaaaaaaaaaagggggggttaaaaatctcggggccaagttacggccgtttgcaaggcgtagagggtataaaagggggggtaaggtggaagtggctggggcctcggggatgaccagacgaaaattggcgccgtgtaaaaaagt

SEQ ID NO: 276717 - DNA, 1179 bp, Homo sapiens
ggcccggccactcggagctgctctgccgcggggactgcaccgcccgccctgccagacccgcccggaacggggctcgtcgccgccagtagccgcagcaccgcagccttgggcctcgcgccggctatggccgtgccctggggctgagccctcaggttgtgaccgagattcccgacgagagagactgaggggaagagaggaaggaggggcgggctcctggcaaggcattcgctcctgagcggaatcctgcaaagatggagaaggaggagacaacccgggagctgctgctgcccaactggcagggtagtggctcccacgggctgaccatcgcccagagggacgacggcgtctttgtgcaggaggtgacgcagaactcccctgcggcccgcactggggtggtcaaggagggggaccagattgtgggtgccaccatctactttgacaacctgcagtcgggtgaggtgacccagctgctgaacaccatggggcaccacacggtgggcctgaagctgcaccgcaagggggaccgctctcccgagcctggccagacctggacccgtgaagtcttcagctcctgcagctctgaagtggttctgaacacaccacagccatcagcactggaatgcaaagaccagaacaaacagaaggaagccagcagccaagccggggcagtttcagtctccaccccaaatgcaggactgtagaagcggccaggaagaaaaccaccccctcttaaggttgtttttgtgaccgttctttggagcattgttctaaaaatgggaaattacatattgctgtgccaagggcaacaaacacctgcagttaaaggaataccttccgcgaggcggcttttcggagcatgcatgtttatagctccagccaggccagaccgagggctgctgcataagccctgcttggtgcatttctttacttgcaaggggacagagtgtgggcttaggtttgggactagagggggctttggcaactatggtgctcaggtgattatccttcgctcgtttatccaataaacatttcagcaaaaaaaaaaaaagggggggttaaaaatctcggggccaagttacggccgtttgcaaggcgtagagggtataaaagggggggtaaggtggaagtggctggggcctcggggatgaccagacgaaaattggcgccgtgtaaaaaagt

SEQ ID NO: 276718 - DNA, 1098 bp, Homo sapiens
ggcccggccactcggagctgctctgccgcggggactgcaccgcccgccctgccagacccgcccggaacggggctcgtcgccgccagtagccgcagcaccgcagccttgggcctcgcgccggctatggccgtgccctggggctgagccctcaggttgtgaccgagattcccgacgagagagactgaggggaagagaggaaggaggggcgggctcctggcaaggcattcgctcctgagcggaatcctgcaaagatggagaaggaggagacaacccgggagctgctgctgcccaactggcagggtagtggctcccacgggctgaccatcgcccagagggacgacggcgtctttgtgcaggaggtgacgcagaactcccctgcggcccgcactggggtggtcaaggagggggaccagattgtgggtgccaccatctactttgacaacctgcagtcgggtgaggtgacccagctgctgaacaccatggggcaccacacggtgggcctgaagctgcaccgcaagggggaccgctctcccgagcctggccagacctggacccgtgaagtcttcagctcctgcagctctgaagtggttctgaacacaccacagccatcagcactggaatgcaaagaccagaacaaacagaaggaagccagcagccaagccggggcagtttcagtctccaccccaaatgcaggactgtagaagcggccaggaagaaaaccaccccctcttaaggttgtttttgtgaccgttctttggagcattgttctaaaaatgggaaattacatattgctgtgccaagggcaacaaacactgctgcataagccctgcttggtgcatttctttacttgcaaggggacagagtgtgggcttaggtttgggactagagggggctttggcaactatggtgctcaggtgattatccttcgctcgtttatccaataaacatttcagcaaaaaaaaaaaaagggggggttaaaaatctcggggccaagttacggccgtttgcaaggcgtagagggtataaaagggggggtaaggtggaagtggctggggcctcggggatgaccagacgaaaattggcgccgtgtaaaaaagt

SEQ ID NO: 276719 - DNA, 1770 bp, Homo sapiens
ggctgtcgggtccggggcgcgcgctgatgcgaacggggtgacagatgggaacgcctccgagaccgccagcgacgaccccgctcgggcagccccggatttcctcggctgcaccggcgccggcagcggggaccgaggcccgcgtccgttcgggtcgggccggggcttagccccgcgccccacgggcggccgggaccccacccggaccccgccgcggttctgggccgccggagcctcgcgccgcctctcggggaccttgtcccctggcctccggcctctcgggcccctcgcctgccgtctaggagggaaggggccttggatctgtgccccgcccatggaacagcgcccgggctcggagaggccccgcgaggccgcaggcgcagaccctcccggagggctgggcgggcaccggggtcttcggctggcttgagggacccgacccctgggggaggaatttggggtctgtgtgtccgaatgaacgcgggggttcagatgagtctgtggtgcccccgctttccatctcctccggccccggccccagaggactgtctgagaggccggtggccgcggatcctggacgcgcctccctcctgcctgtggtttccctttattccggcagcggcgcgagcccacccttcacatacaggagctacatccagaagcttctcctggggccacagcgtgggcttccgagactctgcgtgaccccagctctgcccctttggggctgcgggtgaagccctcaggaccctccgcgtgcgttgggcaggtaactggatgagggataatgtggtgaggtccccgtgcccaaccctcctctgcagcccacagcaaccgttccctcttcagcagccccctccccccggccgctctgggcgcccgttcccagcatcctccttggcaggtgttacccctccccattccccaggccctgggccctcctgatctgtctcctcgaccccctggggccccagtctggctcagtctggtccacactctggaatctggtgggactgggtatggagggtcttgagtgtcagcaggccacctgcgtcccacctggtgggtgagaagggtcccacaggtcagcatggagggacccgactctgtctcttctgctggaaaccaggcaggttccttcccccagggccccggcagggccacgagtacccgctgcactggagcacgggggaagaggcagggatccttcattacctgaaccccatgttcacacgtcacaaaacaggagtttccaaaattagaatttatttcagtttctaaggaatgaatccccgagtgtggcaggaaggacacagccggctcctgacgcacacctgatttgattcaacaccgagtcggcacagacacaaccagagatggcctgggtccaggctggggctgcacgggctgtgtcctggacagccaggagggaggccccgcacacagacggccgccgggcagggggcctgagcgggacaggcctggccacagcccatgtccttggccttccacataggtgcacacattgtctgcccagagagggccaagatgccccaggcaccccttcgctccgggggctcaggacacaggctcccagctgaggccacgcctggacccagagctgatgtttggctgcacgcgagcccactcgggacagacccaagaacacgaattctctccctttggatttaaggctggtgttttttgacatttacttcagtttttctctctgaaattaaaattacctgagtaaaagattttaagacattaaaa

SEQ ID NO: 276720 - DNA, 1212 bp, Homo sapiens
ggctgtcgggtccggggcgcgcgctgatgcgaacggggtgacagatgggaacgcctccgagaccgccagcgacgaccccgctcgggcgggcaccggggtcttcggctggcttgagggacccgacccctgggggaggaatttggggtctgtgtgtccgaatgaacgcgggggttcagatgagtctgtggtgcccccgctttccatctcctccggccccggccccagaggactgtctgagaggccggtggccgcggatcctggacgcgcctccctcctgcctgtggtttccctttattccggcagcggcgcgagcccacccttcacatacaggagctacatccagaagcttctcctggggccacagcgtgggcttccgagactctgcgtgaccccagctctgcccctttggggctgcgggtgaagccctcaggaccctccgcgtgcgttgggcaggtaactggatgagggataatgtggtgaggtccccgtgcccaaccctcctctgcagcccacagcaaccgttccctcttcagcagccccctccccccggccgctctgggcgcccgttcccagcatcctccttggcaggtgttacccctccccattccccaggccctgggccctcctgatctgtctcctcgaccccctggggccccagtctggctcagtctggtccacactctggaatctggtgggactgggtatggagggtcttgagtgtcagcaggccacctgcgtcccacctggtgggtgagaagggtcccacaggtcagcatggagggacccgactctgtctcttctgctggaaaccaggcaggttccttcccccagggccccggcagggccacgagtacccgctgcactggagcacgggggaagaggcagggatccttcattacctgaaccccatgttcacacgtcacaaaacaggagtttccaaaattagaatttatttcagtttctaaggaatgaatccccgagtgtggcaggaaggacacagccggctcctgacgcacacctgatttgattcaacaccgagtcggcacagacacaaccagagctgatgtttggctgcacgcgagcccactcgggacagacccaagaacacgaattctctccctttggatttaaggctggtgttttttgacatttacttcagtttttctctctgaaattaaaattacctgagtaaaagattttaagacattaaaa

SEQ ID NO: 276721 - DNA, 1457 bp, Homo sapiens
ggctgtcgggtccggggcgcgcgctgatgcgaacggggtgacagatgggaacgcctccgagaccgccagcgacgaccccgctcgggcgggcaccggggtcttcggctggcttgagggacccgacccctgggggaggaatttggggtctgtgtgtccgaatgaacgcgggggttcagatgagtctgtggtgcccccgctttccatctcctccggccccggccccagaggactgtctgagaggccggtggccgcggatcctggacgcgcctccctcctgcctgtggtttccctttattccggcagcggcgcgagcccacccttcacatacaggagctacatccagaagcttctcctggggccacagcgtgggcttccgagactctgcgtgaccccagctctgcccctttggggctgcgggtgaagccctcaggaccctccgcgtgcgttgggcaggtaactggatgagggataatgtggtgaggtccccgtgcccaaccctcctctgcagcccacagcaaccgttccctcttcagcagccccctccccccggccgctctgggcgcccgttcccagcatcctccttggcaggtgttacccctccccattccccaggccctgggccctcctgatctgtctcctcgaccccctggggccccagtctggctcagtctggtccacactctggaatctggtgggactgggtatggagggtcttgagtgtcagcaggccacctgcgtcccacctggtgggtgagaagggtcccacaggtcagcatggagggacccgactctgtctcttctgctggaaaccaggcaggttccttcccccagggccccggcagggccacgagtacccgctgcactggagcacgggggaagaggcagggatccttcattacctgaaccccatgttcacacgtcacaaaacaggagtttccaaaattagaatttatttcagtttctaaggaatgaatccccgagtgtggcaggaaggacacagccggctcctgacgcacacctgatttgattcaacaccgagtcggcacagacacaaccagagatggcctgggtccaggctggggctgcacgggctgtgtcctggacagccaggagggaggccccgcacacagacggccgccgggcagggggcctgagcgggacaggcctggccacagcccatgtccttggccttccacataggtgcacacattgtctgcccagagagggccaagatgccccaggcaccccttcgctccgggggctcaggacacaggctcccagctgaggccacgcctggacccagagctgatgtttggctgcacgcgagcccactcgggacagacccaagaacacgaattctctccctttggatttaaggctggtgttttttgacatttacttcagtttttctctctgaaattaaaattacctgagtaaaagattttaagacattaaaa

SEQ ID NO: 276722 - DNA, 1023 bp, Homo sapiens
ggctgtcgggtccggggcgcgcgctgatgcgaacggggtgacagatgggaacgcctccgagaccgccagcgacgaccccgctcgggcagccccggatttcctcggctgcaccggcgccggcagcggggaccgaggcccgcgtccgttcgggtcgggccggggcttagccccgcgccccacgggcggccgggaccccacccggaccccgccgcggttctgggccgccggagcctcgcgccgcctctcggggaccttgtcccctggcctccggcctctcgggcccctcgcctgccgtctaggagggaaggggccttggatctgtgccccgcccatggaacagcgcccgggctcggagaggccccgcgaggccgcaggcgcagaccctcccggagggctgggcgggcaccggggtcttcggctggcttgagggacccgacccctgggggaggaatttggggtctgtgtgtccgaatgaacgcgggggttcagatgagtctgtggtgcccccgctttccatctcctccggccccggccccagaggactgtctgagaggccggtggccgcggatcctggacgcgcctccctcctgcctgtggtttccctttattccggcagcggcgcgagcccacccttcacatacaggagctacatccagaagcttctcctggggccacagcgtgggcttccgagactctgcgtgaccccagctctgcccctttggggctgcgggtgaagccctcaggaccctccgcgtgcgttgggcaggtgcacacattgtctgcccagagagggccaagatgccccaggcaccccttcgctccgggggctcaggacacaggctcccagctgaggccacgcctggacccagagctgatgtttggctgcacgcgagcccactcgggacagacccaagaacacgaattctctccctttggatttaaggctggtgttttttgacatttacttcagtttttctctctgaaattaaaattacctgagtaaaagattttaagacattaaaa

SEQ ID NO: 276723 - DNA, 1020 bp, Homo sapiens
ggctgtcgggtccggggcgcgcgctgatgcgaacggggtgacagatgggaacgcctccgagaccgccagcgacgaccccgctcgggcagccccggatttcctcggctgcaccggcgccggcagcggggaccgaggcccgcgtccgttcgggtcgggccggggcttagccccgcgccccacgggcggccgggaccccacccggaccccgccgcggttctgggccgccggagcctcgcgccgcctctcggggaccttgtcccctggcctccggcctctcgggcccctcgcctgccgtctaggagggaaggggccttggatctgtgccccgcccatggaacagcgcccgggctcggagaggccccgcgaggccgcaggcgcagaccctcccggagggctgggcgggcaccggggtcttcggctggcttgagggacccgacccctgggggaggaatttggggtctgtgtgtccgaatgaacgcgggggttcagatgagtctgtggtgcccccgctttccatctcctccggccccggccccagaggactgtctgagaggccggtggccgcggatcctggacgcgcctccctcctgcctgtggtttccctttattccggcagcggcgcgagcccacccttcacatacaggagctacatccagaagcttctcctggggccacagcgtgggcttccgagactctgcgtgaccccagctctgcccctttggggctgcgggtgaagccctcaggaccctccgcgtgcgttgggcagtttctaaggaatgaatccccgagtgtggcaggaaggacacagccggctcctgacgcacacctgatttgattcaacaccgagtcggcacagacacaaccagagctgatgtttggctgcacgcgagcccactcgggacagacccaagaacacgaattctctccctttggatttaaggctggtgttttttgacatttacttcagtttttctctctgaaattaaaattacctgagtaaaagattttaagacattaaaa

SEQ ID NO: 276724 - DNA, 1570 bp, Homo sapiens
gaattccgggggggggtcccttccgatcctccctcctgacgccccccccagcagccccctcccccaccattgaaagccatgaattttgaatttgagagggagattgggtttataaacagccagccgtcgctcgccgagtgtctgacttccttccccgctgtcttggagacatttcaaacttcatcaatcaaggagtcgacattaattcctcctcctcctcctttcgagcaaaccttccccagcctccagcccggcgcctccacccttcagagacccaggagccaaaagcgagccgaagatgggcctgctctgccgccgccaccgccgccgccactccccgctgcccccccggcccccgagttcccttggatgaaagagaagaaatccgccaagaaacccagccaatccgccacgtctccttctccggccgcctccgccgttccggcctccggggtcggatcgcctgcagatggcctgggactgccggaggctggtggcggcggggcgcgcaggctgcgcacggcttacaccaacacgcagctgctggaactggagaaggaattccactttaataagtacctgtgccggccacgccgcgtcgagatcgcggccttgctggacctcaccgaaaggcaggtcaaagtctggtttcagaaccggcgcatgaagcacaagcggcagacgcagcaccgagagccgccggatggggagcctgcctgcccgggagccctggaggacatctgcgaccctgccgaggaacccgcggccagcccgggcggcccctccgcctcgcgggcggcgtgggaagcctgctgtcacccgccggaggtggtgccgggggccttaagcgcggacccccggcctttagccgttcgcttagagggcgcaggcgcgtcgagtcccggctgcgcgctgcgcggggccggcgggctggagcccgggccattgccagaagacgtcttctcggggcgccaggattcacctttccttcccgacctcaacttcttcgcggccgactcctgtctccagctatccggaggcctctcccctagcctacagggttctctcgacagcccggtccctttttccgaggaagagctggattttttcaccagtacgctctgtgccatcgacctgcagtttccctaacctgtttcctcctcccggtcctttcgacccccgcgctccttggccgtctactggaaaaatcgagcctctcccaccctcagtcgcatagacttatgtgttttgctaaaattcaggtattactgaattagcgtttaatccacttcctttcttcttcttctaaaatattgggcactcggttatcttttaaaattcacacagaaaaattccgtttggtagactccttccaatgaaatctcaggaataattaaactctagggggactttcttaaaaataactagagggacctattttcctcttttttatgttttagactgtagattatttattaaaattctttaataataggaaaaggggaaagtatttattgtacattattttcatagattaaataaatgtctttataataccaaaaaaaaagtt

SEQ ID NO: 276725 - DNA, 1148 bp, Homo sapiens
cccgggccggggctgtagactagagagggagagaagaaaacccaaaaatggcctgggactgccggaggctggtggcggcggggcgcgcaggctgcgcacggcttacaccaacacgcagctgctggaactggagaaggaattccactttaataagtacctgtgccggccacgccgcgtcgagatcgcggccttgctggacctcaccgaaaggcaggtcaaagtctggtttcagaaccggcgcatgaagcacaagcggcagacgcagcaccgagagccgccggatggggagcctgcctgcccgggagccctggaggacatctgcgaccctgccgaggaacccgcggccagcccgggcggcccctccgcctcgcgggcggcgtgggaagcctgctgtcacccgccggaggtggtgccgggggccttaagcgcggacccccggcctttagccgttcgcttagagggcgcaggcgcgtcgagtcccggctgcgcgctgcgcggggccggcgggctggagcccgggccattgccagaagacgtcttctcggggcgccaggattcacctttccttcccgacctcaacttcttcgcggccgactcctgtctccagctatccggaggcctctcccctagcctacagggttctctcgacagcccggtccctttttccgaggaagagctggattttttcaccagtacgctctgtgccatcgacctgcagtttccctaacctgtttcctcctcccggtcctttcgacccccgcgctccttggccgtctactggaaaaatcgagcctctcccaccctcagtcgcatagacttatgtgttttgctaaaattcaggtattactgaattagcgtttaatccacttcctttcttcttcttctaaaatattgggcactcggttatcttttaaaattcacacagaaaaattccgtttggtagactccttccaatgaaatctcaggaataattaaactctagggggactttcttaaaaataactagagggacctattttcctcttttttatgttttagactgtagattatttattaaaattctttaataataggaaaaggggaaagtatttattgtacattattttcatagattaaataaatgtctttataataccaaaaaaaaagtt

SEQ ID NO: 276726 - DNA, 797 bp, Homo sapiens
aaagattcggtcctttctgccccaactctaggagaagaggaagaattcagagctagggaggaagaggggtgaagaacaatctttctgaccctcgctccggttgagttggaaagttccgaattgaggggtccactgggagggcttggaagggggatctgaggttccggcgccgaagggagccgctctccgccccctgcgtggcccgtgggcggctctgaatgctttgccctgacccgggccggggctgtagactagagagggagagaagaaaacccaaaagcagtaaagcgagcggctttggggtgggggcgggggtggggtggcgaggaaggggagaggtgatactggttttggaggatggggtagtccgaactgaggttgggctgagtacacggcccgctatgacgccgagcctgttttccctgcagatggcctgggactgccggaggctggtggcggcggggcgcgcaggctgcgcacggcttacaccaacacgcagctgctggaactggagaaggaattccactttaataagtacctgtgccggccacgccgcgtcgagatcgcggccttgctggacctcaccgaaaggcaggtcaaagtctggtttcagaaccggcgcatgaagcacaagcggcagacgcagcaccgagagccgccggatggggagcctgcctgcccgggagccctggaggacatctgcgaccctgccgaggaacccgcggccagcccgggcggcccctccgcctcgcgggcggcgtgggaagcctgctgtcacccgccggaggtggtgccgg

SEQ ID NO: 276727 - DNA, 1512 bp, Homo sapiens
gaattccgggggggggtcccttccgatcctccctcctgacgccccccccagcagccccctcccccaccattgaaagccatgaattttgaatttgagagggagattgggtttataaacagccagccgtcgctcgccgagtgtctgacttccttccccgctgtcttggagacatttcaaacttcatcaatcaaggagtcgacattaattcctcctcctcctcctttcgagcaaaccttccccagcctccagcccggcgcctccacccttcagagacccaggagccaaaagcgagccgaagatgggcctgctctgccgccgccaccgccgccgccactccccgctgcccccccggcccccgagttcccttggatgaaagagaagaaatccgccaagaaacccagccaatccgccacgtctccttctccggccgcctccgccgttccggcctccggggtcggatcgcctgcagatggcctgggactgccggaggctggtggcggcggggcgcgcaggctgcgcacggcttacaccaacacgcagctgctggaactggagaaggaattccactttaataagtacctgtgccggccacgccgcgtcgagatcgcggccttgctggacctcaccgaaaggcaggtcaaagtctggtttcagaaccggcgcatgaagcacaagcggcagacgcagcaccgagagccgccggatggggagcctgcctgcccgggagccctggaggacatctgcgaccctgccgaggaacccgcggccagcccgggcggcccctccgcctcgcgggcggcgtgggaagcctgctgtcacccgccggaggtggtgccgggggccttaagcgcggacccccggcctttagccgttcgcttagagggcgcaggcgcgtcgagtcccggctgcgcgctgcgcggggccggcgggctggagcccgggccattgccagaagacgtcttctcggggcgccaggattcacctttccttcccgacctcaacttcttcgcggccgactcctgtctccagctatccggaggcctctcccctagcctacagggttctctcgacagcccggtccctttttccgaggaagagctggattttttcaccagtacgctctgtgccatcgacctgcagtttccctaacctgtttcctcctcccggtcctttcgacccccgcgctccttggccgtctactggaaaaatcgagcctctcccaccctcagtcgcatagacttatgtgttttgctaaaattcaggtattactgaattagcgtttaatccacttcctttcttcttcttctaaaatattgggcactcggttatcttttaaaattctctagggggactttcttaaaaataactagagggacctattttcctcttttttatgttttagactgtagattatttattaaaattctttaataataggaaaaggggaaagtatttattgtacattattttcatagattaaataaatgtctttataataccaaaaaaaaagtt

SEQ ID NO: 276728 - DNA, 981 bp, Homo sapiens
agaggtgcctctccagcgaccacctctgccgacactatatccctcaggacctgttcgattcaactcctccgccggcctcctctctggcgctcgggacactgtcgagcttcgccgactagcaacgacccacgtagaggccttgggagctcctccgtggtgggacattgttccaagaaggggcgcgtccgacgtcgttgccgtccagctctgcaccacctgaccgtgacgtcgtaagagtagcgtgccagggaagccacgcagccgctacttaaggagcccgcacgaggctagcccccccgcccacgctctctatcccgcccacttcgcactgatttcacgcagccattggccaagacggggtgtcgccgtgttgcccaggcaggtcttgaactcttggcttctggcttcaagtgatcttccagcctcggcctcccaaagtgctgggattacagtcagccactgcaccggaaatgttttcaaccgtgacccataaaggcccagaccgagccataattccagaaatggagtggacgagccaggccctgctgacagtggacatagtggactcagggaacctagtcgaaatcaccgttttcgggcggccccgtgtacagaatcgggtgaagagcatgctcctgtgcctggcatggtttcaccgagaacatcgtgcccgagctgagaagatgaaacaccttgagaagaacttgaaggcccatgcatcagacccccactctccccaggatcctgttgcttaagacaacatagttactgttgggaacatcttaactttctaacttttgctgctaaagttgaagaaaagcaagtatagcattcttaaatccccgtattcctttttcctgtgtcttgatggattgtggtttattttgttgcaagagtgagtttgaactattctaataaagaaatggctattttgccaaaagcattaagatcttcacacacttataataaagcaaatttata

SEQ ID NO: 276729 - DNA, 624 bp, Homo sapiens
ccagttttatagaggagaaaacagaagcccggggaggctagaactcgcctaaggtcacacagcttggatgtagtgcagccacagcgggtgcctgagaaaaaacagtttgtgggacacatcacgtttctgccaagtgctacagctgaagcccatattcatagaagcaccctgacagcccttctccagcaacttccagaaaacagaacctgagcactcaaagctgcatcagcccatgtggccttgctcccagagaagcatctgccagtttgggcatggaggaacagaaagtgggcagggaattctccttggctccttagaaggcagtgggagcccagggaagcgttcggccccagtgcagcctaattgggagggagggatgggtagaggctggctgggcttctccttcctcaccctcatgcaaggtggctgcccctctggctccttcagagctcttcccttccaagttcctactgagaaataagaaggcacaaaggaaaatcagccacctcctggaggtcactgtgggccacctgctttgctaagagccaagcacagacccctgcattctccctgcaggagagcccacccggctcagaagaaagcaattccgcctgtggggaggag

SEQ ID NO: 276730 - DNA, 1810 bp, Homo sapiens
  misc_feature (1)..(1): n is a, c, g, or t
  misc_feature (3)..(4): n is a, c, g, or t
  misc_feature (1810)..(1810): n is a, c, g, or t
ngnngatcctgggttctgtgcatccgtctgtctgaccatccctctcaatcttccctgcccaggactggccatactgccaccgcacacgtgcacacacgccaacaggcatctgccatgctggcatctctataagggctccagtccagagaccctgggccattgaacttgctcctcaggcagaggctgagtccgcacatcacctccaggccctcagaacacctgccccagccccaccatgctcatggcgtccaccacttccgctgtgcctgggcatccctctctgcccagcctgcccagcaacagcagccaggagaggccactggacacccgggacccgctgctagcccgggcggagctggcgctgctctccatagtctttgtggctgtggccctgagcaatggcctggtgctggcggccctagctcggcggggccggcggggccactgggcacccatacacgtcttcattggccacttgtgcctggccgacctggccgtggctctgttccaagtgctgccccagctggcctggaaggccaccgaccgcttccgtgggccagatgccctgtgtcgggccgtgaagtatctgcagatggtgggcatgtatgcctcctcctacatgatcctggccatgacgctggaccgccaccgtgccatctgccgtcccatgctggcgtaccgccatggaagtggggctcactggaaccggccggtgctagtggcttgggccttctcgctccttctcagcctgccccagctcttcatcttcgcccagcgcaacgtggaaggtggcagcggggtcactgactgctgggcctgctttgcggagccctggggccgtcgcacctatgtcacctggattgccctgatggtgttcgtggcacctaccctgggtatcgccgcctgccaggtgctcatcttccgggagattcatgccagtctggtgccagggccatcagagaggcctggggggcgccgcaggggacgccggacaggcagccccggtgagggagcccacgtgtcagcagctgtggccaagactgtgaggatgacgctagtgattgtggtcgtctatgtgctgtgctgggcacccttcttcctggtgcagctgtgggccgcgtgggacccggaggcacctctggaaggggcgccctttgtgctactcatgttgctggccagcctcaacagctgcaccaacccctggatctatgcatctttcagcagcagcgtgtcctcagagctgcgaagcttgctctgctgtgcccggggacgcaccccacccagcctgggtccccaagatgagtcctgcaccaccgccagctcctccctggccaaggacacttcatcgtgaggagctgttgggtgtcttgcctctagaggctttgagaagctcagctgccttcctggggctggtcctgggagccactgggagggggacccgtggagaattggccagagcctgtggccccgaggctgggacactgtgtggccctggacaagccacagcccctgcctgggtctccacatccccagctgtatgaggagagcttcaggccccaggactgtgggggcccctcaggtcagctcactgagctgggtgtaggaggggctgcagcagaggcctgaggagtggcaggaaagagggagcaggtgcccccaggtgagacagcggtcccaggggcctgaaaaggaaggaccaggctggggccaggggaccttcctgtctccgcctttctaatccctccctcctcattctctccctaataaaaattggagctcattttccacatggcaaggggtctccttggan

SEQ ID NO: 276731 - DNA, 1887 bp, Homo sapiens
  misc_feature (1887)..(1887): n is a, c, g, or t
cgccaccgcccagctgcccaggagcccagccaggactggccatactgccaccgcacacgtgcacacacgccaacaggcatctgccatgctggcatctctataagggctccagtccagagaccctgggccattgaacttgctcctcaggcagaggctgagtccgcacatcacctccaggccctcagaacacctgccccagccccaccatgctcatggcgtccaccacttccgctgtgcctgggcatccctctctgcccagcctgcccagcaacagcagccaggagaggccactggacacccgggacccgctgctagcccgggcggagctggcgctgctctccatagtctttgtggctgtggccctgagcaatggcctggtgctggcggccctagctcggcggggccggcggggccactgggcacccatacacgtcttcattggccacttgtgcctggccgacctggccgtggctctgttccaagtgctgccccagctggcctggaaggccaccgaccgcttccgtgggccagatgccctgtgtcgggccgtgaagtatctgcagatggtgggcatgtatgcctcctcctacatgatcctggccatgacgctggaccgccaccgtgccatctgccgtcccatgctggcgtaccgccatggaagtggggctcactggaaccggccggtgctagtggcttgggccttctcgctccttctcagcctgccccagctcttcatcttcgcccagcgcaacgtggaaggtggcagcggggtcactgactgctgggcctgctttgcggagccctggggccgtcgcacctatgtcacctggattgccctgatggtgttcgtggcacctaccctgggtatcgccgcctgccaggtgctcatcttccgggagattcatgccagtctggtgccagggccatcagagaggcctggggggcgccgcaggggacgccggacaggcagccccggtgagggagcccacgtgtcagcagctgtggccaagactgtgaggatgacgctagtgattgtggtcgtctatgtgctgtgctgggcacccttcttcctggtgcagctgtgggccgcgtgggacccggaggcacctctggaaggtgggtgtagccgtggctagggctgacggggccacttgggcttggccgcatgcccctgtgccccaccagccatcctgaacccaacctagatcctccacctccacaggggcgccctttgtgctactcatgttgctggccagcctcaacagctgcaccaacccctggatctatgcatctttcagcagcagcgtgtcctcagagctgcgaagcttgctctgctgtgcccggggacgcaccccacccagcctgggtccccaagatgagtcctgcaccaccgccagctcctccctggccaaggacacttcatcgtgaggagctgttgggtgtcttgcctctagaggctttgagaagctcagctgccttcctggggctggtcctgggagccactgggagggggacccgtggagaattggccagagcctgtggccccgaggctgggacactgtgtggccctggacaagccacagcccctgcctgggtctccacatccccagctgtatgaggagagcttcaggccccaggactgtgggggcccctcaggtcagctcactgagctgggtgtaggaggggctgcagcagaggcctgaggagtggcaggaaagagggagcaggtgcccccaggtgagacagcggtcccaggggcctgaaaaggaaggaccaggctggggccaggggaccttcctgtctccgcctttctaatccctccctcctcattctctccctaataaaaattggagctcattttccacatggcaaggggtctccttggan

SEQ ID NO: 276732 - DNA, 1729 bp, Homo sapiens
  misc_feature (1729)..(1729): n is a, c, g, or t
gctgcccagccccatctttcttggcccccgaggggtggctgcccaggcctctctcctggcacagttccatgtagtgcctgcccatgtggctcccagttcctccccggggtcctggctgagcagaatggcactggatcctgatctggcttcttgcatcccagaggagaccgccatgcgggcccttcctccagattcttccctagtttaacaacaggaagcgaggagtccaggggggcagagattgccacgggcctggccacattgctaggggaggtcccaacctgctgctgagatccggcactgcacagcctcgttcaggcagagaaactgataaggagatggttgtctgctcaccccaaaaggactggccatactgccaccgcacacgtgcacacacgccaacaggcatctgccatgctggcatctctataagggctccagtccagagaccctgggccattgaacttgctcctcaggcagaggctgagtccgcacatcacctccaggccctcagaacacctgccccagccccaccatgctcatggcgtccaccacttccgcctgccccagctcttcatcttcgcccagcgcaacgtggaaggtggcagcggggtcactgactgctgggcctgctttgcggagccctggggccgtcgcacctatgtcacctggattgccctgatggtgttcgtggcacctaccctgggtatcgccgcctgccaggtgctcatcttccgggagattcatgccagtctggtgccagggccatcagagaggcctggggggcgccgcaggggacgccggacaggcagccccggtgagggagcccacgtgtcagcagctgtggccaagactgtgaggatgacgctagtgattgtggtcgtctatgtgctgtgctgggcacccttcttcctggtgcagctgtgggccgcgtgggacccggaggcacctctggaaggtgggtgtagccgtggctagggctgacggggccacttgggcttggccgcatgcccctgtgccccaccagccatcctgaacccaacctagatcctccacctccacaggggcgccctttgtgctactcatgttgctggccagcctcaacagctgcaccaacccctggatctatgcatctttcagcagcagcgtgtcctcagagctgcgaagcttgctctgctgtgcccggggacgcaccccacccagcctgggtccccaagatgagtcctgcaccaccgccagctcctccctggccaaggacacttcatcgtgaggagctgttgggtgtcttgcctctagaggctttgagaagctcagctgccttcctggggctggtcctgggagccactgggagggggacccgtggagaattggccagagcctgtggccccgaggctgggacactgtgtggccctggacaagccacagcccctgcctgggtctccacatccccagctgtatgaggagagcttcaggccccaggactgtgggggcccctcaggtcagctcactgagctgggtgtaggaggggctgcagcagaggcctgaggagtggcaggaaagagggagcaggtgcccccaggtgagacagcggtcccaggggcctgaaaaggaaggaccaggctggggccaggggaccttcctgtctccgcctttctaatccctccctcctcattctctccctaataaaaattggagctcattttccacatggcaaggggtctccttggan

SEQ ID NO: 276733 - DNA, 1781 bp, Homo sapiens
  misc_feature (1781)..(1781): n is a, c, g, or t
cgccaccgcccagctgcccaggagcccagccaggactggccatactgccaccgcacacgtgcacacacgccaacaggcatctgccatgctggcatctctataagggctccagtccagagaccctgggccattgaacttgctcctcaggcagaggctgagtccgcacatcacctccaggccctcagaacacctgccccagccccaccatgctcatggcgtccaccacttccgctgtgcctgggcatccctctctgcccagcctgcccagcaacagcagccaggagaggccactggacacccgggacccgctgctagcccgggcggagctggcgctgctctccatagtctttgtggctgtggccctgagcaatggcctggtgctggcggccctagctcggcggggccggcggggccactgggcacccatacacgtcttcattggccacttgtgcctggccgacctggccgtggctctgttccaagtgctgccccagctggcctggaaggccaccgaccgcttccgtgggccagatgccctgtgtcgggccgtgaagtatctgcagatggtgggcatgtatgcctcctcctacatgatcctggccatgacgctggaccgccaccgtgccatctgccgtcccatgctggcgtaccgccatggaagtggggctcactggaaccggccggtgctagtggcttgggccttctcgctccttctcagcctgccccagctcttcatcttcgcccagcgcaacgtggaaggtggcagcggggtcactgactgctgggcctgctttgcggagccctggggccgtcgcacctatgtcacctggattgccctgatggtgttcgtggcacctaccctgggtatcgccgcctgccaggtgctcatcttccgggagattcatgccagtctggtgccagggccatcagagaggcctggggggcgccgcaggggacgccggacaggcagccccggtgagggagcccacgtgtcagcagctgtggccaagactgtgaggatgacgctagtgattgtggtcgtctatgtgctgtgctgggcacccttcttcctggtgcagctgtgggccgcgtgggacccggaggcacctctggaaggggcgccctttgtgctactcatgttgctggccagcctcaacagctgcaccaacccctggatctatgcatctttcagcagcagcgtgtcctcagagctgcgaagcttgctctgctgtgcccggggacgcaccccacccagcctgggtccccaagatgagtcctgcaccaccgccagctcctccctggccaaggacacttcatcgtgaggagctgttgggtgtcttgcctctagaggctttgagaagctcagctgccttcctggggctggtcctgggagccactgggagggggacccgtggagaattggccagagcctgtggccccgaggctgggacactgtgtggccctggacaagccacagcccctgcctgggtctccacatccccagctgtatgaggagagcttcaggccccaggactgtgggggcccctcaggtcagctcactgagctgggtgtaggaggggctgcagcagaggcctgaggagtggcaggaaagagggagcaggtgcccccaggtgagacagcggtcccaggggcctgaaaaggaaggaccaggctggggccaggggaccttcctgtctccgcctttctaatccctccctcctcattctctccctaataaaaattggagctcattttccacatggcaaggggtctccttggan

SEQ ID NO: 276734 - DNA, 3991 bp, Homo sapiens
aagctggcggccgcggcagggcgggcgccgcgcggaggcagggcgggcgtattcaatggaagtgtgttaccagctgccggtactgcccctggacaggccggtcccccagcacgtcctcagccgccgaggagccatcagcttcagctccagctccgctctcttcggctgccccaatccccggcagctctctcagaggcgtggagctatttcctatgacagttctgatcagactgcattatacattcgtatgctaggagatgtacgtgtaaggagccgagcaggatttgaatcagaaagaagaggttctcacccatatattgattttcgtattttccactctcaatctgaaattgaagtgtctgtctctgcaaggaatatcagaaggctactaagtttccagcgatatcttagatcttcacgcttttttcgtggtactgcggtttcaaattccctaaacattttagatgatgattataatggacaagccaagtgtatgctggaaaaagttggaaattggaattttgatatctttctatttgatagactaacaaatggaaatagtctagtaagcttaacctttcatttatttagtcttcatggattaattgagtacttccatttagatatgatgaaacttcgtagatttttagttatgattcaagaagattaccacagtcaaaatccttaccataacgcagtccacgctgcggatgttactcaggccatgcactgttacttaaaggaacctaagcttgccaattctgtaactccttgggatatcttgctgagcttaattgcagctgccactcatgatctggatcatccaggtgttaatcaacctttccttattaaaactaaccattacttggcaactttatacaagaatacctcagtactggaaaatcaccactggagatctgcagtgggcttattgagagaatcaggcttattctcacatctgccattagaaagcaggcaacaaatggagacacagataggtgctctgatactagccacagacatcagtcgccagaatgagtatctgtctttgtttaggtcccatttggatagaggtgatttatgcctagaagacaccagacacagacatttggttttacagatggctttgaaatgtgctgatatttgtaacccatgtcggacgtgggaattaagcaagcagtggagtgaaaaagtaacggaggaattcttccatcaaggagatatagaaaaaaaatatcatttgggtgtgagtccactttgcgatcgtcacactgaatctattgccaacatccagattggttttatgacttacctagtggagcctttatttacagaatgggccaggttttccaatacaaggctatcccagacaatgcttggacacgtggggctgaataaagccagctggaagggactgcagagagaacagtcgagcagtgaggacactgatgctgcatttgagttgaactcacagttattacctcaggaaaatcggttatcataacccccagaaccagtgggacaaactgcctcctggaggtttttagaaatgtgaaatggggtcttgaggtgagagaacttaactcttgactgccaaggtttccaagtgagtgatgccagccagcattatttatttccaagatttcctctgttggatcatttgaacccacttgttaattgcaagacccgaacatacagcaatatgaatttggctttcatgtgaaaccttgaatatgcaaagcccagcaggagagaatccgaaaggagtaacaaaggaagttttgatatgtgccacgactttttcaaagcatctaatcttcaaaacgtgaaacttgaattgttcagcaacaatctcttggaatttaaccagtctgatgcaacaatgtgtatcttgtaccttccactaagttctctctgagaaaatggaaatgtgaagtgcccagcctctgctgcctctggcaagacaatgtttacaaatcaactctgaaaatattggttctaaattgccttggagcatgattgtgaaggaaccactcaaacaaatttaaagatcaaactttagactgcagctctttccccctggtttgcctttttcttctttggatgccaccaaagcctcccatttgctatagttttatttcatgcactggaaactgagcatttatcgtagagtaccgccaagctttcactccagtgccgtttggcaatgcaattttttttagcaattagtttttaatttggggtgggaggggaagaacaccaatgtcctagctgtattatgattctgcagtgaagacattgcatgttgttttcactactgtacacttgacctgcacatgcgagaaaaaggtggaatgtttaaaacaccataatcagctcagggtatttgccaatctgaaataaaagtgggatgggagagtgtgtccttcagatcaagggtactaaagtccctttcgctgcagtgagtgagaggtatgttgtgtgtgaatgtacggatgtgtgtttgcgtgcatgtttgtgcatgtgtgactgtgcatgttatgtttctccatgtgggcaaagatttgaaatgtaagcttttatttattattttagaatgtgacataatgagcagccacactcgggggaggggaaggttggtaggtaagctgtaacagattgctccagttgccttaaactatgcacatagctaagtgaccaaacttcttgttttgatttgaaaaaagtgcattgttttcttgtccctccctttgatgaaacgttaccctttgacgggccttttgatgtgaacagatgttttctaggacaaactataaggactaattttaaacttcaaacattccacttttgtaatttgttttaaattgttttatgtatagtaagcacaactgtaatctagttttaagagaaaccggtgctttcttttagttcatttgtatttcccttgttactgtaaaagactgtttattaattgtttacagtttgttgcaacagccattttcttgggagaaagcttgagtgtaaagccatttgtaaaaggctttgccatactcattttaatatgtgcctgttgctgttaacttttgatgaataaaaacctatcttttcatgaaacttctctctatacaaattgaaatacataatgctttctggttcttcttcaaaccaaaacttgtcaaattcatagacaagataacagtaaaactgatgaaagtgttccattgttggtataccaggaacaaggttatagagatgaaacttcaaagcttcactcttcagtaagctataagccatctctgtaagattgattccaactattgcataagaataccctaattttggatgatttgaacgggaaagaatctgatgagcttcactagtgtaattttcactgaaatacacaagattgattaacccaagtatgcccatgcctctgaagtctgtcttgggatcatcaccctgaaaaccaatttcagcccactgcttggagattctagcgtttaacttcttcgtgggcattagaagattccaaagcttcatgagtagctcttcatgctgtaggttatcagaatcatatggccttttcctcacactttctacatccaaatacagctgtttataaccagttatctgcagtaagcacatcttcatgcatattttaaaactggcatccttctcagggttaatattcttttccttcataatatcatctacatatttgtccacttcactctgaacaacatgtgtcgccttctgtaaaaccttattcttggagtatgtcaaggaattttctatcctgtgtgtcctttgtgcacctacataggtatcaaatattcgctgcaattcacacttcccagtcatctgtcgtaatagccatttcatccaaaatcgaaaaaagtgcccatagaagaactcccacaaagaaataaacatttttttttcctcacaggagcggaagaactagggggagcaggagctgcaatgcggccgc

SEQ ID NO: 276735 - DNA, 3030 bp, Homo sapiens
  misc_feature (1898)..(1898): n is a, c, g, or t
aagctggcggccgcggcagggcgggcgccgcgcggaggcagggcgggcgtattcaatggaagtgtgttaccagctgccggtactgcccctggacaggccggtcccccagcacgtcctcagccgccgaggagccatcagcttcagctccagctccgctctcttcggctgccccaatccccggcagctctctcagaggcgtggagctatttcctatgacagttctgatcagactgcattatacattcgtatgctaggagatgtacgtgtaaggagccgagcaggatttgaatcagaaagaagaggttctcacccatatattgattttcgtattttccactctcaatctgaaattgaagtgtctgtctctgcaaggaatatcagaaggctactaagtttccagcgatatcttagatcttcacgcttttttcgtggtactgcggtttcaaattccctaaacattttagatgatgattataatggacaagccaagtgtatgctggaaaaagttggaaattggaattttgatatctttctatttgatagactaacaaatggaaatagtctagtaagcttaacctttcatttatttagtcttcatggattaattgagtacttccatttagatatgatgaaacttcgtagatttttagttatgattcaagaagattaccacagtcaaaatccttaccataacgcagtccacgctgcggatgttactcaggccatgcactgttacttaaaggaacctaagcttgccaattctgtaactccttgggatatcttgctgagcttaattgcagctgccactcatgatctggatcatccaggtgttaatcaacctttccttattaaaactaaccattacttggcaactttatacaagaatacctcagtactggaaaatcaccactggagatctgcagtgggcttattgagagaatcaggcttattctcacatctgccattagaaagcaggcaacaaatggagacacagataggtgctctgatactagccacagacatcagtcgccagaatgagtatctgtctttgtttaggtcccatttggatagaggtgatttatgcctagaagacaccagacacagacatttggttttacagatggctttgaaatgtgctgatatttgtaacccatgtcggacgtgggaattaagcaagcagtggagtgaaaaagtaacggaggaattcttccatcaaggagatatagaaaaaaaatatcatttgggtgtgagtccactttgcgatcgtcacactgaatctattgccaacatccagattggtaactatacatatttagatatagctggttagaaaaatgccactgtttttatcaagaagggaaatatatttgaaatataaaatattaaaattatgctcatttctatttttaaaaataatttaagaaattttacccttgttttcccttgttatggctcttctaattctcatttaattttaggatgtaaaaagtatatttttgcagaacaggcagcagcaataacttgtttctgttcttatgtaaataagaatccattattcgctcatgtggaagcttcttttgcatcatttgggactgccatttaaaaaaggataggtaaacaaagaaatgacaaaaataaaataaataaaataaaaatggataggtggtgacccactgagcctgatcataatacgaagaccagcttctgccactgcctttccagactcttaccactgcctgttgattaaatctaactcttcaacatcctagacaggcccttataatcttgcttcaaatgctgtgcagccatcttgcctcaacttccctctcatttgcctacagcatctcgggacgcttctgtgtttcccaagtatacgctgttctttcgctctttgtgcntcgccagtgctttccatgtgcctcgtagagttatttttcttgaagaggcagctcaaatgtcaccttctccagaagctgctctccacttgctttaggcagagtcagtcacttttcttctagattccaaagtgcctgatccacttggttgtggattcctggagcctagcaccacaccagaagcacgaggcccttgagaactgtgtgttgagtgaactaataactgtattatagaaagcataatgaaaatgtcctgtgactgaagtatgtgtagcttgttgcaggagttcacaggaaagttgactaggattgagtgtgttgggctttgggtataaaggagggggattctacgggggcagtagctcaacaaggaatagagggaggagtgtaattttggtagctggtgttgaatagggcctttgagaatcagactgaacacagtgaaatatgtgcccaaagttcagaaagatgaagtttccagaaactaagaaggtagcacaatatgtggcatcatactcagaaaggaagaccatgccatggggccagaaattcagaaacgtaattcttacattgtgattgcaatggatactcatggaagaaagtgggtagtggccgatttgacttcagagtgacaggtagagaagggaagagcgtgtagaactgtggccagactttaggagtgtgagggatgctgaatctcccagagagctcacactggccaggaatgctgagagtagcagatgcttttcttttgggaggatagtaaaacaatttagaaccagatatgctttgtcttgattctcaagtagaataatcttcaaatgcaaaagaatacattagaaatggacaaaagtggccaggagcggtagctcatacttgtaacccagcactttgggaagccgaggcgggctgatcgcttgaggtcaggagttcgagaccagcctggccaaaatagtgaaactcacgtttctactaaaaatacaaaaattagctgggtgtgatggccacttgggaggctgagataggagaatcgcttgaacctgggaggcagaggttgcagtgagccaatatcgtgccactgcattccagcctgggtgacagaatgaaactccatcactccatctcaaaaaaaaaa

SEQ ID NO: 276736 - DNA, 692 bp, Homo sapiens
aagctggcggccgcggcagggcgggcgccgcgcggaggcagggcgggcgtattcaatggaagtgtgttaccagctgccggtactgcccctggacaggccggtcccccagcacgtcctcagccgccgaggagccatcagcttcagctccagctccgctctcttcggctgccccaatccccggcagctctctcagaggcgtggagctatttcctatgacagttctgatcagactgcattatacattcgtatgctaggagatgtacgtgtaaggagccgagcaggatttgaatcagaaagaagaggttctcacccatatattgattttcgtattttccactctcaatctgaaattgaagtgtctgtctctgcaaggaatatcagaaggctactaagtttccagcgatatcttagatcttcacgcttttttcgtggtactgcggtttcaaattccctaaacattttagatgatgattataatggacaagccaagtgtatgctggaaaaagttggaaattggaattttgatatctttctatttgatagactaacaaatggaaatagtctagtaagcttaacctttcatttatttagtcttcatggattaattgagtacttccatttagatatgatgaaacttcgtagatttttaggtaagtgattctaacccattaacagtaacaagatttacattt

SEQ ID NO: 276737 - DNA, 440 bp, Homo sapiens
atggaagatctttgcccaaaagacaatgttattgaaattaaattacagtagaaatgtttggttttcatttcagtgtatgctggaaaaagttggaaattggaattttgatatctttctatttgatagactaacaaatggtaagtgaagaatttgacttgctcaagttaatgtagtctagattactgcattgatggtgcagccgctggtgcgttgctttcatttactgtactaaggttgttagccctctgctggaagagagtgtattagtccattttcacactgctgataaagacatacccgagactgggtaattgagaaaaagaggtttaatggactcatagttccatgtggctggggaggcctcacaatcatggtggaaggtgaaaggcacatcttacatgttggcaggcaagagagaaatgagagccaagcaaaagggg

SEQ ID NO: 276738 - DNA, 184 bp, Homo sapiens
cccctgtcatccctgagcagctgtacctgggactcgggggaggggaaggttggtaggtaagctgtaacagattgctccagttgccttaaactatgcacatagctaagtgaccaaacttcttgttttgatttgaaaaaagtgcattgttttcttgtccctccccgggtacaggggtcaccggagc

SEQ ID NO: 276739 - DNA, 3133 bp, Homo sapiens
  misc_feature (3)..(3): n is a, c, g, or t
ggngatcactgttggaaggcagctgcttgaggtccaaggcagtcagtgtcccctctcttttgcctcgggacagctggtatttatcagactcctaagaagttttccttgctccctagtagaagagagagattatgcagcgggcttttgattgatccaatgggaattacattgatctggtgtctggccttggttcttatcaagtggatcacctctaagaggcgtggagctatttcctatgacagttctgatcagactgcattatacattcgtatgctaggagatgtacgtgtaaggagccgagcaggatttgaatcagaaagaagaggttctcacccatatattgattttcgtattttccactctcaatctgaaattgaagtgtctgtctctgcaaggaatatcagaaggctactaagtttccagcgatatcttagatcttcacgcttttttcgtggtactgcggtttcaaattccctaaacattttagatgatgattataatggacaagccaagtgtatgctggaaaaagttggaaattggaattttgatatctttctatttgatagactaacaaatggaaatagtctagtaagcttaacctttcatttatttagtcttcatggattaattgagtacttccatttagatatgatgaaacttcgtagatttttagttatgattcaagaagattaccacagtcaaaatccttaccataacgcagtccacgctgcggatgttactcaggccatgcactgttacttaaaggaacctaagcttgccaattctgtaactccttgggatatcttgctgagcttaattgcagctgccactcatgatctggatcatccaggtgttaatcaacctttccttattaaaactaaccattacttggcaactttatacaagaatacctcagtactggaaaatcaccactggagatctgcagtgggcttattgagagaatcaggcttattctcacatctgccattagaaagcaggcaacaaatggagacacagataggtgctctgatactagccacagacatcagtcgccagaatgagtatctgtctttgtttaggtcccatttggatagaggtgatttatgcctagaagacaccagacacagacatttggttttacagatggctttgaaatgtgctgatatttgtaacccatgtcggacgtgggaattaagcaagcagtggagtgaaaaagtaacggaggaattcttccatcaaggagatatagaaaaaaaatatcatttgggtgtgagtccactttgcgatcgtcacactgaatctattgccaacatccagattggttttatgacttacctagtggagcctttatttacagaatgggccaggttttccaatacaaggctatcccagacaatgcttggacacgtggggctgaataaagccagctggaagggactgcagagagaacagtcgagcagtgaggacactgatgctgcatttgagttgaactcacagttattacctcaggaaaatcggttatcataacccccagaaccagtgggacaaactgcctcctggaggtttttagaaatgtgaaatggggtcttgaggtgagagaacttaactcttgactgccaaggtttccaagtgagtgatgccagccagcattatttatttccaagatttcctctgttggatcatttgaacccacttgttaattgcaagacccgaacatacagcaatatgaatttggctttcatgtgaaaccttgaatatgcaaagcccagcaggagagaatccgaaaggagtaacaaaggaagttttgatatgtgccacgactttttcaaagcatctaatcttcaaaacgtgaaacttgaattgttcagcaacaatctcttggaatttaaccagtctgatgcaacaatgtgtatcttgtaccttccactaagttctctctgagaaaatggaaatgtgaagtgcccagcctctgctgcctctggcaagacaatgtttacaaatcaactctgaaaatattggttctaaattgccttggagcatgattgtgaaggaaccactcaaacaaatttaaagatcaaactttagactgcagctctttccccctggtttgcctttttcttctttggatgccaccaaagcctcccatttgctatagttttatttcatgcactggaaactgagcatttatcgtagagtaccgccaagctttcactccagtgccgtttggcaatgcaattttttttagcaattagtttttaatttggggtgggaggggaagaacaccaatgtcctagctgtattatgattctgcagtgaagacattgcatgttgttttcactactgtacacttgacctgcacatgcgagaaaaaggtggaatgtttaaaacaccataatcagctcagggtatttgccaatctgaaataaaagtgggatgggagagtgtgtccttcagatcaagggtactaaagtccctttcgctgcagtgagtgagaggtatgttgtgtgtgaatgtacggatgtgtgtttgcgtgcatgtttgtgcatgtgtgactgtgcatgttatgtttctccatgtgggcaaagatttgaaatgtaagcttttatttattattttagaatgtgacataatgagcagccacactcgggggaggggaaggttggtaggtaagctgtaacagattgctccagttgccttaaactatgcacatagctaagtgaccaaacttcttgttttgatttgaaaaaagtgcattgttttcttgtccctccctttgatgaaacgttaccctttgacgggccttttgatgtgaacagatgttttctaggacaaactataaggactaattttaaacttcaaacattccacttttgtaatttgttttaaattgttttatgtatagtaagcacaactgtaatctagttttaagagaaaccggtgctttcttttagttcatttgtatttcccttgttactgtaaaagactgtttattaattgtttacagtttgttgcaacagccattttcttgggagaaagcttgagtgtaaagccatttgtaaaaggctttgccatactcattttaatatgtgcctgttgctgttaacttttgatgaataaaaacctatcttttcat

SEQ ID NO: 276740 - DNA, 3079 bp, Homo sapiens
  misc_feature (3)..(3): n is a, c, g, or t
ggngatcactgttggaaggcagctgcttgaggtccaaggcagtcagtgtcccctctcttttgcctcgggacagctggtatttatcagactcctaagaagttttccttgctccctagtagaagagagagattatgcagcgggcttttgattgatccaatgggaattacattgatctggtgtctggccttggttcttatcaagtggatcacctctaagaggcgtggagctatttcctatgacagttctgatcagactgcattatacattcgtatgctaggagatgtacgtgtaaggagccgagcaggatttgaatcagaaagaagaggttctcacccatatattgattttcgtattttccactctcaatctgaaattgaagtgtctgtctctgcaaggaatatcagaaggctactaagtttccagcgatatcttagatcttcacgcttttttcgtggtactgcggtttcaaattccctaaacattttagatgatgattataatggacaagccaagtgtatgctggaaaaagttggaaattggaattttgatatctttctatttgatagactaacaaatggaaatagtctagtaagcttaacctttcatttatttagtcttcatggattaattgagtacttccatttagatatgatgaaacttcgtagatttttagttatgattcaagaagattaccacagtcaaaatccttaccataacgcagtccacgctgcggatgttactcaggccatgcactgttacttaaaggaacctaagcttgccaattctgtaactccttgggatatcttgctgagcttaattgcagctgccactcatgatctggatcatccaggtgttaatcaacctttccttattaaaactaaccattacttggcaactttatacaagaatacctcagtactggaaaatcaccactggagatctgcagtgggcttattgagagaatcaggcttattctcacatctgccattagaaagcaggcaacaaatggagacacagataggtgctctgatactagccacagacatcagtcgccagaatgagtatctgtctttgtttaggtcccatttggatagaggtgatttatgcctagaagacaccagacacagacatttggttttacagatggctttgaaatgtgctgatatttgtaacccatgtcggacgtgggaattaagcaagcagtggagtgaaaaagtaacggaggaattcttccatcaaggagatatagaaaaaaaatatcatttgggtgtgagtccactttgcgatcgtcacactgaatctattgccaacatccagattggttttatgacttacctagtggagcctttatttacagaatgggccaggttttccaatacaaggctatcccagacaatgcttggacacgtggggctgaataaagccagctggaagggactgcagagagaacagtcgagcagtgaggacactgatgctgcatttgagttgaactcacagttattacctcaggaaaatcggttatcataacccccagaaccagtgggacaaactgcctcctggaggtttttagaaatgtgaaatggggtcttgaggtgagagaacttaactcttgactgccaaggtttccaagtgagtgatgccagccagcattatttatttccaagatttcctctgttggatcatttgaacccacttgttaattgcaagacccgaacatacagcaatatgaatttggctttcatgtgaaaccttgaatatgcaaagcccagcaggagagaatccgaaaggagtaacaaaggaagttttgatatgtgccacgactttttcaaagcatctaatcttcaaaacgtgaaacttgaattgttcagcaacaatctcttggaatttaaccagtctgatgcaacaatgtgtatcttgtaccttccactaagttctctctgagaaaatggaaatgtgaagtgcccagcctctgctgcctctggcaagacaatgtttacaaatcaactctgaaaatattggttctaaattgccttggagcatgattgtgaaggaaccactcaaacaaatttaaagatcaaactttagactgcagctctttccccctggtttgcctttttcttctttggatgccaccaaagcctcccatttgctatagttttatttcatgcactggaaactgagcatttatcgtagagtaccgccaagctttcactccagtgccgtttggcaatgcaattttttttagcaattagtttttaatttggggtgggaggggaagaacaccaatgtcctagctgtattatgattctgcagtgaagacattgcatgttgttttcactactgtacacttgacctgcacatgcgagaaaaaggtggaatgtttaaaacaccataatcagctcagggtatttgccaatctgaaatgctgcagtgagtgagaggtatgttgtgtgtgaatgtacggatgtgtgtttgcgtgcatgtttgtgcatgtgtgactgtgcatgttatgtttctccatgtgggcaaagatttgaaatgtaagcttttatttattattttagaatgtgacataatgagcagccacactcgggggaggggaaggttggtaggtaagctgtaacagattgctccagttgccttaaactatgcacatagctaagtgaccaaacttcttgttttgatttgaaaaaagtgcattgttttcttgtccctccctttgatgaaacgttaccctttgacgggccttttgatgtgaacagatgttttctaggacaaactataaggactaattttaaacttcaaacattccacttttgtaatttgttttaaattgttttatgtatagtaagcacaactgtaatctagttttaagagaaaccggtgctttcttttagttcatttgtatttcccttgttactgtaaaagactgtttattaattgtttacagtttgttgcaacagccattttcttgggagaaagcttgagtgtaaagccatttgtaaaaggctttgccatactcattttaatatgtgcctgttgctgttaacttttgatgaataaaaacctatcttttcat

SEQ ID NO: 276741 - DNA, 3358 bp, Homo sapiens
agcggagggtccgcggctgcaaagtgtgaattacgccgggctcgcgccggcggcggagtgaagtcaggctccgggggaggggaggagcagaactccggcggcggcggcggcggcggcggcggcggccgagctggtcgctgctcctgagtcccgcgcgccctgggtctggccgctggctccagctgtcttttcttgcactgctttgctccgttcgtgctgcgctcgaactctgcagtccgggccggtcccccagcacgtcctcagccgccgaggagccatcagcttcagctccagctccgctctcttcggctgccccaatccccggcagctctctcagaggcgtggagctatttcctatgacagttctgatcagactgcattatacattcgtatgctagcatgaaggaatggccacaggacaggtgactagtcattgtgggatggaattatagtcgatgaagtgagccttggaggaagtcatggtcctactcagagaaacagagagatgtacgtgtaaggagccgagcaggatttgaatcagaaagaagaggttctcacccatatattgattttcgtattttccactctcaatctgaaattgaagtgtctgtctctgcaaggaatatcagaaggctactaagtttccagcgatatcttagatcttcacgcttttttcgtggtactgcggtttcaaattccctaaacattttagatgatgattataatggacaagccaagtgtatgctggaaaaagttggaaattggaattttgatatctttctatttgatagactaacaaatggaaatagtctagtaagcttaacctttcatttatttagtcttcatggattaattgagtacttccatttagatatgatgaaacttcgtagatttttagttatgattcaagaagattaccacagtcaaaatccttaccataacgcagtccacgctgcggatgttactcaggccatgcactgttacttaaaggaacctaagcttgccaattctgtaactccttgggatatcttgctgagcttaattgcagctgccactcatgatctggatcatccaggtgttaatcaacctttccttattaaaactaaccattacttggcaactttatacaagaatacctcagtactggaaaatcaccactggagatctgcagtgggcttattgagagaatcaggcttattctcacatctgccattagaaagcaggcaacaaatggagacacagataggtgctctgatactagccacagacatcagtcgccagaatgagtatctgtctttgtttaggtcccatttggatagaggtgatttatgcctagaagacaccagacacagacatttggttttacagatggctttgaaatgtgctgatatttgtaacccatgtcggacgtgggaattaagcaagcagtggagtgaaaaagtaacggaggaattcttccatcaaggagatatagaaaaaaaatatcatttgggtgtgagtccactttgcgatcgtcacactgaatctattgccaacatccagattggttttatgacttacctagtggagcctttatttacagaatgggccaggttttccaatacaaggctatcccagacaatgcttggacacgtggggctgaataaagccagctggaagggactgcagagagaacagtcgagcagtgaggacactgatgctgcatttgagttgaactcacagttattacctcaggaaaatcggttatcataacccccagaaccagtgggacaaactgcctcctggaggtttttagaaatgtgaaatggggtcttgaggtgagagaacttaactcttgactgccaaggtttccaagtgagtgatgccagccagcattatttatttccaagatttcctctgttggatcatttgaacccacttgttaattgcaagacccgaacatacagcaatatgaatttggctttcatgtgaaaccttgaatatgcaaagcccagcaggagagaatccgaaaggagtaacaaaggaagttttgatatgtgccacgactttttcaaagcatctaatcttcaaaacgtgaaacttgaattgttcagcaacaatctcttggaatttaaccagtctgatgcaacaatgtgtatcttgtaccttccactaagttctctctgagaaaatggaaatgtgaagtgcccagcctctgctgcctctggcaagacaatgtttacaaatcaactctgaaaatattggttctaaattgccttggagcatgattgtgaaggaaccactcaaacaaatttaaagatcaaactttagactgcagctctttccccctggtttgcctttttcttctttggatgccaccaaagcctcccatttgctatagttttatttcatgcactggaaactgagcatttatcgtagagtaccgccaagctttcactccagtgccgtttggcaatgcaattttttttagcaattagtttttaatttggggtgggaggggaagaacaccaatgtcctagctgtattatgattctgcagtgaagacattgcatgttgttttcactactgtacacttgacctgcacatgcgagaaaaaggtggaatgtttaaaacaccataatcagctcagggtatttgccaatctgaaataaaagtgggatgggagagtgtgtccttcagatcaagggtactaaagtccctttcgctgcagtgagtgagaggtatgttgtgtgtgaatgtacggatgtgtgtttgcgtgcatgtttgtgcatgtgtgactgtgcatgttatgtttctccatgtgggcaaagatttgaaatgtaagcttttatttattattttagaatgtgacataatgagcagccacactcgggggaggggaaggttggtaggtaagctgtaacagattgctccagttgccttaaactatgcacatagctaagtgaccaaacttcttgttttgatttgaaaaaagtgcattgttttcttgtccctccctttgatgaaacgttaccctttgacgggccttttgatgtgaacagatgttttctaggacaaactataaggactaattttaaacttcaaacattccacttttgtaatttgttttaaattgttttatgtatagtaagcacaactgtaatctagttttaagagaaaccggtgctttcttttagttcatttgtatttcccttgttactgtaaaagactgtttattaattgtttacagtttgttgcaacagccattttcttgggagaaagcttgagtgtaaagccatttgtaaaaggctttgccatactcattttaatatgtgcctgttgctgttaacttttgatgaataaaaacctatcttttcat

SEQ ID NO: 276742 - DNA, 2481 bp, Homo sapiens
aatgacgtgaagggggaggagattaccaccactaccattggctgctaattcaaaactactgtgatggcgtagagcttattttagatatatctgtgattcattattcttttgtcacacttcagcttgccaattctgtaactccttgggatatcttgctgagcttaattgcagctgccactcatgatctggatcatccaggtgttaatcaacctttccttattaaaactaaccattacttggcaactttatacaagaatacctcagtactggaaaatcaccactggagatctgcagtgggcttattgagagaatcaggcttattctcacatctgccattagaaagcaggcaacaaatggagacacagataggtgctctgatactagccacagacatcagtcgccagaatgagtatctgtctttgtttaggtcccatttggatagaggtgatttatgcctagaagacaccagacacagacatttggttttacagatggctttgaaatgtgctgatatttgtaacccatgtcggacgtgggaattaagcaagcagtggagtgaaaaagtaacggaggaattcttccatcaaggagatatagaaaaaaaatatcatttgggtgtgagtccactttgcgatcgtcacactgaatctattgccaacatccagattggttttatgacttacctagtggagcctttatttacagaatgggccaggttttccaatacaaggctatcccagacaatgcttggacacgtggggctgaataaagccagctggaagggactgcagagagaacagtcgagcagtgaggacactgatgctgcatttgagttgaactcacagttattacctcaggaaaatcggttatcataacccccagaaccagtgggacaaactgcctcctggaggtttttagaaatgtgaaatggggtcttgaggtgagagaacttaactcttgactgccaaggtttccaagtgagtgatgccagccagcattatttatttccaagatttcctctgttggatcatttgaacccacttgttaattgcaagacccgaacatacagcaatatgaatttggctttcatgtgaaaccttgaatatgcaaagcccagcaggagagaatccgaaaggagtaacaaaggaagttttgatatgtgccacgactttttcaaagcatctaatcttcaaaacgtgaaacttgaattgttcagcaacaatctcttggaatttaaccagtctgatgcaacaatgtgtatcttgtaccttccactaagttctctctgagaaaatggaaatgtgaagtgcccagcctctgctgcctctggcaagacaatgtttacaaatcaactctgaaaatattggttctaaattgccttggagcatgattgtgaaggaaccactcaaacaaatttaaagatcaaactttagactgcagctctttccccctggtttgcctttttcttctttggatgccaccaaagcctcccatttgctatagttttatttcatgcactggaaactgagcatttatcgtagagtaccgccaagctttcactccagtgccgtttggcaatgcaattttttttagcaattagtttttaatttggggtgggaggggaagaacaccaatgtcctagctgtattatgattctgcagtgaagacattgcatgttgttttcactactgtacacttgacctgcacatgcgagaaaaaggtggaatgtttaaaacaccataatcagctcagggtatttgccaatctgaaataaaagtgggatgggagagtgtgtccttcagatcaagggtactaaagtccctttcgctgcagtgagtgagaggtatgttgtgtgtgaatgtacggatgtgtgtttgcgtgcatgtttgtgcatgtgtgactgtgcatgttatgtttctccatgtgggcaaagatttgaaatgtaagcttttatttattattttagaatgtgacataatgagcagccacactcgggggaggggaaggttggtaggtaagctgtaacagattgctccagttgccttaaactatgcacatagctaagtgaccaaacttcttgttttgatttgaaaaaagtgcattgttttcttgtccctccctttgatgaaacgttaccctttgacgggccttttgatgtgaacagatgttttctaggacaaactataaggactaattttaaacttcaaacattccacttttgtaatttgttttaaattgttttatgtatagtaagcacaactgtaatctagttttaagagaaaccggtgctttcttttagttcatttgtatttcccttgttactgtaaaagactgtttattaattgtttacagtttgttgcaacagccattttcttgggagaaagcttgagtgtaaagccatttgtaaaaggctttgccatactcattttaatatgtgcctgttgctgttaacttttgatgaataaaaacctatcttttcat

SEQ ID NO: 276743 - DNA, 758 bp, Homo sapiens
  misc_feature (77)..(77): n is a, c, g, or t
  misc_feature (87)..(87): n is a, c, g, or t
gccttactcgtggatacatcatcgcattactcgtacggggctatcaccctctgaggcacagctttcctgactggttncgattgtctntgatgtatcactggcctggtccacattcactctgtacgtacagagtgaatgtacggatgtgtgtttgcgtgcatgtttgtgcatgtgtgactgtgcatgttatgtttctccatgtgggcaaagatttgaaatgtaagcttttatttattattttagaatgtgacataatgagcagccacactcgggggaggggaaggttggtaggtaagctgtaacagattgctccagttgccttaaactatgcacatagctaagtgaccaaacttcttgttttgatttgaaaaaagtgcattgttttcttgtccctccctttgatgaaacgttaccctttgacgggccttttgatgtgaacagatgttttctaggacaaactataaggactaattttaaacttcaaacattccacttttgtaatttgttttaaattgttttatgtatagtaagcacaactgtaatctagttttaagagaaaccggtgctttcttttagttcatttgtatttcccttgttactgtaaaagactgtttattaattgtttacagtttgttgcaacagccattttcttgggagaaagcttgagtgtaaagccatttgtaaaaggctttgccatactcattttaatatgtgcctgttgctgttaacttttgatgaataaaaacctatcttttcat

SEQ ID NO: 276744 - DNA, 2604 bp, Homo sapiens
  misc_feature (3)..(3): n is a, c, g, or t
ggngatcactgttggaaggcagctgcttgaggtccaaggcagtcagtgtcccctctcttttgcctcgggacagctggtatttatcagactcctaagaagttttccttgctccctagtagaagagagagattatgcagcgggcttttgattgatccaatgggaattacattgatctggtgtctggccttggttcttatcaagtggatcacctctaagaggcgtggagctatttcctatgacagttctgatcagactgcattatacattcgtatgctaggagatgtacgtgtaaggagccgagcaggatttgaatcagaaagaagaggttctcacccatatattgattttcgtattttccactctcaatctgaaattgaagtgtctgtctctgcaaggaatatcagaaggctactaagtttccagcgatatcttagatcttcacgcttttttcgtggtactgcggtttcaaattccctaaacattttagatgatgattataatggacaagccaagtgtatgctggaaaaagttggaaattggaattttgatatctttctatttgatagactaacaaatggaaatagtctagtaagcttaacctttcatttatttagtcttcatggattaattgagtacttccatttagatatgatgaaacttcgtagatttttagttatgattcaagaagattaccacagtcaaaatccttaccataacgcagtccacgctgcggatgttactcaggccatgcactgttacttaaaggaacctaagcttgccaattctgtaactccttgggatatcttgctgagcttaattgcagctgccactcatgatctggatcatccaggtgttaatcaacctttccttattaaaactaaccattacttggcaactttatacaagaatacctcagtactggaaaatcaccactggagatctgcagtgggcttattgagagaatcaggcttattctcacatctgccattagaaagcaggcaacaaatggagacacagataggtgctctgatactagccacagacatcagtcgccagaatgagtatctgtctttgtttaggtcccatttggatagaggtgatttatgcctagaagacaccagacacagacatttggttttacagatggctttgaaatgtgctgatatttgtaacccatgtcggacgtgggaattaagcaagcagtggagtgaaaaagtaacggaggaattcttccatcaaggagatatagaaaaaaaatatcatttgggtgtgagtccactttgcgatcgtcacactgaatctattgccaacatccagattggttttatgacttacctagtggagcctttatttacagaatgggccaggttttccaatacaaggctatcccagacaatgcttggacacgtggggctgaataaagccagctggaagggactgcagagagaacagtcgagcagtgaggacactgatgctgcatttgagttgaactcacagttattacctcaggaaaatcggttatcataacccccagaaccagtgggacaaactgcctcctggaggtttttagaaatgtgaaatggggtcttgaggtgagagaacttaactcttgactgccaaggtttccaagtgagtgatgccagccagcattatttatttccaagatttcctctgttggatcatttgaacccacttgttaattgcaagacccgaacatacagcaatatgaatttggctttcatgtgaaaccttgaatatgcaaagcccagcaggagagaatccgaaaggagtaacaaaggaagttttgatatgtgccacgactttttcaaagcatctaatcttcaaaacgtgaaacttgaattgttcagcaacaatctcttggaatttaaccagtctgatgcaacaatgtgtatcttgtaccttccactaagttctctctgagaaaatggaaatgtgaagtgcccagcctctgctgcctctggcaagacaatgtttacaaatcaactctgaaaatattggttctaaattgccttggagcatgattgtgaaggaaccactcaaacaaatttaaagatcaaactttagactgcagctctttccccctggtttgcctttttcttctttggatgccaccaaagcctcccatttgctatagttttatttcatgcactggaaactgagcatttatcgtagagtaccgccaagctttcactccagtgccgtttggcaatgcaattttttttagcaattagtttttaatttggggtgggaggggaagaacaccaatgtcctagctgtattatgattctgcagtgaagacattgcatgttgttttcactactgtacacttgacctgcacatgcgagaaaaaggtggaatgtttaaaacaccataatcagctcagggtatttgccaatctgaaataaaagtgggatgggagagtgtgtccttcagatcaagggtactaaagtccctttcgctgcagtgagtgagaggtatgttgtgtgtgaatgtacggatgtgtgtttgcgtgcatgtttgtgcatgtgtgactgtgcatgttatgtgtgaatgtacggatgtgtgtttgcgtgcatgtatgca

SEQ ID NO: 276745 - DNA, 2806 bp, Homo sapiens
  misc_feature (1898)..(1898): n is a, c, g, or t
aagctggcggccgcggcagggcgggcgccgcgcggaggcagggcgggcgtattcaatggaagtgtgttaccagctgccggtactgcccctggacaggccggtcccccagcacgtcctcagccgccgaggagccatcagcttcagctccagctccgctctcttcggctgccccaatccccggcagctctctcagaggcgtggagctatttcctatgacagttctgatcagactgcattatacattcgtatgctaggagatgtacgtgtaaggagccgagcaggatttgaatcagaaagaagaggttctcacccatatattgattttcgtattttccactctcaatctgaaattgaagtgtctgtctctgcaaggaatatcagaaggctactaagtttccagcgatatcttagatcttcacgcttttttcgtggtactgcggtttcaaattccctaaacattttagatgatgattataatggacaagccaagtgtatgctggaaaaagttggaaattggaattttgatatctttctatttgatagactaacaaatggaaatagtctagtaagcttaacctttcatttatttagtcttcatggattaattgagtacttccatttagatatgatgaaacttcgtagatttttagttatgattcaagaagattaccacagtcaaaatccttaccataacgcagtccacgctgcggatgttactcaggccatgcactgttacttaaaggaacctaagcttgccaattctgtaactccttgggatatcttgctgagcttaattgcagctgccactcatgatctggatcatccaggtgttaatcaacctttccttattaaaactaaccattacttggcaactttatacaagaatacctcagtactggaaaatcaccactggagatctgcagtgggcttattgagagaatcaggcttattctcacatctgccattagaaagcaggcaacaaatggagacacagataggtgctctgatactagccacagacatcagtcgccagaatgagtatctgtctttgtttaggtcccatttggatagaggtgatttatgcctagaagacaccagacacagacatttggttttacagatggctttgaaatgtgctgatatttgtaacccatgtcggacgtgggaattaagcaagcagtggagtgaaaaagtaacggaggaattcttccatcaaggagatatagaaaaaaaatatcatttgggtgtgagtccactttgcgatcgtcacactgaatctattgccaacatccagattggtaactatacatatttagatatagctggttagaaaaatgccactgtttttatcaagaagggaaatatatttgaaatataaaatattaaaattatgctcatttctatttttaaaaataatttaagaaattttacccttgttttcccttgttatggctcttctaattctcatttaattttaggatgtaaaaagtatatttttgcagaacaggcagcagcaataacttgtttctgttcttatgtaaataagaatccattattcgctcatgtggaagcttcttttgcatcatttgggactgccatttaaaaaaggataggtaaacaaagaaatgacaaaaataaaataaataaaataaaaatggataggtggtgacccactgagcctgatcataatacgaagaccagcttctgccactgcctttccagactcttaccactgcctgttgattaaatctaactcttcaacatcctagacaggcccttataatcttgcttcaaatgctgtgcagccatcttgcctcaacttccctctcatttgcctacagcatctcgggacgcttctgtgtttcccaagtatacgctgttctttcgctctttgtgcntcgccagtgctttccatgtgcctcgtagagttatttttcttgaagaggcagctcaaatgtcaccttctccagaagctgctctccacttgctttaggcagagtcagtcacttttcttctagattccaaagtgcctgatccacttggttgtggattcctggagcctagcaccacaccagaagcacgaggcccttgagaactgtgtgttgagtgaactaataactgtattatagaaagcataatgaaaatgtcctgtgactgaagtatgtgtagcttgttgcaggagttcacaggaaagttgactaggattgagtgtgttgggctttgggtataaaggagggggattctacgggggcagtagctcaacaaggaatagagggaggagtgtaattttggtagctggtgttgaatagggcctttgagaatcagactgaacacagtgaaatatgtgcccaaagttcagaaagatgaagtttccagaaactaagaaggtagcacaatatgtggcatcatactcagaaaggaagaccatgccatggggccagaaattcagaaacgtaattcttacattgtgattgcaatggatactcatggaagaaagtgggtagtggccgatttgacttcagagtgacaggtagagaagggaagagcgtgtagaactgtggccagactttaggagtgtgagggatgctgaatctcccagagagctcacactggccaggaatgctgagagtagcagatgcttttcttttgggaggatagtaaaacaatttagaaccagatatgctttgtcttgattctcaagtagaataatcttcaaatgcaaaagaatacatgagccaatatcgtgccactgcattccagcctgggtgacagaatgaaactccatcactccatctcaaaaaaaaaa

SEQ ID NO: 276746 - DNA, 857 bp, Homo sapiens
aagctggcggccgcggcagggcgggcgccgcgcggaggcagggcgggcgtattcaatggaagtgtgttaccagctgccggtactgcccctggacaggccggtcccccagcacgtcctcagccgccgaggagccatcagcttcagctccagctccgctctcttcggctgccccaatccccggcagctctctcagaggcgtggagctatttcctatgacagttctgatcagactgcattatacattcgtatgctaggagatgtacgtgtaaggagccgagcaggatttgaatcagaaagaagaggttctcacccatatattgattttcgtattttccactctcaatctgaaattgaagtgtctgtctctgcaaggaatatcagaaggctactaagtttccagcgatatcttagatcttcacgcttttttcgtggtactgcggtttcaaattccctaaacattttagatgatgattataatggacaagccaagtgtatgctggaaaaagttggaaattggaattttgatatctttctatttgatagactaacaaatggtaagtgaagaatttgacttgctcaagttaatgtagtctagattactgcattgatggtgcagccgctggtgcgttgctttcatttactgtactaaggttgttagccctctgctggaagagagtgtattagtccattttcacactgctgataaagacatacccgagactgggtaattgagaaaaagaggtttaatggactcatagttccatgtggctggggaggcctcacaatcatggtggaaggtgaaaggcacatcttacatgttggcaggcaagagagaaatgagagccaagcaaaagggg

SEQ ID NO: 276747 - DNA, 413 bp, Homo sapiens
aatgaaatggcctaaggatgaactctgtaaactccacatgggcagggccactgttgtatcatggctttgccagtgtggtgatgagatcaggacctggcagatgtgcttggtgaacctaatgaacaaccacctgaggaatgacgtgaagggggaggagattaccaccactaccattggctgctaattcaaaactactgtgatggcgtagagcttattttagatatatctgtgattcattattcttttgtcacacttcagcttgccaattctgtaactccttgggatatcttgctgagcttaattgcagctgccactcatgatctggatcatccaggtgttaatcaacctttccttattaaaactaaccattacttggcaactttatacaaggttagtgcaattttatcatcaag

SEQ ID NO: 276748 - DNA, 3214 bp, Homo sapiens
aagctggcggccgcggcagggcgggcgccgcgcggaggcagggcgggcgtattcaatggaagtgtgttaccagctgccggtactgcccctggacaggccggtcccccagcacgtcctcagccgccgaggagccatcagcttcagctccagctccgctctcttcggctgccccaatccccggcagctctctcagaggcgtggagctatttcctatgacagttctgatcagactgcattatacattcgtatgctagcatgaaggaatggccacaggacaggtgactagtcattgtgggatggaattatagtcgatgaagtgagccttggaggaagtcatggtcctactcagagaaacagagagatgtacgtgtaaggagccgagcaggatttgaatcagaaagaagaggttctcacccatatattgattttcgtattttccactctcaatctgaaattgaagtgtctgtctctgcaaggaatatcagaaggctactaagtttccagcgatatcttagatcttcacgcttttttcgtggtactgcggtttcaaattccctaaacattttagatgatgattataatggacaagccaagtgtatgctggaaaaagttggaaattggaattttgatatctttctatttgatagactaacaaatggaaatagtctagtaagcttaacctttcatttatttagtcttcatggattaattgagtacttccatttagatatgatgaaacttcgtagatttttagttatgattcaagaagattaccacagtcaaaatccttaccataacgcagtccacgctgcggatgttactcaggccatgcactgttacttaaaggaacctaagcttgccaattctgtaactccttgggatatcttgctgagcttaattgcagctgccactcatgatctggatcatccaggtgttaatcaacctttccttattaaaactaaccattacttggcaactttatacaagaatacctcagtactggaaaatcaccactggagatctgcagtgggcttattgagagaatcaggcttattctcacatctgccattagaaagcaggcaacaaatggagacacagataggtgctctgatactagccacagacatcagtcgccagaatgagtatctgtctttgtttaggtcccatttggatagaggtgatttatgcctagaagacaccagacacagacatttggttttacagatggctttgaaatgtgctgatatttgtaacccatgtcggacgtgggaattaagcaagcagtggagtgaaaaagtaacggaggaattcttccatcaaggagatatagaaaaaaaatatcatttgggtgtgagtccactttgcgatcgtcacactgaatctattgccaacatccagattggttttatgacttacctagtggagcctttatttacagaatgggccaggttttccaatacaaggctatcccagacaatgcttggacacgtggggctgaataaagccagctggaagggactgcagagagaacagtcgagcagtgaggacactgatgctgcatttgagttgaactcacagttattacctcaggaaaatcggttatcataacccccagaaccagtgggacaaactgcctcctggaggtttttagaaatgtgaaatggggtcttgaggtgagagaacttaactcttgactgccaaggtttccaagtgagtgatgccagccagcattatttatttccaagatttcctctgttggatcatttgaacccacttgttaattgcaagacccgaacatacagcaatatgaatttggctttcatgtgaaaccttgaatatgcaaagcccagcaggagagaatccgaaaggagtaacaaaggaagttttgatatgtgccacgactttttcaaagcatctaatcttcaaaacgtgaaacttgaattgttcagcaacaatctcttggaatttaaccagtctgatgcaacaatgtgtatcttgtaccttccactaagttctctctgagaaaatggaaatgtgaagtgcccagcctctgctgcctctggcaagacaatgtttacaaatcaactctgaaaatattggttctaaattgccttggagcatgattgtgaaggaaccactcaaacaaatttaaagatcaaactttagactgcagctctttccccctggtttgcctttttcttctttggatgccaccaaagcctcccatttgctatagttttatttcatgcactggaaactgagcatttatcgtagagtaccgccaagctttcactccagtgccgtttggcaatgcaattttttttagcaattagtttttaatttggggtgggaggggaagaacaccaatgtcctagctgtattatgattctgcagtgaagacattgcatgttgttttcactactgtacacttgacctgcacatgcgagaaaaaggtggaatgtttaaaacaccataatcagctcagggtatttgccaatctgaaataaaagtgggatgggagagtgtgtccttcagatcaagggtactaaagtccctttcgctgcagtgagtgagaggtatgttgtgtgtgaatgtacggatgtgtgtttgcgtgcatgtttgtgcatgtgtgactgtgcatgttatgtttctccatgtgggcaaagatttgaaatgtaagcttttatttattattttagaatgtgacataatgagcagccacactcgggggaggggaaggttggtaggtaagctgtaacagattgctccagttgccttaaactatgcacatagctaagtgaccaaacttcttgttttgatttgaaaaaagtgcattgttttcttgtccctccctttgatgaaacgttaccctttgacgggccttttgatgtgaacagatgttttctaggacaaactataaggactaattttaaacttcaaacattccacttttgtaatttgttttaaattgttttatgtatagtaagcacaactgtaatctagttttaagagaaaccggtgctttcttttagttcatttgtatttcccttgttactgtaaaagactgtttattaattgtttacagtttgttgcaacagccattttcttgggagaaagcttgagtgtaaagccatttgtaaaaggctttgccatactcattttaatatgtgcctgttgctgttaacttttgatgaataaaaacctatcttttcat

SEQ ID NO: 276749 - DNA, 2979 bp, Homo sapiens
ggcctggtctctctgccaacatccagcaagatgtaatacaaggaatatgttttctttcagtgtttctcatgtcaacacaaatgcagttttttccattttctttttactcttgggacacagtcatgttccagtccatctcaatctgaaattgaagtgtctgtctctgcaaggaatatcagaaggctactaagtttccagcgatatcttagatcttcacgcttttttcgtggtactgcggtttcaaattccctaaacattttagatgatgattataatggacaagccaagtgtatgctggaaaaagttggaaattggaattttgatatctttctatttgatagactaacaaatggaaatagtctagtaagcttaacctttcatttatttagtcttcatggattaattgagtacttccatttagatatgatgaaacttcgtagatttttagttatgattcaagaagattaccacagtcaaaatccttaccataacgcagtccacgctgcggatgttactcaggccatgcactgttacttaaaggaacctaaggctgaactcatgtggattataaagcattttgttcaagttgagcccaaagtctccttgattgattgacactgcttgccaattctgtaactccttgggatatcttgctgagcttaattgcagctgccactcatgatctggatcatccaggtgttaatcaacctttccttattaaaactaaccattacttggcaactttatacaagaatacctcagtactggaaaatcaccactggagatctgcagtgggcttattgagagaatcaggcttattctcacatctgccattagaaagcaggcaacaaatggagacacagataggtgctctgatactagccacagacatcagtcgccagaatgagtatctgtctttgtttaggtcccatttggatagaggtgatttatgcctagaagacaccagacacagacatttggttttacagatggctttgaaatgtgctgatatttgtaacccatgtcggacgtgggaattaagcaagcagtggagtgaaaaagtaacggaggaattcttccatcaaggagatatagaaaaaaaatatcatttgggtgtgagtccactttgcgatcgtcacactgaatctattgccaacatccagattggttttatgacttacctagtggagcctttatttacagaatgggccaggttttccaatacaaggctatcccagacaatgcttggacacgtggggctgaataaagccagctggaagggactgcagagagaacagtcgagcagtgaggacactgatgctgcatttgagttgaactcacagttattacctcaggaaaatcggttatcataacccccagaaccagtgggacaaactgcctcctggaggtttttagaaatgtgaaatggggtcttgaggtgagagaacttaactcttgactgccaaggtttccaagtgagtgatgccagccagcattatttatttccaagatttcctctgttggatcatttgaacccacttgttaattgcaagacccgaacatacagcaatatgaatttggctttcatgtgaaaccttgaatatgcaaagcccagcaggagagaatccgaaaggagtaacaaaggaagttttgatatgtgccacgactttttcaaagcatctaatcttcaaaacgtgaaacttgaattgttcagcaacaatctcttggaatttaaccagtctgatgcaacaatgtgtatcttgtaccttccactaagttctctctgagaaaatggaaatgtgaagtgcccagcctctgctgcctctggcaagacaatgtttacaaatcaactctgaaaatattggttctaaattgccttggagcatgattgtgaaggaaccactcaaacaaatttaaagatcaaactttagactgcagctctttccccctggtttgcctttttcttctttggatgccaccaaagcctcccatttgctatagttttatttcatgcactggaaactgagcatttatcgtagagtaccgccaagctttcactccagtgccgtttggcaatgcaattttttttagcaattagtttttaatttggggtgggaggggaagaacaccaatgtcctagctgtattatgattctgcagtgaagacattgcatgttgttttcactactgtacacttgacctgcacatgcgagaaaaaggtggaatgtttaaaacaccataatcagctcagggtatttgccaatctgaaataaaagtgggatgggagagtgtgtccttcagatcaagggtactaaagtccctttcgctgcagtgagtgagaggtatgttgtgtgtgaatgtacggatgtgtgtttgcgtgcatgtttgtgcatgtgtgactgtgcatgttatgtttctccatgtgggcaaagatttgaaatgtaagcttttatttattattttagaatgtgacataatgagcagccacactcgggggaggggaaggttggtaggtaagctgtaacagattgctccagttgccttaaactatgcacatagctaagtgaccaaacttcttgttttgatttgaaaaaagtgcattgttttcttgtccctccctttgatgaaacgttaccctttgacgggccttttgatgtgaacagatgttttctaggacaaactataaggactaattttaaacttcaaacattccacttttgtaatttgttttaaattgttttatgtatagtaagcacaactgtaatctagttttaagagaaaccggtgctttcttttagttcatttgtatttcccttgttactgtaaaagactgtttattaattgtttacagtttgttgcaacagccattttcttgggagaaagcttgagtgtaaagccatttgtaaaaggctttgccatactcattttaatatgtgcctgttgctgttaacttttgatgaataaaaacctatcttttcat

SEQ ID NO: 276750 - DNA, 3616 bp, Homo sapiens
  misc_feature (3)..(3): n is a, c, g, or t
ggngatcactgttggaaggcagctgcttgaggtccaaggcagtcagtgtcccctctcttttgcctcgggacagctggtatttatcagactcctaagaagttttccttgctccctagtagaagagagagattatgcagcgggcttttgattgatccaatgggaattacattgatctggtgtctggccttggttcttatcaagtggatcacctctaagaggcgtggagctatttcctatgacagttctgatcagactgcattatacattcgtatgctaggagatgtacgtgtaaggagccgagcaggatttgaatcagaaagaagaggttctcacccatatattgattttcgtattttccactctcaatctgaaattgaagtgtctgtctctgcaaggaatatcagaaggctactaagtttccagcgatatcttagatcttcacgcttttttcgtggtactgcggtttcaaattccctaaacattttagatgatgattataatggacaagccaagtgtatgctggaaaaagttggaaattggaattttgatatctttctatttgatagactaacaaatggaaatagtctagtaagcttaacctttcatttatttagtcttcatggattaattgagtacttccatttagatatgatgaaacttcgtagatttttagttatgattcaagaagattaccacagtcaaaatccttaccataacgcagtccacgctgcggatgttactcaggccatgcactgttacttaaaggaacctaagcttgccaattctgtaactccttgggatatcttgctgagcttaattgcagctgccactcatgatctggatcatccaggtgttaatcaacctttccttattaaaactaaccattacttggcaactttatacaagaatacctcagtactggaaaatcaccactggagatctgcagtgggcttattgagagaatcaggcttattctcacatctgccattagaaagcaggcaacaaatggagacacagataggtgctctgatactagccacagacatcagtcgccagaatgagtatctgtctttgtttaggtcccatttggatagaggtgatttatgcctagaagacaccagacacagacatttggttttacagatggctttgaaatgtgctgatatttgtaacccatgtcggacgtgggaattaagcaagcagtggagtgaaaaagtaacggaggaattcttccatcaaggagatatagaaaaaaaatatcatttgggtgtgagtccactttgcgatcgtcacactgaatctattgccaacatccagattggttttatgacttacctagtggagcctttatttacagaatgggccaggttttccaatacaaggctatcccagacaatgcttggacacgtggggctgaataaagccagctggaagggactgcagagagaacagtcgagcagtgaggacactgatgctgcatttgagttgaactcacagttattacctcaggaaaatcggttatcataacccccagaaccagtgggacaaactgcctcctggaggtttttagaaatgtgaaatggggtcttgaggtgagagaacttaactcttgactgccaaggtttccaagtgagtgatgccagccagcattatttatttccaagatttcctctgttggatcatttgaacccacttgttaattgcaagacccgaacatacagcaatatgaatttggctttcatgtgaaaccttgaatatgcaaagcccagcaggagagaatccgaaaggagtaacaaaggaagttttgatatgtgccacgactttttcaaagcatctaatcttcaaaacgtgaaacttgaattgttcagcaacaatctcttggaatttaaccagtctgatgcaacaatgtgtatcttgtaccttccactaagttctctctgagaaaatggaaatgtgaagtgcccagcctctgctgcctctggcaagacaatgtttacaaatcaactctgaaaatattggttctaaattgccttggagcatgattgtgaaggaaccactcaaacaaatttaaagatcaaactttagactgcagctctttccccctggtttgcctttttcttctttggatgccaccaaagcctcccatttgctatagttttatttcatgcactggaaactgagcatttatcgtagagtaccgccaagctttcactccagtgccgtttggcaatgcaattttttttagcaattagtttttaatttggggtgggaggggaagaacaccaatgtcctagctgtattatgattctgcagtgaagacattgcatgttgttttcactactgtacacttgacctgcacatgcgagaaaaaggtggaatgtttaaaacaccataatcagctcagggtatttgccaatctgaaataaaagtgggatgggagagtgtgtccttcagatcaagggtactaaagtccctttcgctgcagtgagtgagaggtatgttgtgtgtgaatgtacggatgtgtgtttgcgtgcatgtttgtgcatgtgtgactgtgcatgttatgtttctccatgtgggcaaagatttgaaatgtaagcttttatttattattttagaatgtgacataatgagcagccacactcgggggaggggaaggttggtaggtaagctgtaacagattgctccagttgccttaaactatgcacatagctaagtgaccaaacttcttgttttgatttgaaaaaagtgcattgttttcttgtccctccctttgatgaaacgttaccctttgacgggccttttgatgtgaacagatgttttctaggacaaactataaggactaattttaaacttcaaacattccacttttgtaatttgttttaaattgttttatgtatagtaagcacaactgtaatctagttttaagagaaaccggtgctttcttttagttcatttgtatttcccttgttactgtaaaagactgtttattaattgtttacagtttgttgcaacagccattttcttgggagaaagcttgagtgtaaagccatttgtaaaaggctttgccatactcattttaatatgtgcctgttgctgttaacttttgatgaataaaaacctatcttttcatatttttatctttgacatttaccttataactcaatcttttggaaaacacaatgctaaattacaaggaaatcaaagttagcttcttggctcttgtaattcatccctcagatgtttactcagtccgagcttatctactaatgactcaccttgcaagtgagtaagcagaagcccagttagggctgttggagtcctgactaacacaggggagaggtcagctttgagccaggccttttgttcctacagtggtgaactgcataagacatcagcaagtcttgcaagtactaaaatactagttgtatttatttctatcaatcattggcctttttaaagtgataagaaaaggccactccactctacttgattgatatcagttgtaaacaaggtaccactgtgccattccctatatcttcccaggtccaactcattagaagggatatggtgcaaacttctaaatcaaacacattaacatattatttgtacagaa

SEQ ID NO: 276751 - DNA, 1253 bp, Homo sapiens
aagctggcggccgcggcagggcgggcgccgcgcggaggcagggcgggcgtattcaatggaagtgtgttaccagctgccggtactgcccctggacaggccggtcccccagcacgtcctcagccgccgaggagccatcagcttcagctccagctccgctctcttcggctgccccaatccccggcagctctctcagaggcgtggagctatttcctatgacagttctgatcagactgcattatacattcgtatgctaggagatgtacgtgtaaggagccgagcaggatttgaatcagaaagaagaggttctcacccatatattgattttcgtattttccactctcaatctgaaattgaagtgtctgtctctgcaaggaatatcagaaggctactaagtttccagcgatatcttagatcttcacgcttttttcgtggtactgcggtttcaaattccctaaacattttagatgatgattataatggacaagccaagtgtatgctggaaaaagttggaaattggaattttgatatctttctatttgatagactaacaaatggaaatagtctagtaagcttaacctttcatttatttagtcttcatggattaattgagtacttccatttagatatgatgaaacttcgtagatttttagttatgattcaagaagattaccacagtcaaaatccttaccataacgcagtccacgctgcggatgttactcaggccatgcactgttacttaaaggaacctaagcttgccaattctgtaactccttgggatatcttgctgagcttaattgcagctgccactcatgatctggatcatccaggtgttaatcaacctttccttattaaaactaaccattacttggcaactttatacaagaatacctcagtactggaaaatcaccactggagatctgcagtgggcttattgagagaatcaggcttattctcacatctgccattagaaagcaggcaacaaatggagacacagataggtgctctgatactagccacagacatcagtcgccagaatgagtatctgtctttgtttaggtcccatttggatagaggtgatttatgcctagaagacaccagacacagacatttggttttacagatggctttgaaatgtgctgatatttgtaacccatgtcggacgtgggaattaagcaagcagtggagtgaaaaagtaacggaggaattcttccatcaaggcaagttacagtattgagtgataattaatctatcca

SEQ ID NO: 276752 - DNA, 510 bp, Homo sapiens
aagctggcggccgcggcagggcgggcgccgcgcggaggcagggcgggcgtattcaatggaagtgtgttaccagctgccggtactgcccctggacaggccggtcccccagcacgtcctcagccgccgaggagccatcagcttcagctccagctccgctctcttcggctgccccaatccccggcagctctctcagaggcgtggagctatttcctatgacagttctgatcagactgcattatacattcgtatgctaggagatgtacgtgtaaggagccgagcaggatttgaatcagaaagaagaggttctcacccatatattgattttcgtattttccactctcaatctgaaattgaagtgtctgtctctgcaaggaatatcagaaggatgctggccttataagatgagttaggaaggagtccctcctcctcaattttttggaacaatttcagtaggaatgtaccagttctcctttgaacatgatgatcctactgacctatctcgggcccttc

SEQ ID NO: 276753 - DNA, 734 bp, Homo sapiens
tcagtcttgggctttttgacttctaggtgaagtggcatctcccagtagaagcatccgctgggcagctgcagtggtaacaccgggtgatgatatttgaagtcatcaatcagagcctcccctgccgagaggttctttgtgaggagtggaaaggggtgcgccctctgggccagggacagggcttgctgaactcggttttagcctcaactttttctttcctcctcagccagatgcctttatagatggagcacctgacctcatgcaagggccctcatcactgaagctggagacgaaattggttcttagagagtgtagaaagggacgactgagaactagccccggggcatgattgcaggggaccctgttttctctcttgtgacacctgttgtagatatgtgaaatgagacagttatgcttgtccctcttcacagcagaaggggaaaagtcaaactgggaatgcatcacatggaggccaggagaaaagtcatggaaccactaattctgtttttacactcacagtaatctaagccagttctttacacaacctcttactcgttgaataatagcgaaaatttaagctaacatattctttcttttgaaaacaaacatgtttaaacattttagatgtgggtatgtctgtcttggaaattaccaataaaatatttctcccagccttgtttcgccatgggccagtagggtgcgtcaggaccagcactaatatctttaatctcctcagt

SEQ ID NO: 276754 - DNA, 471 bp, Homo sapiens
atcatttccttcacaatacacatgagcctagaaagggagagagagaaaaaatcaacattagtataggttcagccctgacatcctaaatgaggctctaaattttcttatggctcaagtcatcattctacagcaacatcaacattcatctcccaaggaaagaattgcaaacctatgttctaccagtaacctgggtgtaaccttactataaatgaaaacatgcttccttttttttaactatacaaaagattctgagttaggctgcgcatggtggctcatgcctgcaatcccagcatttcgggaggctaaggtgggcagatcacttgaggcctgcttatctgttttacttgtgtcccaatgtcccccaaatacccacctcatacatgaggccgtatgggataaaggttagttaagtgctcaagggtctgtgcctaatttagagcctagctctgctgcttttctctgtggaaactt

SEQ ID NO: 276755 - DNA, 2300 bp, Homo sapiens
  misc_feature (1)..(1): n is a, c, g, or t
  misc_feature (2009)..(2009): n is a, c, g, or t
  misc_feature (2075)..(2075): n is a, c, g, or t
naaatatctgaaattttgatgccgctttgctcacaatgtcatcctttatcctttaaacctggagttgtctgaggtggtttgcaaactgcaaagcgccctgttcccaatgatgcacctgagaagtctgtaaatggggtaaatttaggcaaacacacctggaaaagtggcattttggagtggggaatgctgtggccggaggttagcaaccggatgatgcaaaagcgtatttaaggcagcagttctggcctttccccgccatggagcagaagcccccatagtgatgtgagaagcggcgctgtcccagtttactaggatgggatgggctttggatctaaccagcagcgaagaaaacctgcggtgcggctgcgctcggtagtaggggtccacaaagcgtcagaatctgcagcagccccggcctttgcgagctccagctccgaagtcaacccggcccccaaattccactgggaaaccttaagacaccggtgtttttaccgtaagaagacctcagaagcccatggaaacaaggcgatgacggcgcttgagggtgaccagacctcctcaatcattccatcagccacccaggactcaacagcagaacctcagaggactcagctgaaagaggttttcactcgagcactaaccacagagaaatgggaagtgccatcctgctgtcatacgcagccgatggctgggtaggactaaatgcccttctgtggtgagatgaaccaagacggcagatgggggaataacatcagtgagagagagattacgaatggatccttgtattgcagatcaaactgggttgtctcttctcaaaccacccaggcagtttctgaatgtcccaagataggggtaggagaaaagaaaaaaaagacaaaacaggagacggtgggtaagaaaacctaaaaggcacaatgaggcaaaggcctaagatggaggctggctttgggatctgaaatccggccacaatcctccttgttttacctcaagtccaagaattgtcaaaaagaaaacccagaagggctattcattctaaattttaaaatcttttcttcctggcctaccaagtccttgtgttttctttctaggcgcccataaatacaaccccattacagttctatttggctaataatttacagaacatttaaaataccgggtaggtgaacatctcttcatggcttttgtgtaagggcctgaagcgaagagaaaaacaactgattggagattcctatctggcgccttctccagggaaactgacaaccagagaaatctgttgctaggatttctaggacatctggaaattccctttttgttctttctcaacaatataaaatggtatattcgcaaacctatctgaatcacctcaatctaggccactttgaaaatttcatttaaaaatgtaatcacagatttttaaactaattacccaatttgcaaacaaatcccagctacttctggtcttgaacatggagcaaaggtgtgtcagtaaggccaacattcttaggttgacagagacaggttaacacattggctggctcagcctgtgaaaaagaaccaatgatgatgcacaccctggctgaagtgacatctggccaaaggattccaacagaatgaattccatcaacatggaaaagataatccatggcaccaattctgtgctgcttacaggcaatggttaccaaatgagtcaaaacatggcctagaagtggagccgggcccaatgaaaagcctgagttcacacgtgctaggggctccactgaccggcctctgcagcccagcacccagtcctcttgctctgggtgcaaggtgaggaggcagagtgcacacaccggctcctgtgtccccggcctggctggcaatggtaaaatgggctgcctttcttttgcagcttcttctaatcgaaataccaaagggtactgacctctggcctcagggatgtgacttgcagtgcaaattttacctcttcagtgcagagagtggtcttgaaatcttgccagtgtgtggccctncctcagctcctgccaccctggggagccaggatgctgaaatgcataaggcaaaagcactgaatcggntctattccccactgacctttagttacgatcactctgccctgaccagctggagttgggcctgtgtgaagccagtgatttccaacacactgaagaaggtatctgagtccagtgtgaaagccaaattcctcctgaatctgtgatttggtgaagctctgtgaggtattttttgtgtgtggaagactgaaagtgaagggaaacaactaaaaaaattaaacagacaaaagc

SEQ ID NO: 276756 - DNA, 338 bp, Homo sapiens
ccaacatggcccggcccgggagaactgtgcctaccgccagggtgggacctcccatgccaccattgtcctagacctcccacagtgcccacccccagtaggctcctaagagaggggccaggggctggactcaggcctcccacccatgcccatggggcatagagttgccgggaaagcttcctggttcataccggacctgacctcccaggaagtgcccgtaacttggggctcccatgttaagtctggatctgggcggggggagaccagagctgttggggcttggttgccccatttggcctctcctctctgccctccccttccagctgccccagagcacatca

SEQ ID NO: 276757 - DNA, 846 bp, Homo sapiens
  misc_feature (186)..(186): n is a, c, g, or t
  misc_feature (192)..(192): n is a, c, g, or t
  misc_feature (198)..(198): n is a, c, g, or t
ggccccaggagagcttgtgtgccccactggctgggctccaggcaggattcctccatccccgtgcctgaccacactaggagactgggcagaccccactcacagacggggaaaagcctggcttcgctggtggcaccagagggaagagccaagtctacagtaaaatggcaagtccctgggccagaatgncagacncatccntgaccaaccacctggctaggacctcactggtataaacaaacacccaccaaccaatgcagggtgcccattaggggcactggatagccacagaactcctacttctttctcttgttaaatagaagttctagtctctgccacatacatcttagaggcccaggtggcactgaggtcacaaacgggtggcatgaggggagctaatcttgactgcttttcaatgtccctcagcatgaataacaaacaggcctactgtgctggaatctgctgctcgttcatttacagaatgtgcacttaatggtgaatgtaaggccgggcgcagtagctcacgtctctaatcccagcactttgggaagccagcaggtggatcacctgaggtcaggagttcgagaccagcctggccaacatggcgaaatcccgtctctactaaaaataagaacattagccaggtgtggtggcacatacctgtaatcccagctacttgggagactgaggcgggaggatggcttgagcccatgcagtgaactatgaatgcgccactgcactccagcctgggccaaacagcaagaccctgtctcaaaaaagagaagaaaagaaccactggacaggctgagagatacagtcctacaatctctgcccccaaccccaatctct

SEQ ID NO: 276758 - DNA, 643 bp, Homo sapiens
taaaataccaaactgagctaaatacggtatatgtgtacttatacatatgtacataacctaaatatacgtgtgcacacattatctatacaaagagccatactcagtgaaagataaattacctcctaaactaaagtcccctctgaggtacaacagaaattaaaataattgcttctcttctcaactctatgtagcacgtattttccatgatgggataaatgttttcatttcaagtgccaatgtgtgaactgtaataaacattactgctttcattttttgtaggtatggaggttacattaactgttatagttgcggagctgagtttttatgtcaggtaattttgtttagtccaaactggttttgaactataaacaattatggatatgtattttttggtttctttgaccccaaagggaaattggggtttatgtcaaattgatgttttatcaaaataaatctgtttctcaaagcaaaagtctctgtaggattgagataattcattatttacatatagggtaaacagacatttactgcctattgagatcataattgagataatggattatctcaatcctggattctaatttactacaaataatttagcaccattatttaacagagcagtttaaaataataatctttcctt

SEQ ID NO: 276759 - DNA, 552 bp, Homo sapiens
taagccaacagaaatagcaaagcaaatgacccaagcttcaactatcaactatttaaaagtgaagatcttttgaaggagtaattatattcttttatcatcaagaaaggtatggaggttacattaactgttatagttgcggagctgagtttttatgtcagatgctttcaatcttctgaagatctcattgagaaccagtcattctaatcattgttttcacacactatggaaatcattagaataaaaatgttgaagattgatttaaaatgaaagtttccaagttttgttatataatatttagcattttaagttggctgctgcttcctggaactaaactacttggactaggaagacctactttgctgacattgtcacaactaactgagcgactaaggccagttttacccaaggttagaggtggaggtggttttaaagttgtgaggaccttgccattattattaccagaaggaagactggatgatattttgggctcttgcttaatggaaatgttttttgtgcttgaaattttgggtggctccacatcctaaaagatga

SEQ ID NO: 276760 - DNA, 354 bp, Homo sapiens
atagtctgaaatatagcctcatgggatgagaggctgtgccccagcccgacacccgtaaagggtctgtgctgaggtggattagtaaaagaggaaagccttgcagttgagatagaggaagggcactgtctcctgcctgcccctgggaactgaatgtctcggtataaaacccgattgtacatttgttcaattctgagataggagaaaaaccaccctatggcgggaggcgagacatgttggcagcaatgctgccttgttatgctttactccacagatgtttgggcggagggaaacataaatctggcctacgtgcacatccaggcatagtacctccctttgaacttaattatgacacag

SEQ ID NO: 276761 - DNA, 766 bp, Homo sapiens
acagctcatagtttcattttcatctcctcacccccttcccaggggagcgctgagcagggagtagcccactgccacccttccagaagcccagctacccagaagctggagaacaagtagacaaggggctgaggctggccaggggaatgccctccagggcatgggctgagaaggccttggcaccagggtgctctgctgttggcattttcctgagtccgtcaggagcatatttgtgctctgtgtgttgtttagagctggctgcatctttaaaattgtaagtgccaacttgtgttttgtgtttcaaagttccagaagcaaaaacaaaaaaagttcgggtacagcggctcacacctgtaatcccagctcttagggagatggaaactggaggatcacttgaggccaggagttcaagaccagcctgggcaacatagcaagacccagtctcttaaaagaaaattaaaaagaaagagtaaataaagttccagaagctttgctctccttatccaagcagcgtttgtactttggcactggaaagtgcgggagtcaggggtttgtgagagcacgtgttggttgtcgcattggtcaggatgcacccatcactctgtatcctccggctaaggagtgctggagagccgtgatgcccactggctgttgtcccgggcttgtcactcaaagacgggacagatgtctccttccagttctggcccagactgtcctctgagctgggagcacagggctcctccctgagtagatgacctgtcaggtcagc

SEQ ID NO: 276762 - DNA, 719 bp, Homo sapiens
cttgcccgtgcgtccgtggcacggaacggccgttagtcccggcagagggctccgcgaagacagtgccgtcgttgggcgcgcgcgcgggcgggagctgtcggggcggggcggcaccgccgagctccgagctgcaggactttgaaatgaccctgtcctcagcctggaggatgcggtattctgattgtctggtgctgtgtcaactgggcctgcctctgggatagtgttgtggctgccccacgagaaccctatatgccagttccagaagcaaaaacaaaaaaagttcgggtacagcggctcacacctgtaatcccagctcttagggagatggaaactggaggatcacttgaggccaggagttcaagaccagcctgggcaacatagcaagacccagtctcttaaaagaaaattaaaaagaaagagtaaataaagttccagaagctttgctctccttatccaagcagcgtttgtactttggcactggaaagtgcgggagtcaggggtttgtgagagcacgtgttggttgtcgcattggtcaggatgcacccatcactctgtatcctccggctaaggagtgctggagagccgtgatgcccactggctgttgtcccgggcttgtcactcaaagacgggacagatgtctccttccagttctggcccagactgtcctctgagctgggagcacagggctcctccctgagtagatgacctgtcaggtcagc

SEQ ID NO: 276763 - DNA, 593 bp, Homo sapiens
cttgcccgtgcgtccgtggcacggaacggccgttagtcccggcagagggctccgcgaagacagtgccgtcgttgggcgcgcgcgcgggcgggagctgtcggggcggggcggcaccgccgagctccgagctttccagaagcaaaaacaaaaaaagttcgggtacagcggctcacacctgtaatcccagctcttagggagatggaaactggaggatcacttgaggccaggagttcaagaccagcctgggcaacatagcaagacccagtctcttaaaagaaaattaaaaagaaagagtaaataaagttccagaagctttgctctccttatccaagcagcgtttgtactttggcactggaaagtgcgggagtcaggggtttgtgagagcacgtgttggttgtcgcattggtcaggatgcacccatcactctgtatcctccggctaaggagtgctggagagccgtgatgcccactggctgttgtcccgggcttgtcactcaaagacgggacagatgtctccttccagttctggcccagactgtcctctgagctgggagcacagggctcctccctgagtagatgacctgtcaggtcagc

SEQ ID NO: 276764 - DNA, 459 bp, Homo sapiens
cttgcccgtgcgtccgtggcacggaacggccgttagtcccggcagagggctccgcgaagacagtgccgtcgttgggcgcgcgcgcgggcgggagctgtcggggcggggcggcaccgccgagctccgagctgcaggactttgaaatgaccctgtcctcagcctggaggatgcggtattctgattgtctggtgctgtgtcaactgggcctgcctctgggatagtgttgtggctgccccacgagaaccctatatgccagttttttaagcaaatacagcaaaagttcgggaatagcggctcacacctgtattcccagctcttacccatattcacagaggaggtgtcgcttagagttgattgagttcatctacgccctggtcagcacaccaaggtccagtccgcagggagggtgccccaaacactgagaaaatacccttccagaagctttgctctccttatcct

SEQ ID NO: 276765 - DNA, 337 bp, Homo sapiens
acaataggtgattcagttaggaaattaatgttagagatcggttttccttgtggaaatcagtggtattcaaatgcctgaattggctacccggttttagagctgctctccatgtatgagcaggacataggattcactctctggaatgcttctgtaggcaggactttgaaatgaccctgtcctcagcctggaggatgcggtattctgattgtctggtgctgtgtcaactgggcctgcctctgggatagtgttgtggctgccccacgagaaccctatatgccaggtgagcttgaagcacctcagagacagagcactgaagctccatgacacagggctattc

SEQ ID NO: 276766 - DNA, 486 bp, Homo sapiens
agggaccggagcaccccaggatcgaagagggcgcacgggcccggccctcccacgcgccctccagggacccggcagccagacagacggacaggcggaccgctagggagctcaagtacccggacacacgcacgagcgcagaacaaagggccggacatgctccagcccgctccgcctgcgcctcggccttgcgcgcgggggcccgggttacctgcgcagagccagctgtgatgtaaagaagtttgtgctgcatgagagagatagcacctgaagaaaatgaggccctggaggatgagagactctaaaggaaaagggaagggcctgctgtcttccagccacgccagcccccaactgagaagctgggtgaagccatcttgcatctttagccccagtcaagttacctcagcaaagactagctgaccctgccaagccctgcccaagttacagaatcatgagcaaataaatggctgtttctgttttaagctttta

SEQ ID NO: 276767 - DNA, 532 bp, Homo sapiens
gcctactgcgactactactactaaattcgcggccggtcgaccgagagagatagcacctgaagaaaatgaggccctggaggatgagagactctaaaggaaaagggaagggcctgctgtcttccagccacgccagcccccaactgagaagctgggctggagtgctgtggcacaaccatagctcactgcagcctccacctccctggttcaagcgatcttcccacctcagcctcccgagtagttgagaccacagtgcccttggtgtggtggaagcaaggtgccatgtgataagtaagcctccagagaggcctgcatggcaggatccaatgtctttagccaacagcatctgggaacctgagacctgccaacacccttgtgagtgagcctggaagtggacctcctgctcttgaaccttgaggtgactatagtgctggctgacaccttgactgcagtccctgagctggggggcccagctgatctactcccagaatcccccctactaaaacagtgatataataaatgcttattgtttcaa

SEQ ID NO: 276768 - DNA, 434 bp, Homo sapiens
gcctactgcgactactactactaaattcgcggccggtcgaccgagagagatagcacctgaagaaaatgaggccctggaggatgagagactctaaaggaaaagggaagggcctgctgtcttccagccacgccagcccccaactgagaagctggtgcccttggtgtggtggaagcaaggtgccatgtgataagtaagcctccagagaggcctgcatggcaggatccaatgtctttagccaacagcatctgggaacctgagacctgccaacacccttgtgagtgagcctggaagtggacctcctgctcttgaaccttgaggtgactatagtgctggctgacaccttgactgcagtccctgagctggggggcccagctgatctactcccagaatcccccctactaaaacagtgatataataaatgcttattgtttcaa

SEQ ID NO: 276769 - DNA, 776 bp, Homo sapiens
gccacgtagctcactcttttcttaggctgtgtagttcactttcccagtgcaaactttgggaaaagctctgtgccacaggctccattcctgtttgccacatcacaaataccaatcattgctctaaggagtggatgatttgatgagaatattcagttcttacaccactactagaggaggaacactgactgccttgtcgtggatgtggtctggcagtttctgtaggtaggagtggtggattgtctccaaatgtggccaccgacagtgcctcccattcctgtgtgtgcatgctgcttctcccactagaaggtgtcttttactttccttctctttgcatctggaacttgttttgaccagttggacctagcagaagtggggccctgtgacttccaggccttatgaaatcttgtagcattgtttttcccttttagagccagctgtgatgtaaagaagtttgtgctgcatgagagagatagcacctgaagaaaatgaggccctggaggatgagagactctaaaggaaaagggaagggcctgctgtcttccagccacgccagcccccaactgagaagctgggtgaagccatcttgcatctttagccccagtcaagttacctcagcaaagactagctgaccctgccaagccctgcccaagttacagaatcatgagcaaataaatggctgtttctgttttaagcttttaaattttgggggtggtttatgtgtcaataataactgaaacagataatatatacagaataaactttagttttaataatct

SEQ ID NO: 276770 - DNA, 498 bp, Homo sapiens
agggaccggagcaccccaggatcgaagagggcgcacgggcccggccctcccacgcgccctccagggacccggcagccagacagacggacaggcggaccgctagggagctcaagtacccggacacacgcacgagcgcagaacaaagggccggacatgctccagcccgctccgcctgcgcctcggccttgcgcgcgggggcccgggttacctgcgcagtgcccttggtgtggtggaagcaaggtgccatgtgataagtaagcctccagagaggcctgcatggcaggatccaatgtctttagccaacagcatctgggaacctgagacctgccaacacccttgtgagtgagcctggaagtggacctcctgctcttgaaccttgaggtgactatagtgctggctgacaccttgactgcagtccctgagctggggggcccagctgatctactcccagaatcccccctactaaaacagtgatataataaatgcttattgtttcaa

SEQ ID NO: 276771 - DNA, 644 bp, Homo sapiens
agggaccggagcaccccaggatcgaagagggcgcacgggcccggccctcccacgcgccctccagggacccggcagccagacagacggacaggcggaccgctagggagctcaagtacccggacacacgcacgagcgcagaacaaagggccggacatgctccagcccgctccgcctgcgcctcggccttgcgcgcgggggcccgggttacctgcgcagtgcccttggtgtggtggaagcaaggtgccatgtgataagtaagcctccagagaggcctgcatggcaggatccaatgtctttagccaacagcatctgggaacctgagacctgccaacacccttgtgagtgagcctggaagtggacctcctgctcttgaaccttgaggtgactatagtgctggctgacaccttgactgcagtccctgagctggggggcccagctgatctactcccagaatcccccctactaaaacagtgatataataaatgcttattgtttcaaaaaaaaaaaaaaaaaaacaaaaaaaaaaaaataaaaacacacaaaataaaacgaaaaacacacaacacaacgggcggggcgcacaaaagaaaccccgggggggccaccgcgcgccccccgcgcgcagagacaaaggcgccccaaga

SEQ ID NO: 276772 - DNA, 557 bp, Homo sapiens
gcctactgcgactactactactaaattcgcggccggtcgaccgagagagatagcacctgaagaaaatgaggccctggaggatgagagactctaaaggaaaagggaagggcctgctgtcttccagccacgccagcccccaactgagaagctgggctggagtgctgtggcacaaccatagctcactgcagcctccacctccctggttcaagcgatcttcccacctcagcctcccgagtagttgagaccacagtgcccttggtgtggtggaagcaaggtgccatgtgataagtaagcctccagagaggcctgcatggcaggatccaatgtctttagccaacagcatctgggaacctgagacctgccaacacccttgtgagtgagcctggaagtggacctcctgctcttgaaccttgaggtgactatagtgctggctgacaccttgactgcagtccctgagctggggggcccagctgatctactcccagaatcccccctactaaaacagtgatataataaatgcttattgtttcaagctggtaacttttggaatgcattca

SEQ ID NO: 276773 - DNA, 422 bp, Homo sapiens
tctccttgagtgtagttggacctagcgacttgcttctaatggatagaatcaagcaaaagtcataggatgtcacttcctggatttggttacaaagactgtaactttctctctttgtctctctctctctctctctcttttagtgcccttggtgtggtggaagcaaggtgccatgtgataagtaagcctccagagaggcctgcatggcaggatccaatgtctttagccaacagcatctgggaacctgagacctgccaacacccttgtgagtgagcctggaagtggacctcctgctcttgaaccttgaggtgactatagtgctggctgacaccttgactgcagtccctgagctggggggcccagctgatctactcccagaatcccccctactaaaacagtgatataataaatgcttattgtttcaa

SEQ ID NO: 276774 - DNA, 642 bp, Homo sapiens
agggaccggagcaccccaggatcgaagagggcgcacgggcccggccctcccacgcgccctccagggacccggcagccagacagacggacaggcggaccgctagggagctcaagtacccggacacacgcacgagcgcagaacaaagggccggacatgctccagcccgctccgcctgcgcctcggccttgcgcgcgggggcccgggttacctgcgcagagccagctgtgatgtaaagaagtttgtgctgcatgagagagatagcacctgaagaaaatgaggccctggaggatgagagactctaaaggaaaagggaagggcctgctgtcttccagccacgccagcccccaactgagaagctggtgcccttggtgtggtggaagcaaggtgccatgtgataagtaagcctccagagaggcctgcatggcaggatccaatgtctttagccaacagcatctgggaacctgagacctgccaacacccttgtgagtgagcctggaagtggacctcctgctcttgaaccttgaggtgactatagtgctggctgacaccttgactgcagtccctgagctggggggcccagctgatctactcccagaatcccccctactaaaacagtgatataataaatgcttattgtttcaa

SEQ ID NO: 276775 - DNA, 564 bp, Homo sapiens
agggaccggagcaccccaggatcgaagagggcgcacgggcccggccctcccacgcgccctccagggacccggcagccagacagacggacaggcggaccgctagggagctcaagtacccggacacacgcacgagcgcagaacaaagggccggacatgctccagcccgctccgcctgcgcctcggccttgcgcgcgggggcccgggttacctgcgcagagccagctgtgatgtaaagaagtttgtgctgcatgagagagatagcacctgaagaaaatgaggccctggaggatgagagactctaaaggaaaagggaagggcctgctgtcttccagccacgccagcccccaactgagaagctgggtgaagccatcttgcatctttagccccagtcaagttacctcagcaaagactagctgaccctgccaagccctgcccaagttacagaatcatgagcaaataaatggctgtttctgttttaagcttttaaattttgggggtggtttatgtgtcaataataactgaaacagataatatatacagaataaactttagttttaataatct

SEQ ID NO: 276776 - DNA, 2845 bp, Homo sapiens
ctttctcctccctcttggggctcaaattgggtgccctggtgaaggaggggggcacactccagaacctagtccaaccccagacgctgcctgaggcttccctccagctcccctcccttccttttctccctttcctccctccctctctttccctttctccctccccgctaaggctggcgtgccagggggtgggacatgccaatcactggctgtgcctctcccgctgccagcacagggcgcagctccccctgggagccaggtgtttgggtccctggagacgccgcaggcccccagggaggcagtggggctgaggaccctacagacccctcttcagccccgtggtgatgactttcccctgaggaagccctgtagcgtgcctggaggaaggggctctccaaccccagccccacctagccaccatgaacacttcagccccacctgctgtcagccccaacatcaccgtcctggcaccaggaaagggtccctggcaagtggccttcattgggatcaccacgggcctcctgtcgctagccacagtgacaggcaacctgctggtactcatctctttcaaggtcaacacggagctcaagacagtcaataactacttcctgctgagcctggcctgtgctgacctcatcatcggtaccttctccatgaacctctataccacgtacctgctcatgggccactgggctctgggcacgctggcttgtgacctctggctggccctggactatgtggccagcaatgcctccgtcatgaatctgctgctcatcagctttgaccgctacttctccgtgactcggcccctgagctaccgtgccaagcgcacaccccgccgggcagctctgatgatcggcctggcctggctggtttcctttgtgctctgggccccagccatcctcttctggcagtacctggtaggggagcggacagtgctagctgggcagtgctacatccagttcctctcccagcccatcatcacctttggcacagccatggctgccttctacctccctgtcacagtcatgtgcacgctctactggcgcatctaccgggagacagagaaccgagcacgggagctggcagcccttcagggctccgagacgccaggcaaagggggtggcagcagcagcagctcagagaggtctcagccaggggctgagggctcaccagagactcctccaggccgctgctgtcgctgctgccgggcccccaggctgctgcaggcctacagctggaaggaagaagaggaagaggacgaaggctccatggagtccctcacatcctcagagggagaggagcctggctccgaagtggtgatcaagatgccaatggtggaccccgaggcacaggcccccaccaagcagcccccacggagctccccaaatacagtcaagaggccgactaagaaagggcgtgatcgagctggcaagggccagaagccccgtggaaaggagcagctggccaagcggaagaccttctcgctggtcaaggagaagaaggcggctcggaccctgagtgccatcctcctggccttcatcctcacctggacaccgtacaacatcatggtgctggtgtccaccttctgcaaggactgtgttcccgagaccctgtgggagctgggctactggctgtgctacgtcaacagcaccatcaaccccatgtgctacgcactctgcaacaaagccttccgggacacctttcgcctgctgctgctttgccgctgggacaagagacgctggcgcaagatccccaagcgccctggctccgtgcaccgcactccctcccgccaatgctgatagtcccctctcctgcatccctccaccccagtccccgggaaaggccggtgggaagagggcaggggctgcatcctcagccccagggccctgctcaggcctcacctggcttcccaggaccctgggtcaccttcctgggcagcccagagagaccctgccaactttccagacttcgctattcccaggcagggagggaaacccggggaactggtttttctgttccctgctgggtgggaatgcgctcttcaccaggaagaaggcccgggaggaggatccgggctttggactccttgtttgcctttaggcaggaagtcaggagccagcagggcgggccaggagaaagaaggcttaacattaagtattccttggcccagcagcggcccagattgcggtgtgagatggtgccccctggggggcacagccagaaactgaactggccgctgggagaaaagccagatgacagggagctggggaatcccctcgcttcataggcagagcccgcccacctgggccctaggcatactctccaggattgtccacaaatgtcctcagagggtccctaggtgggtcaactccaaggcaaatgtccaagcatcagcaagacaatgacactggaagggtccggcttggctagtcacatatcaagtcccgaggcagcaacaggaccaggagccaggtgtcctgactgtcctacaatatcattttcctgggagtgggagtcaagtgtgcctgctatccagccgcaaatccataccccctgccccagagaagcctcagtccctccctcctggctcacagccaccacctggatggatctgctccatgcagatctagccaggcctcccgcatgctgcctgcctccggccctgccccacacaggcctggcccagccagcaggttctctcctgtgagctccccaatccaacccatgcatggcctcccagccacccggatctccaggcccagcctggccccaaatgttctttcctttcatcctcagcaagtgctgagtctgtgaataaagccacataaccagcgggccactaagg

SEQ ID NO: 276777 - DNA, 2070 bp, Homo sapiens
ctttctcctccctcttggggctcaaattgggtgccctggtgaaggaggggggcacactccagaacctagtccaaccccagacgctgcctgaggcttccctccagctcccctcccttccttttctccctttcctccctccctctctttccctttctccctccccgctaaggctggcgtgccagggggtgggacatgccaatcactggctgtgcctctcccgctgccagcacagggcgcagctccccctgggagccaggtgtttgggtccctggagacgccgcaggcccccagggaggcagtggggctgaggaccctacagggctccgagacgccaggcaaagggggtggcagcagcagcagctcagagaggtctcagccaggggctgagggctcaccagagactcctccaggccgctgctgtcgctgctgccgggcccccaggctgctgcaggcctacagctggaaggaagaagaggaagaggacgaaggctccatggagtccctcacatcctcagagggagaggagcctggctccgaagtggtgatcaagatgccaatggtggaccccgaggcacaggcccccaccaagcagcccccacggagctccccaaatacagtcaagaggccgactaagaaagggcgtgatcgagctggcaagggccagaagccccgtggaaaggagcagctggccaagcggaagaccttctcgctggtcaaggagaagaaggcggctcggaccctgagtgccatcctcctggccttcatcctcacctggacaccgtacaacatcatggtgctggtgtccaccttctgcaaggactgtgttcccgagaccctgtgggagctgggctactggctgtgctacgtcaacagcaccatcaaccccatgtgctacgcactctgcaacaaagccttccgggacacctttcgcctgctgctgctttgccgctgggacaagagacgctggcgcaagatccccaagcgccctggctccgtgcaccgcactccctcccgccaatgctgatagtcccctctcctgcatccctccaccccagtccccgggaaaggccggtgggaagagggcaggggctgcatcctcagccccagggccctgctcaggcctcacctggcttcccaggaccctgggtcaccttcctgggcagcccagagagaccctgccaactttccagacttcgctattcccaggcagggagggaaacccggggaactggtttttctgttccctgctgggtgggaatgcgctcttcaccaggaagaaggcccgggaggaggatccgggctttggactccttgtttgcctttaggcaggaagtcaggagccagcagggcgggccaggagaaagaaggcttaacattaagtattccttggcccagcagcggcccagattgcggtgtgagatggtgccccctggggggcacagccagaaactgaactggccgctgggagaaaagccagatgacagggagctggggaatcccctcgcttcataggcagagcccgcccacctgggccctaggcatactctccaggattgtccacaaatgtcctcagagggtccctaggtgggtcaactccaaggcaaatgtccaagcatcagcaagacaatgacactggaagggtccggcttggctagtcacatatcaagtcccgaggcagcaacaggaccaggagccaggtgtcctgactgtcctacaatatcattttcctgggagtgggagtcaagtgtgcctgctatccagccgcaaatccataccccctgccccagagaagcctcagtccctccctcctggctcacagccaccacctggatggatctgctccatgcagatctagccaggcctcccgcatgctgcctgcctccggccctgccccacacaggcctggcccagccagcaggttctctcctgtgagctccccaatccaacccatgcatggcctcccagccacccggatctccaggcccagcctggccccaaatgttctttcctttcatcctcagcaagtgctgagtctgtgaataaagccacataaccagcgggccactaagg

SEQ ID NO: 276778 - DNA, 434 bp, Homo sapiens
gggccagaggtgcgtgtgcaacaaaattatgaagggaaacttctttgtcaatacttcacaaatgttttttgcaaggacatcatctcacgtttttccttccttttgtgtttaatccttatttacctaaacagtattaaaacttccccgtttcaacctttttctgcatatataaccacaaattcctttttctttcctctttgactcgtactctactcacgttattcaaagtggctggtctgcaaactatttttataggtccataaggagataggaagcttactccagaatctgtctgctcaacgcttctttcatcaagaaagtcttccccaaaacatcagctgaactgcagtttgcttagtgatagagctgatttacattctgatgtaagcttcttgttgtggatcagttatagttgtggactggcactggcccat

SEQ ID NO: 276779 - DNA, 4398 bp, Homo sapiens
  misc_feature (7)..(7): n is a, c, g, or t
  misc_feature (10)..(10): n is a, c, g, or t
gcggccncgnggcgcgctcctcgccgggccctgccgccgggctgccatccttgccctgccatgtctcgccggaagcctgcgtcgggcggcctcgctgcctccagctcagcccctgcgaggcaagcggttttgagccgattcttccagtctacgggaagcctgaaatccacctcctcctccacaggtgcagccgaccaggtggaccctggcgctgcagcggccgcagcgcccccagcgcccgccttcccgccccagctgccgccgcacgtagctacagaaattgacagaagaaagaagagaccattggaaaatgatgggcctgttaaaaagaaagtaaagaaagtccaacaaaaggaaggaggaagtgatctgggaatgtctggcaactctgagccaaagaaatgtctgaggaccaggaatgtttcaaagtctctggaaaaattgaaagaattctgctgcgattctgcccttcctcaaagtagagtccagacagaatctctgcaggagagatttgcagttctgccaaaatgtactgattttgatgatatcagtcttctacacgcaaagaatgcagtttcttctgaagattcgaaacgtcaaattaatcaaaaggacacaacactttttgatctcagtcagtttggatcatcaaatacaagtcatgaaaatttacagaaaactgcttccaaatcagctaacaaacggtccaaaagcatctatacgccgctagaattacaatacatagaaatgaagcagcagcacaaagatgcagttttgtgtgtggaatgtggatataagtatagattctttggggaagatgcagagattgcagcccgagagctcaatatttattgccatttagatcacaactttatgacagcaagtatacctactcacagactgtttgttcatgtacgccgcctggtggcaaaaggatataaggtgggagttgtgaagcaaactgaaactgcagcattaaaggccattggagacaacagaagttcactcttttcccggaaattgactgccctttatacaaaatctacacttattggagaagatgtgaatcccctaatcaagctggatgatgctgtaaatgttgatgagataatgactgatacttctaccagctatcttctgtgcatctctgaaaataaggaaaatgttagggacaaaaaaaagggcaacatttttattggcattgtgggagtgcagcctgccacaggcgaggttgtgtttgatagtttccaggactctgcttctcgttcagagctagaaacccggatgtcaagcctgcagccagtagagctgctgcttccttcggccttgtccgagcaaacagaggcgctcatccacagagccacatctgttagtgtgcaggatgacagaattcgagtcgaaaggatggataacatttattttgaatacagccatgctttccaggcagttacagagttttatgcaaaagatacagttgacatcaaaggttctcaaattatttctggcattgttaacttagagaagcctgtgatttgctctttggctgccatcataaaatacctcaaagaattcaacttggaaaagatgctctccaaacctgagaattttaaacagctatcaagtaaaatggaatttatgacaattaatggaacaacattaaggaatctggaaatcctacagaatcagactgatatgaaaaccaaaggaagtttgctgtgggttttagaccacactaaaacttcatttgggagacggaagttaaagaagtgggtgacccagccactccttaaattaagggaaataaatgcccggcttgatgctgtatcggaagttctccattcagaatctagtgtgtttggtcagatagaaaatcatctacgtaaattgcccgacatagagaggggactctgtagcatttatcacaaaaaatgttctacccaagagttcttcttgattgtcaaaactttatatcacctaaagtcagaatttcaagcaataatacctgctgttaattcccacattcagtcagacttgctccggaccgttattttagaaattcctgaactcctcagtccagtggagcattacttaaagatactcaatgaacaagctgccaaagttggggataaaactgaattatttaaagacctttctgacttccctttaataaaaaagaggaaggatgaaattcaaggtgttattgacgagatccgaatgcatttgcaagaaatacgaaaaatactaaaaaatccttctgcacaatatgtgacagtatcaggacaggagtttatgatagaaataaagaactctgctgtatcttgtataccaactgattgggtaaaggttggaagcacaaaagctgtgagccgctttcactctccttttattgtagaaaattacagacatctgaatcagctccgggagcagctagtccttgactgcagtgctgaatggcttgattttctagagaaattcagtgaacattatcactccttgtgtaaagcagtgcatcacctagcaactgttgactgcattttctccctggccaaggtcgctaagcaaggagattactgcagaccaactgtacaagaagaaagaaaaattgtaataaaaaatggaaggcaccctgtgattgatgtgttgctgggagaacaggatcaatatgtcccaaataatacagatttatcagaggactcagagagagtaatgataattaccggaccaaacatgggtggaaagagctcctacataaaacaagttgcattgattaccatcatggctcagattggctcctatgttcctgcagaagaagcgacaattgggattgtggatggcattttcacaaggatgggtgctgcagacaatatatataaaggacggagtacatttatggaagaactgactgacacagcagaaataatcagaaaagcaacatcacagtccttggttatcttggatgaactaggaagagggacgagcactcatgatggaattgccattgcctatgctacacttgagtatttcatcagagatgtgaaatccttaaccctgtttgtcacccattatccgccagtttgtgaactagaaaaaaattactcacaccaggtggggaattaccacatgggattcttggtcagtgaggatgaaagcaaactggatccaggcacagcagaacaagtccctgattttgtcaccttcctttaccaaataactagaggaattgcagcaaggagttatggattaaatgtggctaaactagcagatgttcctggagaaattttgaagaaagcagctcacaagtcaaaagagctggaaggattaataaatacgaaaagaaagagactcaagtattttgcaaagttatggacgatgcataatgcacaagacctgcagaagtggacagaggagttcaacatggaagaaacacagacttctcttcttcattaaaatgaagactacatttgtgaacaaaaaatggagaattaaaaataccaactgtacaaaataactctccagtaacagcctatctttgtgtgacatgtgagcataaaattatgaccatggtatattcctattggaaacagagaggtttttctgaagacagtctttttcaagtttctgtcttcctaacttttctacgtataaacactcttgaatagacttccactttgtaattagaaaattttatggacagtaagtccagtaaagccttaagtggcagaatataattcccaagcttttggagggtgatataaaaatttacttgatatttttatttgtttcagttcagataattggcaactgggtgaatctggcaggaatctatccattgaactaaaataattttattatgcaaccagtttatccaccaagaacataagaattttttataagtagaaagaattggccaggcatggtggctcatgcctgtaatcccagcactttgggaggccaaggtaggcagatcacctgaggtcaggagttcaagaccagcctggccaacatggcaaaaccccatctttactaaaaatataaagtacatctctactaaaaatacgaaaaaattagctgggcatggtggcgcacacctgtagtcccagctactccggaggctgaggcaggagaatctcttgaacctgggaggcggaggttgcaatgagccgagatcacgtcactgcactccagcttgggcaacagagcaagactccatctcaaaaaaaaaaaagaaaaaagaaaagaaatagaattatcaagcttttaaaaactagagcacagaaggaataaggtcatgaaatttaaaaggttaaatattgtcataggattaagcagtttaaagattgttggatgaaattatttgtcattcattcaagtaataaatatttaatgaatacttgctat

SEQ ID NO: 276780 - DNA, 4340 bp, Homo sapiens
  misc_feature (7)..(7): n is a, c, g, or t
  misc_feature (10)..(10): n is a, c, g, or t
gcggccncgnggcgcgctcctcgccgggccctgccgccgggctgccatccttgccctgccatgtctcgccggaagcctgcgtcgggcggcctcgctgcctccagctcagcccctgcgaggcaagcggttttgagccgattcttccagtctacgggaagcctgaaatccacctcctcctccacaggtgcagccgaccaggtggaccctggcgctgcagcggccgcagcgcccccagcgcccgccttcccgccccagctgccgccgcacgtagctacagaaattgacagaagaaagaagagaccattggaaaatgatgggcctgttaaaaagaaagtaaagaaagtccaacaaaaggaaggaggaagtgatctgggaatgtctggcaactctgagccaaagaaatgtctgaggaccaggaatgtttcaaagtctctggaaaaattgaaagaattctgctgcgattctgcccttcctcaaagtagagtccagacagaatctctgcaggagagatttgcagttctgccaaaatgtactgattttgatgatatcagtcttctacacgcaaagaatgcagtttcttctgaagattcgaaacgtcaaattaatcaaaaggacacaacactttttgatctcagtcagtttggatcatcaaatacaagtcatgaaaatttacagaaaactgcttccaaatcagctaacaaacggtccaaaagcatctatacgccgctagaattacaatacatagaaatgaagcagcagcacaaagatgcagttttgtgtgtggaatgtggatataagtatagattctttggggaagatgcagagattgcagcccgagagctcaatatttattgccatttagatcacaactttatgacagcaagtatacctactcacagactgtttgttcatgtacgccgcctggtggcaaaaggatataaggtgggagttgtgaagcaaactgaaactgcagcattaaaggccattggagacaacagaagttcactcttttcccggaaattgactgccctttatacaaaatctacacttattggagaagatgtgaatcccctaatcaagctggatgatgctgtaaatgttgatgagataatgactgatacttctaccagctatcttctgtgcatctctgaaaataaggaaaatgttagggacaaaaaaaagggcaacatttttattggcattgtgggagtgcagcctgccacaggcgaggttgtgtttgatagtttccaggactctgcttctcgttcagagctagaaacccggatgtcaagcctgcagccagtagagctgctgcttccttcggccttgtccgagcaaacagaggcgctcatccacagagccacatctgttagtgtgcaggatgacagaattcgagtcgaaaggatggataacatttattttgaatacagccatgctttccaggcagttacagagttttatgcaaaagatacagttgacatcaaaggttctcaaattatttctggcattgttaacttagagaagcctgtgatttgctctttggctgccatcataaaatacctcaaagaattcaacttggaaaagatgctctccaaacctgagaattttaaacagctatcaagtaaaatggaatttatgacaattaatggaacaacattaaggaatctggaaatcctacagaatcagactgatatgaaaaccaaaggaagtttgctgtgggttttagaccacactaaaacttcatttgggagacggaagttaaagaagtgggtgacccagccactccttaaattaagggaaataaatgcccggcttgatgctgtatcggaagttctccattcagaatctagtgtgtttggtcagatagaaaatcatctacgtaaattgcccgacatagagaggggactctgtagcatttatcacaaaaaatgttctacccaagagttcttcttgattgtcaaaactttatatcacctaaagtcagaatttcaagcaataatacctgctgttaattcccacattcagtcagacttgctccggaccgttattttagaaattcctgaactcctcagtccagtggagcattacttaaagatactcaatgaacaagctgccaaaggaaggatgaaattcaaggtgttattgacgagatccgaatgcatttgcaagaaatacgaaaaatactaaaaaatccttctgcacaatatgtgacagtatcaggacaggagtttatgatagaaataaagaactctgctgtatcttgtataccaactgattgggtaaaggttggaagcacaaaagctgtgagccgctttcactctccttttattgtagaaaattacagacatctgaatcagctccgggagcagctagtccttgactgcagtgctgaatggcttgattttctagagaaattcagtgaacattatcactccttgtgtaaagcagtgcatcacctagcaactgttgactgcattttctccctggccaaggtcgctaagcaaggagattactgcagaccaactgtacaagaagaaagaaaaattgtaataaaaaatggaaggcaccctgtgattgatgtgttgctgggagaacaggatcaatatgtcccaaataatacagatttatcagaggactcagagagagtaatgataattaccggaccaaacatgggtggaaagagctcctacataaaacaagttgcattgattaccatcatggctcagattggctcctatgttcctgcagaagaagcgacaattgggattgtggatggcattttcacaaggatgggtgctgcagacaatatatataaaggacggagtacatttatggaagaactgactgacacagcagaaataatcagaaaagcaacatcacagtccttggttatcttggatgaactaggaagagggacgagcactcatgatggaattgccattgcctatgctacacttgagtatttcatcagagatgtgaaatccttaaccctgtttgtcacccattatccgccagtttgtgaactagaaaaaaattactcacaccaggtggggaattaccacatgggattcttggtcagtgaggatgaaagcaaactggatccaggcacagcagaacaagtccctgattttgtcaccttcctttaccaaataactagaggaattgcagcaaggagttatggattaaatgtggctaaactagcagatgttcctggagaaattttgaagaaagcagctcacaagtcaaaagagctggaaggattaataaatacgaaaagaaagagactcaagtattttgcaaagttatggacgatgcataatgcacaagacctgcagaagtggacagaggagttcaacatggaagaaacacagacttctcttcttcattaaaatgaagactacatttgtgaacaaaaaatggagaattaaaaataccaactgtacaaaataactctccagtaacagcctatctttgtgtgacatgtgagcataaaattatgaccatggtatattcctattggaaacagagaggtttttctgaagacagtctttttcaagtttctgtcttcctaacttttctacgtataaacactcttgaatagacttccactttgtaattagaaaattttatggacagtaagtccagtaaagccttaagtggcagaatataattcccaagcttttggagggtgatataaaaatttacttgatatttttatttgtttcagttcagataattggcaactgggtgaatctggcaggaatctatccattgaactaaaataattttattatgcaaccagtttatccaccaagaacataagaattttttataagtagaaagaattggccaggcatggtggctcatgcctgtaatcccagcactttgggaggccaaggtaggcagatcacctgaggtcaggagttcaagaccagcctggccaacatggcaaaaccccatctttactaaaaatataaagtacatctctactaaaaatacgaaaaaattagctgggcatggtggcgcacacctgtagtcccagctactccggaggctgaggcaggagaatctcttgaacctgggaggcggaggttgcaatgagccgagatcacgtcactgcactccagcttgggcaacagagcaagactccatctcaaaaaaaaaaaagaaaaaagaaaagaaatagaattatcaagcttttaaaaactagagcacagaaggaataaggtcatgaaatttaaaaggttaaatattgtcataggattaagcagtttaaagattgttggatgaaattatttgtcattcattcaagtaataaatatttaatgaatacttgctat

SEQ ID NO: 276781 - DNA, 3268 bp, Homo sapiens
cagttacagagttttatgcaaaagatacagttgacatcaaaggttctcaaattatttctggcattgttaacttagagaagcctgtgatttgctctttggctgccatcataaaatacctcaaagaattcaacttggaatagatgctctccaaacctgacaattttaaacagctatcaagtaaaactggaatttatgacagttaatggaacaacattaaggaatctggaaatcctacagaatcagtgtgcaggatgacagaattcgagtcgaaaggatggataacatttattttgaatacagccatgctttccaggcagttacagagttttatgcaaaagatacagttgacatcaaaggttctcaaattatttctggcattgttaacttagagaagcctgtgatttgctctttggctgccatcataaaatacctcaaagaattcaacttggaaaagatgctctccaaacctgagaattttaaacagctatcaagtaaaatggaatttatgacaattaatggaacaacattaaggaatctggaaatcctacagaatcagactgatatgaaaaccaaaggaagtttgctgtgggttttagaccacactaaaacttcatttgggagacggaagttaaagaagtgggtgacccagccactccttaaattaagggaaataaatgcccggcttgatgctgtatcggaagttctccattcagaatctagtgtgtttggtcagatagaaaatcatctacgtaaattgcccgacatagagaggggactctgtagcatttatcacaaaaaatgttctacccaagagttcttcttgattgtcaaaactttatatcacctaaagtcagaatttcaagcaataatacctgctgttaattcccacattcagtcagacttgctccggaccgttattttagaaattcctgaactcctcagtccagtggagcattacttaaagatactcaatgaacaagctgccaaagttggggataaaactgaattatttaaagacctttctgacttccctttaataaaaaagaggaaggatgaaattcaaggtgttattgacgagatccgaatgcatttgcaagaaatacgaaaaatactaaaaaatccttctgcacaatatgtgacagtatcaggacaggagtttatgatagaaataaagaactctgctgtatcttgtataccaactgattgggtaaaggttggaagcacaaaagctgtgagccgctttcactctccttttattgtagaaaattacagacatctgaatcagctccgggagcagctagtccttgactgcagtgctgaatggcttgattttctagagaaattcagtgaacattatcactccttgtgtaaagcagtgcatcacctagcaactgttgactgcattttctccctggccaaggtcgctaagcaaggagattactgcagaccaactgtacaagaagaaagaaaaattgtaataaaaaatggaaggcaccctgtgattgatgtgttgctgggagaacaggatcaatatgtcccaaataatacagatttatcagaggactcagagagagtaatgataattaccggaccaaacatgggtggaaagagctcctacataaaacaagttgcattgattaccatcatggctcagattggctcctatgttcctgcagaagaagcgacaattgggattgtggatggcattttcacaaggatgggtgctgcagacaatatatataaaggacggagtacatttatggaagaactgactgacacagcagaaataatcagaaaagcaacatcacagtccttggttatcttggatgaactaggaagagggacgagcactcatgatggaattgccattgcctatgctacacttgagtatttcatcagagatgtgaaatccttaaccctgtttgtcacccattatccgccagtttgtgaactagaaaaaaattactcacaccaggtggggaattaccacatgggattcttggtcagtgaggatgaaagcaaactggatccaggcacagcagaacaagtccctgattttgtcaccttcctttaccaaataactagaggaattgcagcaaggagttatggattaaatgtggctaaactagcagatgttcctggagaaattttgaagaaagcagctcacaagtcaaaagagctggaaggattaataaatacgaaaagaaagagactcaagtattttgcaaagttatggacgatgcataatgcacaagacctgcagaagtggacagaggagttcaacatggaagaaacacagacttctcttcttcattaaaatgaagactacatttgtgaacaaaaaatggagaattaaaaataccaactgtacaaaataactctccagtaacagcctatctttgtgtgacatgtgagcataaaattatgaccatggtatattcctattggaaacagagaggtttttctgaagacagtctttttcaagtttctgtcttcctaacttttctacgtataaacactcttgaatagacttccactttgtaattagaaaattttatggacagtaagtccagtaaagccttaagtggcagaatataattcccaagcttttggagggtgatataaaaatttacttgatatttttatttgtttcagttcagataattggcaactgggtgaatctggcaggaatctatccattgaactaaaataattttattatgcaaccagtttatccaccaagaacataagaattttttataagtagaaagaattggccaggcatggtggctcatgcctgtaatcccagcactttgggaggccaaggtaggcagatcacctgaggtcaggagttcaagaccagcctggccaacatggcaaaaccccatctttactaaaaatataaagtacatctctactaaaaatacgaaaaaattagctgggcatggtggcgcacacctgtagtcccagctactccggaggctgaggcaggagaatctcttgaacctgggaggcggaggttgcaatgagccgagatcacgtcactgcactccagcttgggcaacagagcaagactccatctcaaaaaaaaaaaagaaaaaagaaaagaaatagaattatcaagcttttaaaaactagagcacagaaggaataaggtcatgaaatttaaaaggttaaatattgtcataggattaagcagtttaaagattgttggatgaaattatttgtcattcattcaagtaataaatatttaatgaatacttgctat

SEQ ID NO: 276782 - DNA, 1760 bp, Homo sapiens
tatacggctaggtacgaggctgggtgtgcgccaaatatacagatttatcagaggactcagagagagtaatgataattaccggaccaaacatgggtggaaagagctcctacataaaacaagttgcattgattaccatcatggctcagattggctcctatgttcctgcagaagaagcgacaattgggattgtggatggcattttcacaaggatgggtgctgcagacaatatatataaaggacggagtacatttatggaagaactgactgacacagcagaaataatcagaaaagcaacatcacagtccttggttatcttggatgaactaggaagagggacgagcactcatgatggaattgccattgcctatgctacacttgagtatttcatcagagatgtgaaatccttaaccctgtttgtcacccattatccgccagtttgtgaactagaaaaaaattactcacaccaggtggggaattaccacatgggattcttggtcagtgaggatgaaagcaaactggatccaggcacagcagaacaagtccctgattttgtcaccttcctttaccaaataactagaggaattgcagcaaggagttatggattaaatgtggctaaactagcagatgttcctggagaaattttgaagaaagcagctcacaagtcaaaagagctggaaggattaataaatacgaaaagaaagagactcaagtattttgcaaagttatggacgatgcataatgcacaagacctgcagaagtggacagaggagttcaacatggaagaaacacagacttctcttcttcattaaaatgaagactacatttgtgaacaaaaaatggagaattaaaaataccaactgtacaaaataactctccagtaacagcctatctttgtgtgacatgtgagcataaaattatgaccatggtatattcctattggaaacagagaggtttttctgaagacagtctttttcaagtttctgtcttcctaacttttctacgtataaacactcttgaatagacttccactttgtaattagaaaattttatggacagtaagtccagtaaagccttaagtggcagaatataattcccaagcttttggagggtgatataaaaatttacttgatatttttatttgtttcagttcagataattggcaactgggtgaatctggcaggaatctatccattgaactaaaataattttattatgcaaccagtttatccaccaagaacataagaattttttataagtagaaagaattggccaggcatggtggctcatgcctgtaatcccagcactttgggaggccaaggtaggcagatcacctgaggtcaggagttcaagaccagcctggccaacatggcaaaaccccatctttactaaaaatataaagtacatctctactaaaaatacgaaaaaattagctgggcatggtggcgcacacctgtagtcccagctactccggaggctgaggcaggagaatctcttgaacctgggaggcggaggttgcaatgagccgagatcacgtcactgcactccagcttgggcaacagagcaagactccatctcaaaaaaaaaaaagaaaaaagaaaagaaatagaattatcaagcttttaaaaactagagcacagaaggaataaggtcatgaaatttaaaaggttaaatattgtcataggattaagcagtttaaagattgttggatgaaattatttgtcattcattcaagtaataaatatttaatgaatacttgctat

SEQ ID NO: 276783 - DNA, 499 bp, Homo sapiens
ctccaggtacaaataagcacacaccaccagcctctagcagagtttgaaggaggaggaggtcaggttctcccctctggggctggcaggggtaaggattttaggagaaggcacaaaggtaatagtggcaattggtaacctgggtcccttgattatagtagcagctctgaaagctcctttcactggaagggtgacactgacacagcttcctaactatagagcctgcccggtattcaagtgttatagacttttcatagcttctgatgagacgtattgtctcccagcaatttcatttattaaataagtagtatttgatttttccccagaaagagactcaagtattttgcaaagttatggacgatgcataatgcacaagacctgcagaagtggacagaggagttcaacatggaagaaacacagacttctcttcttcattaaaatgaagactacatttgtgaacaaaaaatggagaattaaaaataccaactgtacaaaataactc

SEQ ID NO: 276784 - DNA, 4399 bp, Homo sapiens
  misc_feature (7)..(7): n is a, c, g, or t
  misc_feature (10)..(10): n is a, c, g, or t
gcggccncgnggcgcgctcctcgccgggccctgccgccgggctgccatccttgccctgccatgtctcgccggaagcctgcgtcgggcggcctcgctgcctccagctcagcccctgcgaggcaagcggttttgagccgattcttccagtctacgggaagcctgaaatccacctcctcctccacaggtgcagccgaccaggtggaccctggcgctgcagcggccgcagcgcccccagcgcccgccttcccgccccagctgccgccgcacgtagctacagaaattgacagaagaaagaagagaccattggaaaatgatgggcctgttaaaaagaaagtaaagaaagtccaacaaaaggaaggaggaagtgatctgggaatgtctggcaactctgagccaaagaaatgtctgaggaccaggaatgtttcaaagtctctggaaaaattgaaagaattctgctgcgattctgcccttcctcaaagtagagtccagacagaatctctgcaggagagatttgcagttctgccaaaatgtactgattttgatgatatcagtcttctacacgcaaagaatgcagtttcttctgaagattcgaaacgtcaaattaatcaaaaggacacaacactttttgatctcagtcagtttggatcatcaaatacaagtcatgaaaatttacagaaaactgcttccaaatcagctaacaaacggtccaaaagcatctatacgccgctagaattacaatacatagaaatgaagcagcagcacaaagatgcagttttgtgtgtggaatgtggatataagtatagattctttggggaagatgcagagattgcagcccgagagctcaatatttattgccatttagatcacaactttatgacagcaagtatacctactcacagactgtttgttcatgtacgccgcctggtggcaaaaggatataaggtgggagttgtgaagcaaactgaaactgcagcattaaaggccattggagacaacagaagttcactcttttcccggaaattgactgccctttatacaaaatctacacttattggagaagatgtgaatcccctaatcaagctggatgatgctgtaaatgttgatgagataatgactgatacttctaccagctatcttctgtgcatctctgaaaataaggaaaatgttagggacaaaaaaaagggcaacatttttattggcattgtgggagtgcagcctgccacaggcgaggttgtgtttgatagtttccaggactctgcttctcgttcagagctagaaacccggatgtcaagcctgcagccagtagagctgctgcttccttcggccttgtccgagcaaacagaggcgctcatccacagagccacatctgttagtgtgcaggatgacagaattcgagtcgaaaggatggataacatttattttgaatacagccatgctttccaggcagttacagagttttatgcaaaagatacagttgacatcaaaggttctcaaattatttctggcattgttaacttagagaagcctgtgatttgctctttggctgccatcataaaatacctcaaagaattcaacttggaaaagatgctctccaaacctgagaattttaaacagctatcaagtaaaatggaatttatgacaattaatggaacaacattaaggaatctggaaatcctacagaatcagactgatatgaaaaccaaaggaagtttgctgtgggttttagaccacactaaaacttcatttgggagacggaagttaaagaagtgggtgacccagccactccttaaattaagggaaataaatgcccggcttgatgctgtatcggaagttctccattcagaatctagtgtgtttggtcagatagaaaatcatctacgtaaattgcccgacatagagaggggactctgtagcatttatcacaaaaaatgttctacccaagagttcttcttgattgtcaaaactttatatcacctaaagtcagaatttcaagcaataatacctgctgttaattcccacattcagtcagacttgctccggaccgttattttagaaattcctgaactcctcagtccagtggagcattacttaaagatactcaatgaacaagctgccaaagttggggataaaactgaattatttaaagacctttctgacttccctttaataaaaaagaggaaggatgaaattcaaggtgttattgacgagatccgaatgcatttgcaagaaatacgaaaaatactaaaaaatccttctgcacaatatgtgacagtatcaggacaggagtttatgatagaaataaagaactctgctgtatcttgtataccaactgattgggtaaaggttggaagcacaaaagctgtgagccgctttcactctccttttattgtagaaaattacagacatctgaatcagctccgggagcagctagtccttgactgcagtgctgaatggcttgattttctagagaaattcagtgaacattatcactccttgtgtaaagcagtgcatcacctagcaactgttgactgcattttctccctggccaaggtcgctaagcaaggagattactgcagaccaactgtacaagaagaaagaaaaattgtaataaaaaatggaaggcaccctgtgattgatgtgttgctgggagaacaggatcaatatgtcccaaataatacagatttatcagaggactcagagagagtaatgataattaccggaccaaacatgggtggaaagagctcctacataaaacaagttgcattgattaccatcatggctcagattggctcctatgttcctgcagaagaagcgacaattgggattgtggatggcattttcacaaggatgggtgctgcagacaatatatataaaggacggagtacatttatggaagaactgactgacacagcagaaataatcagaaaagcaacatcacagtccttggttatcttggatgaactaggaagagggacgagcactcatgatggaattgccattgcctatgctacacttgagtatttcatcagagatgtgaaatccttaaccctgtttgtcacccattatccgccagtttgtgaactagaaaaaaattactcacaccaggtggggaattaccacatgggattcttggtcagtgaggatgaaagcaaactggatccaggcacagcagaacaagtccctgattttgtcaccttcctttaccaaataactagaggaattgcagcaaggagttatggattaaatgtggctaaactagcagatgttcctggagaaattttgaagaaagcagctcacaagtcaaaagagctggaaggattaataaatacgaaaagaaagagactcaagtattttgcaaagttatggacgatgcataatgcacaagacctgcagaagtggacagaggagttcaacatggaagaaacacagacttctcttcttcattaaaatgaagactacatttgtgaacaaaaaatggagaattaaaaataccaactgtacaaaataactctccagtaacagcctatctttgtgtgacatgtgagcataaaattatgaccatggtatattcctattggaaacagagaggtttttctgaagacagtctttttcaagtttctgtcttcctaacttttctacgtataaacactcttgaatagacttccactttgtaattagaaaattttatggacagtaagtccagtaaagccttaagtggcagaatataattcccaagcttttggagggtgatataaaaatttacttgatatttttatttgtttcagttcagataattggcaactgggtgaatctggcaggaatctatccattgaactaaaataattttattatgcaaccagtttatccaccaagaacataagaattttttataagtagaaagaattggccaggcatggtggctcatgcctgtaatcccagcactttgggaggccaaggtaggcagatcacctgaggtcaggagttcaagaccagcctggccaacatggcaaaaccccatctttactaaaaatataaagtacatctctactaaaaatacgaaaaaattagctgggcatggtggcgcacacctgtagtcccagctactccggaggctgaggcaggagaatctcttgaacctgggaggcggaggttgcaatgagccgagatcacgtcactgcactccagcttgggcaacagagcaagactccatctcaaaaaaaaaaaagaaaaaagaaaagaaatagaattatcaagcttttaaaaactagagcacagaaggaataaggtcatgaaatttaaaaggttaaatattgtcataggattaaatatttattacttgaatgaatgacaaataatttcatccaacaatctttaaactgcttaatcctagtcgacgcgg

SEQ ID NO: 276785 - DNA, 4431 bp, Homo sapiens
  misc_feature (7)..(7): n is a, c, g, or t
  misc_feature (10)..(10): n is a, c, g, or t
gcggccncgnggcgcgctcctcgccgggccctgccgccgggctgccatccttgccctgccatgtctcgccggaagcctgcgtcgggcggcctcgctgcctccagctcagcccctgcgaggcaagcggttttgagccgattcttccagtctacgggaagcctgaaatccacctcctcctccacaggtgcagccgaccaggtggaccctggcgctgcagcggccgcagcgccgcagcggccgcagcgcccgcaggcccccagcgccccagcgcccgccttcccgccccagctgccgccgcacgtagctacagaaattgacagaagaaagaagagaccattggaaaatgatgggcctgttaaaaagaaagtaaagaaagtccaacaaaaggaaggaggaagtgatctgggaatgtctggcaactctgagccaaagaaatgtctgaggaccaggaatgtttcaaagtctctggaaaaattgaaagaattctgctgcgattctgcccttcctcaaagtagagtccagacagaatctctgcaggagagatttgcagttctgccaaaatgtactgattttgatgatatcagtcttctacacgcaaagaatgcagtttcttctgaagattcgaaacgtcaaattaatcaaaaggacacaacactttttgatctcagtcagtttggatcatcaaatacaagtcatgaaaatttacagaaaactgcttccaaatcagctaacaaacggtccaaaagcatctatacgccgctagaattacaatacatagaaatgaagcagcagcacaaagatgcagttttgtgtgtggaatgtggatataagtatagattctttggggaagatgcagagattgcagcccgagagctcaatatttattgccatttagatcacaactttatgacagcaagtatacctactcacagactgtttgttcatgtacgccgcctggtggcaaaaggatataaggtgggagttgtgaagcaaactgaaactgcagcattaaaggccattggagacaacagaagttcactcttttcccggaaattgactgccctttatacaaaatctacacttattggagaagatgtgaatcccctaatcaagctggatgatgctgtaaatgttgatgagataatgactgatacttctaccagctatcttctgtgcatctctgaaaataaggaaaatgttagggacaaaaaaaagggcaacatttttattggcattgtgggagtgcagcctgccacaggcgaggttgtgtttgatagtttccaggactctgcttctcgttcagagctagaaacccggatgtcaagcctgcagccagtagagctgctgcttccttcggccttgtccgagcaaacagaggcgctcatccacagagccacatctgttagtgtgcaggatgacagaattcgagtcgaaaggatggataacatttattttgaatacagccatgctttccaggcagttacagagttttatgcaaaagatacagttgacatcaaaggttctcaaattatttctggcattgttaacttagagaagcctgtgatttgctctttggctgccatcataaaatacctcaaagaattcaacttggaaaagatgctctccaaacctgagaattttaaacagctatcaagtaaaatggaatttatgacaattaatggaacaacattaaggaatctggaaatcctacagaatcagactgatatgaaaaccaaaggaagtttgctgtgggttttagaccacactaaaacttcatttgggagacggaagttaaagaagtgggtgacccagccactccttaaattaagggaaataaatgcccggcttgatgctgtatcggaagttctccattcagaatctagtgtgtttggtcagatagaaaatcatctacgtaaattgcccgacatagagaggggactctgtagcatttatcacaaaaaatgttctacccaagagttcttcttgattgtcaaaactttatatcacctaaagtcagaatttcaagcaataatacctgctgttaattcccacattcagtcagacttgctccggaccgttattttagaaattcctgaactcctcagtccagtggagcattacttaaagatactcaatgaacaagctgccaaagttggggataaaactgaattatttaaagacctttctgacttccctttaataaaaaagaggaaggatgaaattcaaggtgttattgacgagatccgaatgcatttgcaagaaatacgaaaaatactaaaaaatccttctgcacaatatgtgacagtatcaggacaggagtttatgatagaaataaagaactctgctgtatcttgtataccaactgattgggtaaaggttggaagcacaaaagctgtgagccgctttcactctccttttattgtagaaaattacagacatctgaatcagctccgggagcagctagtccttgactgcagtgctgaatggcttgattttctagagaaattcagtgaacattatcactccttgtgtaaagcagtgcatcacctagcaactgttgactgcattttctccctggccaaggtcgctaagcaaggagattactgcagaccaactgtacaagaagaaagaaaaattgtaataaaaaatggaaggcaccctgtgattgatgtgttgctgggagaacaggatcaatatgtcccaaataatacagatttatcagaggactcagagagagtaatgataattaccggaccaaacatgggtggaaagagctcctacataaaacaagttgcattgattaccatcatggctcagattggctcctatgttcctgcagaagaagcgacaattgggattgtggatggcattttcacaaggatgggtgctgcagacaatatatataaaggacggagtacatttatggaagaactgactgacacagcagaaataatcagaaaagcaacatcacagtccttggttatcttggatgaactaggaagagggacgagcactcatgatggaattgccattgcctatgctacacttgagtatttcatcagagatgtgaaatccttaaccctgtttgtcacccattatccgccagtttgtgaactagaaaaaaattactcacaccaggtggggaattaccacatgggattcttggtcagtgaggatgaaagcaaactggatccaggcacagcagaacaagtccctgattttgtcaccttcctttaccaaataactagaggaattgcagcaaggagttatggattaaatgtggctaaactagcagatgttcctggagaaattttgaagaaagcagctcacaagtcaaaagagctggaaggattaataaatacgaaaagaaagagactcaagtattttgcaaagttatggacgatgcataatgcacaagacctgcagaagtggacagaggagttcaacatggaagaaacacagacttctcttcttcattaaaatgaagactacatttgtgaacaaaaaatggagaattaaaaataccaactgtacaaaataactctccagtaacagcctatctttgtgtgacatgtgagcataaaattatgaccatggtatattcctattggaaacagagaggtttttctgaagacagtctttttcaagtttctgtcttcctaacttttctacgtataaacactcttgaatagacttccactttgtaattagaaaattttatggacagtaagtccagtaaagccttaagtggcagaatataattcccaagcttttggagggtgatataaaaatttacttgatatttttatttgtttcagttcagataattggcaactgggtgaatctggcaggaatctatccattgaactaaaataattttattatgcaaccagtttatccaccaagaacataagaattttttataagtagaaagaattggccaggcatggtggctcatgcctgtaatcccagcactttgggaggccaaggtaggcagatcacctgaggtcaggagttcaagaccagcctggccaacatggcaaaaccccatctttactaaaaatataaagtacatctctactaaaaatacgaaaaaattagctgggcatggtggcgcacacctgtagtcccagctactccggaggctgaggcaggagaatctcttgaacctgggaggcggaggttgcaatgagccgagatcacgtcactgcactccagcttgggcaacagagcaagactccatctcaaaaaaaaaaaagaaaaaagaaaagaaatagaattatcaagcttttaaaaactagagcacagaaggaataaggtcatgaaatttaaaaggttaaatattgtcataggattaagcagtttaaagattgttggatgaaattatttgtcattcattcaagtaataaatatttaatgaatacttgctat

SEQ ID NO: 276786 - DNA, 3158 bp, Homo sapiens
ggcattgaatacagcagaaataacactgacaaaagttcccatcctcatggatcctagtgagcagagccatttcacaccaggtgatcggggaaagtttcactgagatgatgacttgaatggagacctgaggaagtgtgcaggatgacagaattcgagtcgaaaggatggataacatttattttgaatacagccatgctttccaggcagttacagagttttatgcaaaagatacagttgacatcaaaggttctcaaattatttctggcattgttaacttagagaagcctgtgatttgctctttggctgccatcataaaatacctcaaagaattcaacttggaaaagatgctctccaaacctgagaattttaaacagctatcaagtaaaatggaatttatgacaattaatggaacaacattaaggaatctggaaatcctacagaatcagactgatatgaaaaccaaaggaagtttgctgtgggttttagaccacactaaaacttcatttgggagacggaagttaaagaagtgggtgacccagccactccttaaattaagggaaataaatgcccggcttgatgctgtatcggaagttctccattcagaatctagtgtgtttggtcagatagaaaatcatctacgtaaattgcccgacatagagaggggactctgtagcatttatcacaaaaaatgttctacccaagagttcttcttgattgtcaaaactttatatcacctaaagtcagaatttcaagcaataatacctgctgttaattcccacattcagtcagacttgctccggaccgttattttagaaattcctgaactcctcagtccagtggagcattacttaaagatactcaatgaacaagctgccaaagttggggataaaactgaattatttaaagacctttctgacttccctttaataaaaaagaggaaggatgaaattcaaggtgttattgacgagatccgaatgcatttgcaagaaatacgaaaaatactaaaaaatccttctgcacaatatgtgacagtatcaggacaggagtttatgatagaaataaagaactctgctgtatcttgtataccaactgattgggtaaaggttggaagcacaaaagctgtgagccgctttcactctccttttattgtagaaaattacagacatctgaatcagctccgggagcagctagtccttgactgcagtgctgaatggcttgattttctagagaaattcagtgaacattatcactccttgtgtaaagcagtgcatcacctagcaactgttgactgcattttctccctggccaaggtcgctaagcaaggagattactgcagaccaactgtacaagaagaaagaaaaattgtaataaaaaatggaaggcaccctgtgattgatgtgttgctgggagaacaggatcaatatgtcccaaataatacagatttatcagaggactcagagagagtaatgataattaccggaccaaacatgggtggaaagagctcctacataaaacaagttgcattgattaccatcatggctcagattggctcctatgttcctgcagaagaagcgacaattgggattgtggatggcattttcacaaggatgggtgctgcagacaatatatataaaggacggagtacatttatggaagaactgactgacacagcagaaataatcagaaaagcaacatcacagtccttggttatcttggatgaactaggaagagggacgagcactcatgatggaattgccattgcctatgctacacttgagtatttcatcagagatgtgaaatccttaaccctgtttgtcacccattatccgccagtttgtgaactagaaaaaaattactcacaccaggtggggaattaccacatgggattcttggtcagtgaggatgaaagcaaactggatccaggcacagcagaacaagtccctgattttgtcaccttcctttaccaaataactagaggaattgcagcaaggagttatggattaaatgtggctaaactagcagatgttcctggagaaattttgaagaaagcagctcacaagtcaaaagagctggaaggattaataaatacgaaaagaaagagactcaagtattttgcaaagttatggacgatgcataatgcacaagacctgcagaagtggacagaggagttcaacatggaagaaacacagacttctcttcttcattaaaatgaagactacatttgtgaacaaaaaatggagaattaaaaataccaactgtacaaaataactctccagtaacagcctatctttgtgtgacatgtgagcataaaattatgaccatggtatattcctattggaaacagagaggtttttctgaagacagtctttttcaagtttctgtcttcctaacttttctacgtataaacactcttgaatagacttccactttgtaattagaaaattttatggacagtaagtccagtaaagccttaagtggcagaatataattcccaagcttttggagggtgatataaaaatttacttgatatttttatttgtttcagttcagataattggcaactgggtgaatctggcaggaatctatccattgaactaaaataattttattatgcaaccagtttatccaccaagaacataagaattttttataagtagaaagaattggccaggcatggtggctcatgcctgtaatcccagcactttgggaggccaaggtaggcagatcacctgaggtcaggagttcaagaccagcctggccaacatggcaaaaccccatctttactaaaaatataaagtacatctctactaaaaatacgaaaaaattagctgggcatggtggcgcacacctgtagtcccagctactccggaggctgaggcaggagaatctcttgaacctgggaggcggaggttgcaatgagccgagatcacgtcactgcactccagcttgggcaacagagcaagactccatctcaaaaaaaaaaaagaaaaaagaaaagaaatagaattatcaagcttttaaaaactagagcacagaaggaataaggtcatgaaatttaaaaggttaaatattgtcataggattaagcagtttaaagattgttggatgaaattatttgtcattcattcaagtaataaatatttaatgaatacttgctat

SEQ ID NO: 276787 - DNA, 2206 bp, Homo sapiens
gccatatccgtggtccacgttattcgggacatcacagtgcttttggctgcccgtattcagacatgaacttgaaaaaggaggcaacacttcacgatcgtttgagagaacaaacacaggcaaatttggaatcagactcttcacattcaaaatcaaaaagcctctgtagtttgaacttcaatggaaaacatgaaaaggtgaacagtcagcccagacttgtacagcaggcaaagtgtttgaaaatcaaaggaaaagaagatattgacttggataatctcttcagagaatactcggtggagcaggcgcagcaggtgcttcaccagtcagtgtccatgtccacggtgtcagcccacccttttcgggaccttcccctcggcagggagcaacactgcaagttgcttccaggcgtggctgacatccgggccagccaagtggcacgttggactgtggatgaggtggctgagtttgtacagtctcttctgggctgtgaagagcatgccaagtgctttaagaaagagcagatcgatggcaaagccttcctgcttctgacacagacggacattgtcaaagtgatgaagatcaaactgggcccagcactgaagatttacaactctatcctgatgttcaggcattcccaggaactccctgaagaagatattgcctcaggccaagaagtcaggggatgaatgggctccctgaacttcctctggcaccaagacctgcgctctttcagcaataaaagtggagcacattaatttgatgtgaatgtccccatggccgtatccacattgaatctggactttttaaagtgtctgtgatttgtttacatgtttagaggattttgatgactggtccagtgccaatgactcagaggcttaggcccatctgtgggtttggtttacgaacattgttatctttggtgggatccgctcagctctgatttgtttgcaagacagaccaaagaagcccacatatccacctttattcttctccatcaccagaaaagaaaccattttccatcttacaagcataacactctcaagtggtgaaatattagaaaagcagtgttcatgaatacatcgttaatgtttttaccagagcaacatcgagcttggctcagatctgccatggagcacagctagtctaagagctagaggcctggtgctttcaaaagacttcatgtgagatttttgtgtactttactcaggaaagtgtgaatctctaaaaaataataataataagcacatgttttcatgattcattaattctcctttttgttccattaaccatttcttggttgtgctcccaagctttcctggagcctccacaaaggagagtagccaggagtaatgagaggacggtcaggtgggcacttccaaaagctggagagacccttctgaggaccctccaccatcagcggggcctcaggggaccctgtcctaacactggtgtggctgctgggccagacgctcacctgcacagaactcctccctgctcccactctgaagggcgtttcagaattgactcatttccactgcagtctgccagaacccctgtaataaggagctgtgttatattacatctggggctgtgtgcatctttacaaatggagacacactattcaaagggaagatctctaaagtagggagcgtggtacttattctttgtttgaaacattccgatttgttgtcaggccttatttgttttttgtaagtgattgtatcggaggcttaagttgtgtggaatcagtcccacagtgttgaaagacaagtacctcttttctgacacttcttactacttttacaggtagtaacagctacaaatactctcccagaagtggagggacaccatttgtgggtggggagaaagagggagaggttctatgtccacttgcttcattaagaatgttaaggtttaagaaagttgattctgcttggagaatttctcaagctttacatttttttttcactgaagaaaataaacaaactctaagaggtgtgcatatataacatttctttagatctttacctaaaaggaattttaatatattattggttgatgtaaattttgtttctgtggagttttgtttgttttgctttttgtagactgccatgtgcaagtaaaattcctgcttctgccatgttaaaattttaatatattttaaatgataataaacagagaaaacaaaatttatacctcactaccttaa

SEQ ID NO: 276788 - DNA, 945 bp, Homo sapiens
  misc_feature (92)..(92): n is a, c, g, or t
cagaagctttctagcaacatgcgtctggtgcgcggttgcagtaagtaagtgatcttggtcatagctgaatctaaggatatcctggtcttgancagtgcttggattctcaccatataaatgacgtccgtcaggtaccgagctgtctgaactatacagatggagtctgtagtcatgacgtgtatctcatcagcgaagagtccactcataacctcgagatcatgttatacctccgccccctgtaaagggaattccattctatactgtaaaatccaaaaatgctagttgccctcagcttttgagttgacttccagaaagttgagatcttttgaccattttttctcatgtcatataaaatgtgccacatggtagttgtcaagctgtggtagtcatgtacacttttttcttttttttaactttctaaaaggaaaagttcaaagtcctttccacagttagtcttcgcttcttttggatttttctttttagagctaaattattcataccaatgaataagtgagtctgttctaagatataggggccattatctatttttgcttaatggactcatgtggcattgttcactatcatgcctttccatacttgtaatatttctgagtcacttattaatgtgaccaacagataaactgttcaagctaatacagcatttcctaacttcatagttgtcgcagatgtttgttctagtagcgattatttaataaacatacattgtactgaatcttactagcaactaactattttcaggtaatctcagtctgcttattcactttttccatttgatttgctaatgccacaatcatttttctagaaaatagtaggataatgtattttttcctgtctgctataatggagactatatttctgcattcattacctctcataggtgaaaatattaaattaaataatattgttttgaataagaaaaaaaaa

SEQ ID NO: 276789 - DNA, 286 bp, Homo sapiens
atccatttacagcatggtttactgaatattttgagtagatgctcaatgcagaagcactatggttacgtttgtcagtacgccagtttgcatgaattcaaaatgaatctgaaaagctttccccctcccacttttctttcagtttgtatacaagaacactttacctgagatataggccaaaagtgaaggtaagtccacttcctaggtcctgtgtgtgtgttgggggtatggtactgggagtataggatggaggtggaagaagaaaggggagtttggagaggtagtggag

SEQ ID NO: 276790 - DNA, 5779 bp, Homo sapiens
  misc_feature (1852)..(1852): n is a, c, g, or t
ggccgggccgggggcgcgagcgagcgcgcgggcctgggccggagccggcctggtcgccagcctaacccggcacagtgagcggagcgcctgggcggcggcggcggcggcgtgatggctccggccgcggaccgagagggctactggggccccacgacctccacgctggactggtgcgaggagaactactccgtgacctggtacatcgccgagttctggaatacagtgagtaacctgatcatgattatacctccaatgttcggtgcaattcagagtgttagagacggtctggaaaaacggtacattgcttcttatttagcactcacagtggtaggaatgggatcctggtgcttccacatgactctgaaatatgaaatgcagctattggatgaactcccaatgatatacagctgttgcatatttgtgtactgcatgtttgaatgtttcaagatcaagaactcagtaaactaccatctgctttttaccttagttctattcagtttaatagtaaccacagtttaccttaaggtaaaagagccaatattccatcaggtcatgtatggaatgttggtctttacattagtacttcgatctatttatattgttacatgggtttatccatggcttagaggactgggttatacatcattgggtatatttttattgggatttttattttggaatatagataacatattttgtgagtcactgaggaactttcgaaagaaggtaccacctatcataggtattaccacacaatttcatgcatggtggcatattttaactggccttggttcctatcttcacatccttttcagtttgtatacaagaacactttacctgagatataggccaaaagtgaagtttctctttggaatctggccagtgatcctgtttgagcctctcaggaagcattgatgaatcattccaccaagaaaacaaacaagcacctaccatagacctggcagaataaataaggaaatccttaaagatctacaagttcaaatatgtcatgaccatcacagcagaggagtgactttctgactaatgctgccacccacacagagaataaggagtagggcctgctgggtgtttagctcatggctttatcttatttgtccccctcctcctttcacgctccagtttataaagaaacagagatgatgtgtgtgtatgcctcaaatgcagaaacagttgggcttttcttaacaggttaacagtttgtgctggttataagaaattaaccttcttttctttttgccaagggttgcatgtgaattatacctttcttaatatttgattaaataatgcagtcagctaagagccaacaaaaccccatatccagatagttagctgtgagccagcactcagctgtgtcagatttgattaatattgtattaatctcatggatggttctcaaaggtaaaaaaagagagagaaagagagagagctagctgtgggattctgtgtagttcttcactatctgttccagggctagtcggaggatcataagcaagctcagacctgcccccagttcagtacttgaccacatcccaggatttatggtgtctgtctatggccacagccaaccagaatgagtgggtcatcttataacctttctgaagctccatgaggacatgtatagaatgctgcaccttcagccagctctgctctgatctttgcagatctttaagttgtcactgtttctacggctagacaaatatgactggtggtctagactacccatagttcatcctcctcacataacttatttgaagttgtcagggaatgtcattacactctgatttttaaaattatgcagtattttccagttctcagagaggtcatggttgtncccagggaagtgtgttgcattaactaaagctaaaattatcagaatcctatttacataaagcatattaaaatatctgctccttaattttctgaaggaaatagatgtaagtttctgctacttgaaacctacagaaccgacaaaaattagggtgctaaaaaaatgacagtgaaatctcatcgtaaggcagctagttctaatttgcatttgaatgtataacaaattgcatcacttttcacaaacttaacacctgcctggagtaaaaatctgatttgacccctctgctcatgtttcatcatatttgtagctctgcatcatttagcatttttatgactttttttgctttatataaattattgtaaaatccagattgtttttaccacatgatgacgtgactcaggattaaatcctgagctacagtttcaaaaggaaaatcatttttttcttatgcaaagatggtaaaacactgttgtcattttttccagtattcaataagtagcctttgtacaaatttaaaaccaaaaactattctgttgtttttcttcacctactagccttagtttttaaccaagtatccaaggatgtcaacttgacatccttcccttagcatgccaacaagccattagactgattcttccacctacttttatgaacctccaggaagaaaaacacttgccaaaacattaagagaactttgattctgccttaagagggtataaaactaaaccatttgaaggcacagcccataagactatacttgattttgccccaagattctgacttctggctacatttcacctgcagttacctgggctatcggccgtgatacattttttaattcatttgttttccaccattatatttttatacttttcagttagatatacttctgcataaagagtatatatacagtgtaggataaaggcatatcgtacatggcaatgctgttaaacatggtaagactgaggttctgcaggattaaagtcagattaagggtacagaaagcacaccttgatactgaggccatttagagcaatttgtttaatgagtggttcagccatcaccaccagtggccacctgttcaataaaattgcctagcaccacagtggagagtcatctacaccccaaggtgagctgtaagactggccaattctttgaagacctttttttctgttgggagaatggaaagcagaaagggaagccaggctctttaatgttccaagtcagctgtgcctcacacaaggctctctttttagctactaagtaacatactcaagactttgtatctgtgcagcattttatggaaatcactggtgacctataggatattactaaattatttcaatagctttatttttttcctacttggattctaggtggacattacagagttgaattcctcactaccccctcccgctgtcatttgttttattggaaaacttcatgttaactagagtgtacaaaaagtctgtttcctgctgagccaatagtgatttgtttgcatatcacctaatgtgaaaagtgctcatctgtgaactctatagcaaattatattttagaaaatactttgtgaggccgggcatggtggcagagcgagactccgtctcaaaaaaaaaggaaaagaaaagaaaatataaggatgtaaaagaagcaatttgcttgcacatctgaatatccttcttgtgtctccattttcactcttgaaaactgaaagcaatttgacttttatttttgtttttctaaagaacagctaggtgaaaggaggttaagctgattgtcactctgcctgcccactacctactccccaccatggtgtttcatgaaacatccccaccacctgaagtgatctttttaatccttgtgatagtaaatgcattgataattaacaggaaaaacatgtttttaaataatctacaaatgagaacccaaatagtagtgttttgtttgacagaagtaaatcaaatattatggtttaaatataatgcaaaatttcaggacagttaatttgggcttcccttaccctaagagggtttttcttataataaggagaagaggtgtggttcaaagaaaattaagagacaaaaccttcaggtacataatgcatgaaaatctttaaatgcctgcaaaaattaagttctgttataataccagccaattctgaattagccaatgccctaaaagcatctaacaatttaaggttatcttatgagtcctatgaaaacaattatttgttgctaaatttgagttttagctaccaacgccatgtttacgtgacaagaaattgttttggccctgtggtttatgacgtgctgctggataagcatttatgtaaaactgagtatttcaaagagaaccatttacaattggaatttccacctgtgtggctgtttgcagacctacctctgtcttccattttgcatcctgtcagtgctataattagtttgatcactttgtcttgtttttcagtgtctacaattatagcttattcactatgttctaactatttaaaaataatgggccgggcgcggtggctcatgcctgtagtcccagcactttgggaggccgaggtgagcagatcacaaggtcaggagatcgagaccatcctggctaacacagtgaaaccccgtctctactggaaatacagaaaaattagtcgggcatggtgctgggactacaggcacatgccaccatgccaccatgcctggctgatttttgtatttttagtagagctgggttggccaggctggtcttgaactcctgacctcaagtgattcacctgccttggcctcccaaagtcctggaattacaggcgtgagctaccgtgcccagctggtttttacattttaaaaacgtttagagaaagaagaatatgcaacagaaactgtatgtagcctgcaaagcctaaaatgtttactctctggcttgggagtttgtctcccctgctctagactgtcagcaagtggtacagtggtacagtacagtggtactgcccaactgcacttctctgcaaggtgattctagtgtgcacttgtcagaatgaaaatatgttattcatttaagacatctcatgtctttgaatgtaatcacatgatttgtatttaatatttacatgacctaattattttttcacgtcagtttttctagattggcaatagcctgttgcaaagtgcctaaacctttgagaaaaattactatgagcaaggtccatgatttagttttcaatataaagggaattccattctatactgtaaaatccaaaaatgctagttgccctcagcttttgagttgacttccagaaagttgagatcttttgaccattttttctcatgtcatataaaatgtgccacatggtagttgtcaagctgtggtagtcatgtacacttttttcttttttttaactttctaaaaggaaaagttcaaagtcctttccacagttagtcttcgcttcttttggatttttctttttagagctaaattattcataccaatgaataagtgagtctgttctaagatataggggccattatctatttttgcttaatggactcatgtggcattgttcactatcatgcctttccatacttgtaatatttctgagtcacttattaatgtgaccaacagataaactgttcaagctaatacagcatttcctaacttcatagttgtcgcagatgtttgttctagtagcgattatttaataaacatacattgtactgaatcttactagcaactaactattttcaggtaatctcagtctgcttattcactttttccatttgatttgctaatgccacaatcatttttctagaaaatagtaggataatgtattttttcctgtctgctataatggagactatatttctgcattcattacctctcataggtgaaaatattaaattaaataatattgttttgaataagaaaaaaaaa

SEQ ID NO: 276791 - DNA, 4853 bp, Homo sapiens
  misc_feature (2045)..(2045): n is a, c, g, or t
ggccgggccgggggcgcgagcgagcgcgcgggcctgggccggagccggcctggtcgccagcctaacccggcacagtgagcggagcgcctgggcggcggcggcggcggcgtgatggctccggccgcggaccgagagggctactggggccccacgacctccacgctggactggtgcgaggagaactactccgtgacctggtacatcgccgagttctggaatacagtgagtaacctgatcatgattatacctccaatgttcggtgcaattcagagtgttagagacggtctggaaaaacggtacattgcttcttatttagcactcacagatggagtctcactctgtcgccgaggctgaagtgcagtggcacaatctcggctcactgcaacctccatttcccgggtttacgcgatccttctgcctcagcctcccaagtagctgggactacagtggtaggaatgggatcctggtgcttccacatgactctgaaatatgaaatgcagctattggatgaactcccaatgatatacagctgttgcatatttgtgtactgcatgtttgaatgtttcaagatcaagaactcagtaaactaccatctgctttttaccttagttctattcagtttaatagtaaccacagtttaccttaaggtaaaagagccaatattccatcaggagtctcactctgtcaccccggctgaagtgcaatggcacaatctcggctcattggaacctccacctcccaggtcatgtatggaatgttggtctttacattagtacttcgatctatttatattgttacatgggtttatccatggcttagaggactgggttatacatcattgggtatatttttattgggatttttattttggaatatagataacatattttgtgagtcactgaggaactttcgaaagaaggtaccacctatcataggtattaccacacaatttcatgcatggtggcatattttaactggccttggttcctatcttcacatccttttcagtttgtatacaagaacactttacctgagatataggccaaaagtgaagtttctctttggaatctggccagtgatcctgtttgagcctctcaggaagcattgatgaatcattccaccaagaaaacaaacaagcacctaccatagacctggcagaataaataaggaaatccttaaagatctacaagttcaaatatgtcatgaccatcacagcagaggagtgactttctgactaatgctgccacccacacagagaataaggagtagggcctgctgggtgtttagctcatggctttatcttatttgtccccctcctcctttcacgctccagtttataaagaaacagagatgatgtgtgtgtatgcctcaaatgcagaaacagttgggcttttcttaacaggttaacagtttgtgctggttataagaaattaaccttcttttctttttgccaagggttgcatgtgaattatacctttcttaatatttgattaaataatgcagtcagctaagagccaacaaaaccccatatccagatagttagctgtgagccagcactcagctgtgtcagatttgattaatattgtattaatctcatggatggttctcaaaggtaaaaaaagagagagaaagagagagagctagctgtgggattctgtgtagttcttcactatctgttccagggctagtcggaggatcataagcaagctcagacctgcccccagttcagtacttgaccacatcccaggatttatggtgtctgtctatggccacagccaaccagaatgagtgggtcatcttataacctttctgaagctccatgaggacatgtatagaatgctgcaccttcagccagctctgctctgatctttgcagatctttaagttgtcactgtttctacggctagacaaatatgactggtggtctagactacccatagttcatcctcctcacataacttatttgaagttgtcagggaatgtcattacactctgatttttaaaattatgcagtattttccagttctcagagaggtcatggttgtncccagggaagtgtgttgcattaactaaagctaaaattatcagaatcctatttacataaagcatattaaaatatctgctccttaattttctgaaggaaatagatgtaagtttctgctacttgaaacctacagaaccgacaaaaattagggtgctaaaaaaatgacagtgaaatctcatcgtaaggcagctagttctaatttgcatttgaatgtataacaaattgcatcacttttcacaaacttaacacctgcctggagtaaaaatctgatttgacccctctgctcatgtttcatcatatttgtagctctgcatcatttagcatttttatgactttttttgctttatataaattattgtaaaatccagattgtttttaccacatgatgacgtgactcaggattaaatcctgagctacagtttcaaaaggaaaatcatttttttcttatgcaaagatggtaaaacactgttgtcattttttccagtattcaataagtagcctttgtacaaatttaaaaccaaaaactattctgttgtttttcttcacctactagccttagtttttaaccaagtatccaaggatgtcaacttgacatccttcccttagcatgccaacaagccattagactgattcttccacctacttttatgaacctccaggaagaaaaacacttgccaaaacattaagagaactttgattctgccttaagagggtataaaactaaaccatttgaaggcacagcccataagactatacttgattttgccccaagattctgacttctggctacatttcacctgcagttacctgggctatcggccgtgatacattttttaattcatttgttttccaccattatatttttatacttttcagttagatatacttctgcataaagagtatatatacagtgtaggataaaggcatatcgtacatggcaatgctgttaaacatggtaagactgaggttctgcaggattaaagtcagattaagggtacagaaagcacaccttgatactgaggccatttagagcaatttgtttaatgagtggttcagccatcaccaccagtggccacctgttcaataaaattgcctagcaccacagtggagagtcatctacaccccaaggtgagctgtaagactggccaattctttgaagacctttttttctgttgggagaatggaaagcagaaagggaagccaggctctttaatgttccaagtcagctgtgcctcacacaaggctctctttttagctactaagtaacatactcaagactttgtatctgtgcagcattttatggaaatcactggtgacctataggatattactaaattatttcaatagctttatttttttcctacttggattctaggtggacattacagagttgaattcctcactaccccctcccgctgtcatttgttttattggaaaacttcatgttaactagagtgtacaaaaagtctgtttcctgctgagccaatagtgatttgtttgcatatcacctaatgtgaaaagtgctcatctgtgaactctatagcaaattatattttagaaaatactttgtgaggccgggcatggtggcagagcgagactccgtctcaaaaaaaaaggaaaagaaaagaaaatataaggatgtaaaagaagcaatttgcttgcacatctgaatatccttcttgtgtctccattttcactcttgaaaactgaaagcaatttgacttttatttttgtttttctaaagaacagctaggtgaaaggaggttaagctgattgtcactctgcctgcccactacctactccccaccatggtgtttcatgaaacatccccaccacctgaagtgatctttttaatccttgtgatagtaaatgcattgataattaacaggaaaaacatgtttttaaataatctacaaatgagaacccaaatagtagtgttttgtttgacagaagtaaatcaaatattatggtttaaatataatgcaaaatttcaggacagttaatttgggcttcccttaccctaagagggtttttcttataataaggagaagaggtgtggttcaaagaaaattaagagacaaaaccttcaggtacataatgcatgaaaatctttaaatgcctgcaaaaattaagttctgttataataccagccaattctgaattagccaatgccctaaaagcatctaacaatttaaggttatcttatgagtcctatgaaaacaattatttgttgctaaatttgagttttagctaccaacgccatgtttacgtgacaagaaattgttttggccctgtggtttatgacgtgctgctggataagcatttatgtaaaactgagtatttcaaagagaaccatttacaattggaatttccacctgtgtggctgtttgcagacctacctctgtcttccattttgcatcctgtcagtgctataattagtttgatcactttgtcttgtttttcagtgtctacaattatagcttattcactatgttctaactatttaaaaataatgggccgggcgcggtggctcatgcctgtagtcccagcactttgggaggccgaggtgagcagatcacaaggtcaggagatcgagaccatcctggctaacacagtgaaaccccgtctctactggaaatacagaaaaattagtcgggcatggtggcgggcgcctgtggtcccagctactcgggaggctgaggcaggagaatggcgtgaacctgggaggcagagcttgcagtggagccaagattgtgccactgcactccagcctgggcaacagagcgagactctgtctcaaaaaaaaaaaa

SEQ ID NO: 276792 - DNA, 5816 bp, Homo sapiens
  misc_feature (1889)..(1889): n is a, c, g, or t
ggccgggccgggggcgcgagcgagcgcgcgggcctgggccggagccggcctggtcgccagcctaacccggcacagtgagcggagcgcctgggcggcggcggcggcggcgtgatggctccggccgcggaccgagagggctactggggccccacgacctccacgctggactggtgcgaggagaactactccgtgacctggtacatcgccgagttctgttccttcctaccatcctccctgaagagcaacctcaaggaatacagtgagtaacctgatcatgattatacctccaatgttcggtgcaattcagagtgttagagacggtctggaaaaacggtacattgcttcttatttagcactcacagtggtaggaatgggatcctggtgcttccacatgactctgaaatatgaaatgcagctattggatgaactcccaatgatatacagctgttgcatatttgtgtactgcatgtttgaatgtttcaagatcaagaactcagtaaactaccatctgctttttaccttagttctattcagtttaatagtaaccacagtttaccttaaggtaaaagagccaatattccatcaggtcatgtatggaatgttggtctttacattagtacttcgatctatttatattgttacatgggtttatccatggcttagaggactgggttatacatcattgggtatatttttattgggatttttattttggaatatagataacatattttgtgagtcactgaggaactttcgaaagaaggtaccacctatcataggtattaccacacaatttcatgcatggtggcatattttaactggccttggttcctatcttcacatccttttcagtttgtatacaagaacactttacctgagatataggccaaaagtgaagtttctctttggaatctggccagtgatcctgtttgagcctctcaggaagcattgatgaatcattccaccaagaaaacaaacaagcacctaccatagacctggcagaataaataaggaaatccttaaagatctacaagttcaaatatgtcatgaccatcacagcagaggagtgactttctgactaatgctgccacccacacagagaataaggagtagggcctgctgggtgtttagctcatggctttatcttatttgtccccctcctcctttcacgctccagtttataaagaaacagagatgatgtgtgtgtatgcctcaaatgcagaaacagttgggcttttcttaacaggttaacagtttgtgctggttataagaaattaaccttcttttctttttgccaagggttgcatgtgaattatacctttcttaatatttgattaaataatgcagtcagctaagagccaacaaaaccccatatccagatagttagctgtgagccagcactcagctgtgtcagatttgattaatattgtattaatctcatggatggttctcaaaggtaaaaaaagagagagaaagagagagagctagctgtgggattctgtgtagttcttcactatctgttccagggctagtcggaggatcataagcaagctcagacctgcccccagttcagtacttgaccacatcccaggatttatggtgtctgtctatggccacagccaaccagaatgagtgggtcatcttataacctttctgaagctccatgaggacatgtatagaatgctgcaccttcagccagctctgctctgatctttgcagatctttaagttgtcactgtttctacggctagacaaatatgactggtggtctagactacccatagttcatcctcctcacataacttatttgaagttgtcagggaatgtcattacactctgatttttaaaattatgcagtattttccagttctcagagaggtcatggttgtncccagggaagtgtgttgcattaactaaagctaaaattatcagaatcctatttacataaagcatattaaaatatctgctccttaattttctgaaggaaatagatgtaagtttctgctacttgaaacctacagaaccgacaaaaattagggtgctaaaaaaatgacagtgaaatctcatcgtaaggcagctagttctaatttgcatttgaatgtataacaaattgcatcacttttcacaaacttaacacctgcctggagtaaaaatctgatttgacccctctgctcatgtttcatcatatttgtagctctgcatcatttagcatttttatgactttttttgctttatataaattattgtaaaatccagattgtttttaccacatgatgacgtgactcaggattaaatcctgagctacagtttcaaaaggaaaatcatttttttcttatgcaaagatggtaaaacactgttgtcattttttccagtattcaataagtagcctttgtacaaatttaaaaccaaaaactattctgttgtttttcttcacctactagccttagtttttaaccaagtatccaaggatgtcaacttgacatccttcccttagcatgccaacaagccattagactgattcttccacctacttttatgaacctccaggaagaaaaacacttgccaaaacattaagagaactttgattctgccttaagagggtataaaactaaaccatttgaaggcacagcccataagactatacttgattttgccccaagattctgacttctggctacatttcacctgcagttacctgggctatcggccgtgatacattttttaattcatttgttttccaccattatatttttatacttttcagttagatatacttctgcataaagagtatatatacagtgtaggataaaggcatatcgtacatggcaatgctgttaaacatggtaagactgaggttctgcaggattaaagtcagattaagggtacagaaagcacaccttgatactgaggccatttagagcaatttgtttaatgagtggttcagccatcaccaccagtggccacctgttcaataaaattgcctagcaccacagtggagagtcatctacaccccaaggtgagctgtaagactggccaattctttgaagacctttttttctgttgggagaatggaaagcagaaagggaagccaggctctttaatgttccaagtcagctgtgcctcacacaaggctctctttttagctactaagtaacatactcaagactttgtatctgtgcagcattttatggaaatcactggtgacctataggatattactaaattatttcaatagctttatttttttcctacttggattctaggtggacattacagagttgaattcctcactaccccctcccgctgtcatttgttttattggaaaacttcatgttaactagagtgtacaaaaagtctgtttcctgctgagccaatagtgatttgtttgcatatcacctaatgtgaaaagtgctcatctgtgaactctatagcaaattatattttagaaaatactttgtgaggccgggcatggtggcagagcgagactccgtctcaaaaaaaaaggaaaagaaaagaaaatataaggatgtaaaagaagcaatttgcttgcacatctgaatatccttcttgtgtctccattttcactcttgaaaactgaaagcaatttgacttttatttttgtttttctaaagaacagctaggtgaaaggaggttaagctgattgtcactctgcctgcccactacctactccccaccatggtgtttcatgaaacatccccaccacctgaagtgatctttttaatccttgtgatagtaaatgcattgataattaacaggaaaaacatgtttttaaataatctacaaatgagaacccaaatagtagtgttttgtttgacagaagtaaatcaaatattatggtttaaatataatgcaaaatttcaggacagttaatttgggcttcccttaccctaagagggtttttcttataataaggagaagaggtgtggttcaaagaaaattaagagacaaaaccttcaggtacataatgcatgaaaatctttaaatgcctgcaaaaattaagttctgttataataccagccaattctgaattagccaatgccctaaaagcatctaacaatttaaggttatcttatgagtcctatgaaaacaattatttgttgctaaatttgagttttagctaccaacgccatgtttacgtgacaagaaattgttttggccctgtggtttatgacgtgctgctggataagcatttatgtaaaactgagtatttcaaagagaaccatttacaattggaatttccacctgtgtggctgtttgcagacctacctctgtcttccattttgcatcctgtcagtgctataattagtttgatcactttgtcttgtttttcagtgtctacaattatagcttattcactatgttctaactatttaaaaataatgggccgggcgcggtggctcatgcctgtagtcccagcactttgggaggccgaggtgagcagatcacaaggtcaggagatcgagaccatcctggctaacacagtgaaaccccgtctctactggaaatacagaaaaattagtcgggcatggtgctgggactacaggcacatgccaccatgccaccatgcctggctgatttttgtatttttagtagagctgggttggccaggctggtcttgaactcctgacctcaagtgattcacctgccttggcctcccaaagtcctggaattacaggcgtgagctaccgtgcccagctggtttttacattttaaaaacgtttagagaaagaagaatatgcaacagaaactgtatgtagcctgcaaagcctaaaatgtttactctctggcttgggagtttgtctcccctgctctagactgtcagcaagtggtacagtggtacagtacagtggtactgcccaactgcacttctctgcaaggtgattctagtgtgcacttgtcagaatgaaaatatgttattcatttaagacatctcatgtctttgaatgtaatcacatgatttgtatttaatatttacatgacctaattattttttcacgtcagtttttctagattggcaatagcctgttgcaaagtgcctaaacctttgagaaaaattactatgagcaaggtccatgatttagttttcaatataaagggaattccattctatactgtaaaatccaaaaatgctagttgccctcagcttttgagttgacttccagaaagttgagatcttttgaccattttttctcatgtcatataaaatgtgccacatggtagttgtcaagctgtggtagtcatgtacacttttttcttttttttaactttctaaaaggaaaagttcaaagtcctttccacagttagtcttcgcttcttttggatttttctttttagagctaaattattcataccaatgaataagtgagtctgttctaagatataggggccattatctatttttgcttaatggactcatgtggcattgttcactatcatgcctttccatacttgtaatatttctgagtcacttattaatgtgaccaacagataaactgttcaagctaatacagcatttcctaacttcatagttgtcgcagatgtttgttctagtagcgattatttaataaacatacattgtactgaatcttactagcaactaactattttcaggtaatctcagtctgcttattcactttttccatttgatttgctaatgccacaatcatttttctagaaaatagtaggataatgtattttttcctgtctgctataatggagactatatttctgcattcattacctctcataggtgaaaatattaaattaaataatattgttttgaataagaaaaaaaaa

SEQ ID NO: 276793 - DNA, 5627 bp, Homo sapiens
  misc_feature (1700)..(1700): n is a, c, g, or t
tgtactcagagcagattatttactggctgggggtctgagctaaggattcaaaacaatacaaaatgaggttgcgatgaaagggaactaagacatcatctaacctactgggtttcaaacttttatgaccttaacccacattaaacggtacattgcttcttatttagcactcacagtggtaggaatgggatcctggtgcttccacatgactctgaaatatgaaatgcagctattggatgaactcccaatgatatacagctgttgcatatttgtgtactgcatgtttgaatgtttcaagatcaagaactcagtaaactaccatctgctttttaccttagttctattcagtttaatagtaaccacagtttaccttaaggtaaaagagccaatattccatcaggtcatgtatggaatgttggtctttacattagtacttcgatctatttatattgttacatgggtttatccatggcttagaggactgggttatacatcattgggtatatttttattgggatttttattttggaatatagataacatattttgtgagtcactgaggaactttcgaaagaaggtaccacctatcataggtattaccacacaatttcatgcatggtggcatattttaactggccttggttcctatcttcacatccttttcagtttgtatacaagaacactttacctgagatataggccaaaagtgaagtttctctttggaatctggccagtgatcctgtttgagcctctcaggaagcattgatgaatcattccaccaagaaaacaaacaagcacctaccatagacctggcagaataaataaggaaatccttaaagatctacaagttcaaatatgtcatgaccatcacagcagaggagtgactttctgactaatgctgccacccacacagagaataaggagtagggcctgctgggtgtttagctcatggctttatcttatttgtccccctcctcctttcacgctccagtttataaagaaacagagatgatgtgtgtgtatgcctcaaatgcagaaacagttgggcttttcttaacaggttaacagtttgtgctggttataagaaattaaccttcttttctttttgccaagggttgcatgtgaattatacctttcttaatatttgattaaataatgcagtcagctaagagccaacaaaaccccatatccagatagttagctgtgagccagcactcagctgtgtcagatttgattaatattgtattaatctcatggatggttctcaaaggtaaaaaaagagagagaaagagagagagctagctgtgggattctgtgtagttcttcactatctgttccagggctagtcggaggatcataagcaagctcagacctgcccccagttcagtacttgaccacatcccaggatttatggtgtctgtctatggccacagccaaccagaatgagtgggtcatcttataacctttctgaagctccatgaggacatgtatagaatgctgcaccttcagccagctctgctctgatctttgcagatctttaagttgtcactgtttctacggctagacaaatatgactggtggtctagactacccatagttcatcctcctcacataacttatttgaagttgtcagggaatgtcattacactctgatttttaaaattatgcagtattttccagttctcagagaggtcatggttgtncccagggaagtgtgttgcattaactaaagctaaaattatcagaatcctatttacataaagcatattaaaatatctgctccttaattttctgaaggaaatagatgtaagtttctgctacttgaaacctacagaaccgacaaaaattagggtgctaaaaaaatgacagtgaaatctcatcgtaaggcagctagttctaatttgcatttgaatgtataacaaattgcatcacttttcacaaacttaacacctgcctggagtaaaaatctgatttgacccctctgctcatgtttcatcatatttgtagctctgcatcatttagcatttttatgactttttttgctttatataaattattgtaaaatccagattgtttttaccacatgatgacgtgactcaggattaaatcctgagctacagtttcaaaaggaaaatcatttttttcttatgcaaagatggtaaaacactgttgtcattttttccagtattcaataagtagcctttgtacaaatttaaaaccaaaaactattctgttgtttttcttcacctactagccttagtttttaaccaagtatccaaggatgtcaacttgacatccttcccttagcatgccaacaagccattagactgattcttccacctacttttatgaacctccaggaagaaaaacacttgccaaaacattaagagaactttgattctgccttaagagggtataaaactaaaccatttgaaggcacagcccataagactatacttgattttgccccaagattctgacttctggctacatttcacctgcagttacctgggctatcggccgtgatacattttttaattcatttgttttccaccattatatttttatacttttcagttagatatacttctgcataaagagtatatatacagtgtaggataaaggcatatcgtacatggcaatgctgttaaacatggtaagactgaggttctgcaggattaaagtcagattaagggtacagaaagcacaccttgatactgaggccatttagagcaatttgtttaatgagtggttcagccatcaccaccagtggccacctgttcaataaaattgcctagcaccacagtggagagtcatctacaccccaaggtgagctgtaagactggccaattctttgaagacctttttttctgttgggagaatggaaagcagaaagggaagccaggctctttaatgttccaagtcagctgtgcctcacacaaggctctctttttagctactaagtaacatactcaagactttgtatctgtgcagcattttatggaaatcactggtgacctataggatattactaaattatttcaatagctttatttttttcctacttggattctaggtggacattacagagttgaattcctcactaccccctcccgctgtcatttgttttattggaaaacttcatgttaactagagtgtacaaaaagtctgtttcctgctgagccaatagtgatttgtttgcatatcacctaatgtgaaaagtgctcatctgtgaactctatagcaaattatattttagaaaatactttgtgaggccgggcatggtggcagagcgagactccgtctcaaaaaaaaaggaaaagaaaagaaaatataaggatgtaaaagaagcaatttgcttgcacatctgaatatccttcttgtgtctccattttcactcttgaaaactgaaagcaatttgacttttatttttgtttttctaaagaacagctaggtgaaaggaggttaagctgattgtcactctgcctgcccactacctactccccaccatggtgtttcatgaaacatccccaccacctgaagtgatctttttaatccttgtgatagtaaatgcattgataattaacaggaaaaacatgtttttaaataatctacaaatgagaacccaaatagtagtgttttgtttgacagaagtaaatcaaatattatggtttaaatataatgcaaaatttcaggacagttaatttgggcttcccttaccctaagagggtttttcttataataaggagaagaggtgtggttcaaagaaaattaagagacaaaaccttcaggtacataatgcatgaaaatctttaaatgcctgcaaaaattaagttctgttataataccagccaattctgaattagccaatgccctaaaagcatctaacaatttaaggttatcttatgagtcctatgaaaacaattatttgttgctaaatttgagttttagctaccaacgccatgtttacgtgacaagaaattgttttggccctgtggtttatgacgtgctgctggataagcatttatgtaaaactgagtatttcaaagagaaccatttacaattggaatttccacctgtgtggctgtttgcagacctacctctgtcttccattttgcatcctgtcagtgctataattagtttgatcactttgtcttgtttttcagtgtctacaattatagcttattcactatgttctaactatttaaaaataatgggccgggcgcggtggctcatgcctgtagtcccagcactttgggaggccgaggtgagcagatcacaaggtcaggagatcgagaccatcctggctaacacagtgaaaccccgtctctactggaaatacagaaaaattagtcgggcatggtgctgggactacaggcacatgccaccatgccaccatgcctggctgatttttgtatttttagtagagctgggttggccaggctggtcttgaactcctgacctcaagtgattcacctgccttggcctcccaaagtcctggaattacaggcgtgagctaccgtgcccagctggtttttacattttaaaaacgtttagagaaagaagaatatgcaacagaaactgtatgtagcctgcaaagcctaaaatgtttactctctggcttgggagtttgtctcccctgctctagactgtcagcaagtggtacagtggtacagtacagtggtactgcccaactgcacttctctgcaaggtgattctagtgtgcacttgtcagaatgaaaatatgttattcatttaagacatctcatgtctttgaatgtaatcacatgatttgtatttaatatttacatgacctaattattttttcacgtcagtttttctagattggcaatagcctgttgcaaagtgcctaaacctttgagaaaaattactatgagcaaggtccatgatttagttttcaatataaagggaattccattctatactgtaaaatccaaaaatgctagttgccctcagcttttgagttgacttccagaaagttgagatcttttgaccattttttctcatgtcatataaaatgtgccacatggtagttgtcaagctgtggtagtcatgtacacttttttcttttttttaactttctaaaaggaaaagttcaaagtcctttccacagttagtcttcgcttcttttggatttttctttttagagctaaattattcataccaatgaataagtgagtctgttctaagatataggggccattatctatttttgcttaatggactcatgtggcattgttcactatcatgcctttccatacttgtaatatttctgagtcacttattaatgtgaccaacagataaactgttcaagctaatacagcatttcctaacttcatagttgtcgcagatgtttgttctagtagcgattatttaataaacatacattgtactgaatcttactagcaactaactattttcaggtaatctcagtctgcttattcactttttccatttgatttgctaatgccacaatcatttttctagaaaatagtaggataatgtattttttcctgtctgctataatggagactatatttctgcattcattacctctcataggtgaaaatattaaattaaataatattgttttgaataagaaaaaaaaa

SEQ ID NO: 276794 - DNA, 5825 bp, Homo sapiens
  misc_feature (1898)..(1898): n is a, c, g, or t
ggccgggccgggggcgcgagcgagcgcgcgggcctgggccggagccggcctggtcgccagcctaacccggcacagtgagcggagcgcctgggcggcggcggcggcggcgtgatggctccggccgcggaccgagagggctactggggccccacgacctccacgctggactggtgcgaggagaactactccgtgacctggtacatcgccgagttctggaatacagtgagtaacctgatcatgattatacctccaatgttcggtgcaattcagagtgttagagacggtctggaaaaacggtacattgcttcttatttagcactcacagtggtaggaatgggatcctggtgcttccacatgactctgaaatatgaaatgcagctattggatgaactcccaatgatatacagctgttgcatatttgtgtactgcatgtttgaatgtttcaagatcaagaactcagtaaactaccatctgctttttaccttagttctattcagtttaatagtaaccacagtttaccttaaggtaaaagagccaatattccatcaggtcatgtatggaatgttggtctttacattagtacttcgatctatttatattgttacatgaagagtattgctttgaactgcccctgagagctgaagattggccatgggtttatccatggcttagaggactgggttatacatcattgggtatatttttattgggatttttattttggaatatagataacatattttgtgagtcactgaggaactttcgaaagaaggtaccacctatcataggtattaccacacaatttcatgcatggtggcatattttaactggccttggttcctatcttcacatccttttcagtttgtatacaagaacactttacctgagatataggccaaaagtgaagtttctctttggaatctggccagtgatcctgtttgagcctctcaggaagcattgatgaatcattccaccaagaaaacaaacaagcacctaccatagacctggcagaataaataaggaaatccttaaagatctacaagttcaaatatgtcatgaccatcacagcagaggagtgactttctgactaatgctgccacccacacagagaataaggagtagggcctgctgggtgtttagctcatggctttatcttatttgtccccctcctcctttcacgctccagtttataaagaaacagagatgatgtgtgtgtatgcctcaaatgcagaaacagttgggcttttcttaacaggttaacagtttgtgctggttataagaaattaaccttcttttctttttgccaagggttgcatgtgaattatacctttcttaatatttgattaaataatgcagtcagctaagagccaacaaaaccccatatccagatagttagctgtgagccagcactcagctgtgtcagatttgattaatattgtattaatctcatggatggttctcaaaggtaaaaaaagagagagaaagagagagagctagctgtgggattctgtgtagttcttcactatctgttccagggctagtcggaggatcataagcaagctcagacctgcccccagttcagtacttgaccacatcccaggatttatggtgtctgtctatggccacagccaaccagaatgagtgggtcatcttataacctttctgaagctccatgaggacatgtatagaatgctgcaccttcagccagctctgctctgatctttgcagatctttaagttgtcactgtttctacggctagacaaatatgactggtggtctagactacccatagttcatcctcctcacataacttatttgaagttgtcagggaatgtcattacactctgatttttaaaattatgcagtattttccagttctcagagaggtcatggttgtncccagggaagtgtgttgcattaactaaagctaaaattatcagaatcctatttacataaagcatattaaaatatctgctccttaattttctgaaggaaatagatgtaagtttctgctacttgaaacctacagaaccgacaaaaattagggtgctaaaaaaatgacagtgaaatctcatcgtaaggcagctagttctaatttgcatttgaatgtataacaaattgcatcacttttcacaaacttaacacctgcctggagtaaaaatctgatttgacccctctgctcatgtttcatcatatttgtagctctgcatcatttagcatttttatgactttttttgctttatataaattattgtaaaatccagattgtttttaccacatgatgacgtgactcaggattaaatcctgagctacagtttcaaaaggaaaatcatttttttcttatgcaaagatggtaaaacactgttgtcattttttccagtattcaataagtagcctttgtacaaatttaaaaccaaaaactattctgttgtttttcttcacctactagccttagtttttaaccaagtatccaaggatgtcaacttgacatccttcccttagcatgccaacaagccattagactgattcttccacctacttttatgaacctccaggaagaaaaacacttgccaaaacattaagagaactttgattctgccttaagagggtataaaactaaaccatttgaaggcacagcccataagactatacttgattttgccccaagattctgacttctggctacatttcacctgcagttacctgggctatcggccgtgatacattttttaattcatttgttttccaccattatatttttatacttttcagttagatatacttctgcataaagagtatatatacagtgtaggataaaggcatatcgtacatggcaatgctgttaaacatggtaagactgaggttctgcaggattaaagtcagattaagggtacagaaagcacaccttgatactgaggccatttagagcaatttgtttaatgagtggttcagccatcaccaccagtggccacctgttcaataaaattgcctagcaccacagtggagagtcatctacaccccaaggtgagctgtaagactggccaattctttgaagacctttttttctgttgggagaatggaaagcagaaagggaagccaggctctttaatgttccaagtcagctgtgcctcacacaaggctctctttttagctactaagtaacatactcaagactttgtatctgtgcagcattttatggaaatcactggtgacctataggatattactaaattatttcaatagctttatttttttcctacttggattctaggtggacattacagagttgaattcctcactaccccctcccgctgtcatttgttttattggaaaacttcatgttaactagagtgtacaaaaagtctgtttcctgctgagccaatagtgatttgtttgcatatcacctaatgtgaaaagtgctcatctgtgaactctatagcaaattatattttagaaaatactttgtgaggccgggcatggtggcagagcgagactccgtctcaaaaaaaaaggaaaagaaaagaaaatataaggatgtaaaagaagcaatttgcttgcacatctgaatatccttcttgtgtctccattttcactcttgaaaactgaaagcaatttgacttttatttttgtttttctaaagaacagctaggtgaaaggaggttaagctgattgtcactctgcctgcccactacctactccccaccatggtgtttcatgaaacatccccaccacctgaagtgatctttttaatccttgtgatagtaaatgcattgataattaacaggaaaaacatgtttttaaataatctacaaatgagaacccaaatagtagtgttttgtttgacagaagtaaatcaaatattatggtttaaatataatgcaaaatttcaggacagttaatttgggcttcccttaccctaagagggtttttcttataataaggagaagaggtgtggttcaaagaaaattaagagacaaaaccttcaggtacataatgcatgaaaatctttaaatgcctgcaaaaattaagttctgttataataccagccaattctgaattagccaatgccctaaaagcatctaacaatttaaggttatcttatgagtcctatgaaaacaattatttgttgctaaatttgagttttagctaccaacgccatgtttacgtgacaagaaattgttttggccctgtggtttatgacgtgctgctggataagcatttatgtaaaactgagtatttcaaagagaaccatttacaattggaatttccacctgtgtggctgtttgcagacctacctctgtcttccattttgcatcctgtcagtgctataattagtttgatcactttgtcttgtttttcagtgtctacaattatagcttattcactatgttctaactatttaaaaataatgggccgggcgcggtggctcatgcctgtagtcccagcactttgggaggccgaggtgagcagatcacaaggtcaggagatcgagaccatcctggctaacacagtgaaaccccgtctctactggaaatacagaaaaattagtcgggcatggtgctgggactacaggcacatgccaccatgccaccatgcctggctgatttttgtatttttagtagagctgggttggccaggctggtcttgaactcctgacctcaagtgattcacctgccttggcctcccaaagtcctggaattacaggcgtgagctaccgtgcccagctggtttttacattttaaaaacgtttagagaaagaagaatatgcaacagaaactgtatgtagcctgcaaagcctaaaatgtttactctctggcttgggagtttgtctcccctgctctagactgtcagcaagtggtacagtggtacagtacagtggtactgcccaactgcacttctctgcaaggtgattctagtgtgcacttgtcagaatgaaaatatgttattcatttaagacatctcatgtctttgaatgtaatcacatgatttgtatttaatatttacatgacctaattattttttcacgtcagtttttctagattggcaatagcctgttgcaaagtgcctaaacctttgagaaaaattactatgagcaaggtccatgatttagttttcaatataaagggaattccattctatactgtaaaatccaaaaatgctagttgccctcagcttttgagttgacttccagaaagttgagatcttttgaccattttttctcatgtcatataaaatgtgccacatggtagttgtcaagctgtggtagtcatgtacacttttttcttttttttaactttctaaaaggaaaagttcaaagtcctttccacagttagtcttcgcttcttttggatttttctttttagagctaaattattcataccaatgaataagtgagtctgttctaagatataggggccattatctatttttgcttaatggactcatgtggcattgttcactatcatgcctttccatacttgtaatatttctgagtcacttattaatgtgaccaacagataaactgttcaagctaatacagcatttcctaacttcatagttgtcgcagatgtttgttctagtagcgattatttaataaacatacattgtactgaatcttactagcaactaactattttcaggtaatctcagtctgcttattcactttttccatttgatttgctaatgccacaatcatttttctagaaaatagtaggataatgtattttttcctgtctgctataatggagactatatttctgcattcattacctctcataggtgaaaatattaaattaaataatattgttttgaataagaaaaaaaaa

SEQ ID NO: 276795 - DNA, 4912 bp, Homo sapiens
  misc_feature (985)..(985): n is a, c, g, or t
cagctgagtgctggctcacagctaactatctggatatggggttttgttggctcttagctgactgcattatttaatcaaatattaagaaaggtataattcacatgcaacccttggcaaaaagatctacaagttcaaatatgtcatgaccatcacagcagaggagtgactttctgactaatgctgccacccacacagagaataaggagtagggcctgctgggtgtttagctcatggctttatcttatttgtccccctcctcctttcacgctccagtttataaagaaacagagatgatgtgtgtgtatgcctcaaatgcagaaacagttgggcttttcttaacaggttaacagtttgtgctggttataagaaattaaccttcttttctttttgccaagggttgcatgtgaattatacctttcttaatatttgattaaataatgcagtcagctaagagccaacaaaaccccatatccagatagttagctgtgagccagcactcagctgtgtcagatttgattaatattgtattaatctcatggatggttctcaaaggtaaaaaaagagagagaaagagagagagctagctgtgggattctgtgtagttcttcactatctgttccagggctagtcggaggatcataagcaagctcagacctgcccccagttcagtacttgaccacatcccaggatttatggtgtctgtctatggccacagccaaccagaatgagtgggtcatcttataacctttctgaagctccatgaggacatgtatagaatgctgcaccttcagccagctctgctctgatctttgcagatctttaagttgtcactgtttctacggctagacaaatatgactggtggtctagactacccatagttcatcctcctcacataacttatttgaagttgtcagggaatgtcattacactctgatttttaaaattatgcagtattttccagttctcagagaggtcatggttgtncccagggaagtgtgttgcattaactaaagctaaaattatcagaatcctatttacataaagcatattaaaatatctgctccttaattttctgaaggaaatagatgtaagtttctgctacttgaaacctacagaaccgacaaaaattagggtgctaaaaaaatgacagtgaaatctcatcgtaaggcagctagttctaatttgcatttgaatgtataacaaattgcatcacttttcacaaacttaacacctgcctggagtaaaaatctgatttgacccctctgctcatgtttcatcatatttgtagctctgcatcatttagcatttttatgactttttttgctttatataaattattgtaaaatccagattgtttttaccacatgatgacgtgactcaggattaaatcctgagctacagtttcaaaaggaaaatcatttttttcttatgcaaagatggtaaaacactgttgtcattttttccagtattcaataagtagcctttgtacaaatttaaaaccaaaaactattctgttgtttttcttcacctactagccttagtttttaaccaagtatccaaggatgtcaacttgacatccttcccttagcatgccaacaagccattagactgattcttccacctacttttatgaacctccaggaagaaaaacacttgccaaaacattaagagaactttgattctgccttaagagggtataaaactaaaccatttgaaggcacagcccataagactatacttgattttgccccaagattctgacttctggctacatttcacctgcagttacctgggctatcggccgtgatacattttttaattcatttgttttccaccattatatttttatacttttcagttagatatacttctgcataaagagtatatatacagtgtaggataaaggcatatcgtacatggcaatgctgttaaacatggtaagactgaggttctgcaggattaaagtcagattaagggtacagaaagcacaccttgatactgaggccatttagagcaatttgtttaatgagtggttcagccatcaccaccagtggccacctgttcaataaaattgcctagcaccacagtggagagtcatctacaccccaaggtgagctgtaagactggccaattctttgaagacctttttttctgttgggagaatggaaagcagaaagggaagccaggctctttaatgttccaagtcagctgtgcctcacacaaggctctctttttagctactaagtaacatactcaagactttgtatctgtgcagcattttatggaaatcactggtgacctataggatattactaaattatttcaatagctttatttttttcctacttggattctaggtggacattacagagttgaattcctcactaccccctcccgctgtcatttgttttattggaaaacttcatgttaactagagtgtacaaaaagtctgtttcctgctgagccaatagtgatttgtttgcatatcacctaatgtgaaaagtgctcatctgtgaactctatagcaaattatattttagaaaatactttgtgaggccgggcatggtggcagagcgagactccgtctcaaaaaaaaaggaaaagaaaagaaaatataaggatgtaaaagaagcaatttgcttgcacatctgaatatccttcttgtgtctccattttcactcttgaaaactgaaagcaatttgacttttatttttgtttttctaaagaacagctaggtgaaaggaggttaagctgattgtcactctgcctgcccactacctactccccaccatggtgtttcatgaaacatccccaccacctgaagtgatctttttaatccttgtgatagtaaatgcattgataattaacaggaaaaacatgtttttaaataatctacaaatgagaacccaaatagtagtgttttgtttgacagaagtaaatcaaatattatggtttaaatataatgcaaaatttcaggacagttaatttgggcttcccttaccctaagagggtttttcttataataaggagaagaggtgtggttcaaagaaaattaagagacaaaaccttcaggtacataatgcatgaaaatctttaaatgcctgcaaaaattaagttctgttataataccagccaattctgaattagccaatgccctaaaagcatctaacaatttaaggttatcttatgagtcctatgaaaacaattatttgttgctaaatttgagttttagctaccaacgccatgtttacgtgacaagaaattgttttggccctgtggtttatgacgtgctgctggataagcatttatgtaaaactgagtatttcaaagagaaccatttacaattggaatttccacctgtgtggctgtttgcagacctacctctgtcttccattttgcatcctgtcagtgctataattagtttgatcactttgtcttgtttttcagtgtctacaattatagcttattcactatgttctaactatttaaaaataatgggccgggcgcggtggctcatgcctgtagtcccagcactttgggaggccgaggtgagcagatcacaaggtcaggagatcgagaccatcctggctaacacagtgaaaccccgtctctactggaaatacagaaaaattagtcgggcatggtgctgggactacaggcacatgccaccatgccaccatgcctggctgatttttgtatttttagtagagctgggttggccaggctggtcttgaactcctgacctcaagtgattcacctgccttggcctcccaaagtcctggaattacaggcgtgagctaccgtgcccagctggtttttacattttaaaaacgtttagagaaagaagaatatgcaacagaaactgtatgtagcctgcaaagcctaaaatgtttactctctggcttgggagtttgtctcccctgctctagactgtcagcaagtggtacagtggtacagtacagtggtactgcccaactgcacttctctgcaaggtgattctagtgtgcacttgtcagaatgaaaatatgttattcatttaagacatctcatgtctttgaatgtaatcacatgatttgtatttaatatttacatgacctaattattttttcacgtcagtttttctagattggcaatagcctgttgcaaagtgcctaaacctttgagaaaaattactatgagcaaggtccatgatttagttttcaatataaagggaattccattctatactgtaaaatccaaaaatgctagttgccctcagcttttgagttgacttccagaaagttgagatcttttgaccattttttctcatgtcatataaaatgtgccacatggtagttgtcaagctgtggtagtcatgtacacttttttcttttttttaactttctaaaaggaaaagttcaaagtcctttccacagttagtcttcgcttcttttggatttttctttttagagctaaattattcataccaatgaataagtgagtctgttctaagatataggggccattatctatttttgcttaatggactcatgtggcattgttcactatcatgcctttccatacttgtaatatttctgagtcacttattaatgtgaccaacagataaactgttcaagctaatacagcatttcctaacttcatagttgtcgcagatgtttgttctagtagcgattatttaataaacatacattgtactgaatcttactagcaactaactattttcaggtaatctcagtctgcttattcactttttccatttgatttgctaatgccacaatcatttttctagaaaatagtaggataatgtattttttcctgtctgctataatggagactatatttctgcattcattacctctcataggtgaaaatattaaattaaataatattgttttgaataagaaaaaaaaa

SEQ ID NO: 276796 - DNA, 1044 bp, Homo sapiens
  misc_feature (11)..(11): n is a, c, g, or t
gctagaggatnccaaacgacccgaagactctctggcttgggagtttgtctcccctgctctagactgtcagcaagtggtacagtggtacagtacagtggtactgcccaactgcacttctctgcaaggtgattctagtgtgcacttgtcagaatgaaaatatgttattcatttaagacatctcatgtctttgaatgtaatcacatgatttgtatttaatatttacatgacctaattattttttcacgtcagtttttctagattggcaatagcctgttgcaaagtgcctaaacctttgagaaaaattactatgagcaaggtccatgatttagttttcaatataaagggaattccattctatactgtaaaatccaaaaatgctagttgccctcagcttttgagttgacttccagaaagttgagatcttttgaccattttttctcatgtcatataaaatgtgccacatggtagttgtcaagctgtggtagtcatgtacacttttttcttttttttaactttctaaaaggaaaagttcaaagtcctttccacagttagtcttcgcttcttttggatttttctttttagagctaaattattcataccaatgaataagtgagtctgttctaagatataggggccattatctatttttgcttaatggactcatgtggcattgttcactatcatgcctttccatacttgtaatatttctgagtcacttattaatgtgaccaacagataaactgttcaagctaatacagcatttcctaacttcatagttgtcgcagatgtttgttctagtagcgattatttaataaacatacattgtactgaatcttactagcaactaactattttcaggtaatctcagtctgcttattcactttttccatttgatttgctaatgccacaatcatttttctagaaaatagtaggataatgtattttttcctgtctgctataatggagactatatttctgcattcattacctctcataggtgaaaatattaaattaaataatattgttttgaataagaaaaaaaaa

SEQ ID NO: 276797 - DNA, 1161 bp, Homo sapiens
ggccgggccgggggcgcgagcgagcgcgcgggcctgggccggagccggcctggtcgccagcctaacccggcacagtgagcggagcgcctgggcggcggcggcggcggcgtgatggctccggccgcggaccgagagggctactggggccccacgacctccacgctggactggtgcgaggagaactactccgtgacctggtacatcgccgagttctggaatacagtgagtaacctgatcatgattatacctccaatgttcggtgcaattcagagtgttagagacggtctggaaaaacggtacattgcttcttatttagcactcacagtggtaggaatgggatcctggtgcttccacatgactctgaaatatgaaatgcagctattggatgaactcccaatgatatacagctgttgcatatttgtgtactgcatgtttgaatgtttcaagatcaagaactcagtaaactaccatctgctttttaccttagttctattcagtttaatagtaaccacagtttaccttaaggtaaaagagccaatattccatcaggtcatgtatggaatgttggtctttacattagtacttcgatctatttatattgttacatgggtttatccatggcttagaggactgggttatacatcattgggtatatttttattgggatttttattttggaatatagataacatattttgtgagtcactgaggaactttcgaaagaaggtaccacctatcataggtattaccacacaatttcatgcatggtggcatattttaactggccttggttcctatcttcacatccttttcagtttgtatacaagaacactttacctgagatataggccaaaagtgaagtttctctttggaatctggccagtgatcctgtttgagcctctcaggaagcattgatgaatcattccaccaagaaaacaaacaagcacctaccatagacctggcagaataaataaggaaatccttaaagatctacaagttcaaatatgtcatgaccatcacagcagaggagtgactttctgactaatgctgccacccacacagagaataaggagtagggcctgctgggtgtttagctcatggctttatcttatttgtccccctcctcctttcacgctccagtttataaagaaacagagatga

SEQ ID NO: 276798 - DNA, 436 bp, Homo sapiens
atgtgcagttcacaatagtgtttgcgctcctatgagaatctaatgccactgctgatttgataagaggcagagctcaggcgataatgctcacttgcctgcagctcacctcctgctgtgcagcccagttcctaaaaggctgcagacctgtaccagtctgggggatggggacccctgtgttaaggtacagaagtgtgaattggtaactcttgcacatgaaacaggagtacaagttcacccagggatttgtggtagtgtgctgaagcgtttacagaatcagtgactgcatctgaacattcctattttcctataacatttattttattcaactatattgtagggattaaactttctttttttttttttgataaggagtctcactctgtcaccccggctgaagtgcaatggcacaatctcggctcattggaacctccacctc

SEQ ID NO: 276799 - DNA, 214 bp, Homo sapiens
tcccgccctgctacctggataaccaaagacattcattttaccccacagaagagtattgctttgaactgcccctgagagctgaagattggccatggtaagtaagtttagaagcagaaaacagatagcaccctacccccactgatcatattcctgtcatatttcagtacctggcccacactgccagaagccttcactgtgttgaggcctatgtttc

SEQ ID NO: 276800 - DNA, 5972 bp, Homo sapiens
  misc_feature (2045)..(2045): n is a, c, g, or t
ggccgggccgggggcgcgagcgagcgcgcgggcctgggccggagccggcctggtcgccagcctaacccggcacagtgagcggagcgcctgggcggcggcggcggcggcgtgatggctccggccgcggaccgagagggctactggggccccacgacctccacgctggactggtgcgaggagaactactccgtgacctggtacatcgccgagttctggaatacagtgagtaacctgatcatgattatacctccaatgttcggtgcaattcagagtgttagagacggtctggaaaaacggtacattgcttcttatttagcactcacagatggagtctcactctgtcgccgaggctgaagtgcagtggcacaatctcggctcactgcaacctccatttcccgggtttacgcgatccttctgcctcagcctcccaagtagctgggactacagtggtaggaatgggatcctggtgcttccacatgactctgaaatatgaaatgcagctattggatgaactcccaatgatatacagctgttgcatatttgtgtactgcatgtttgaatgtttcaagatcaagaactcagtaaactaccatctgctttttaccttagttctattcagtttaatagtaaccacagtttaccttaaggtaaaagagccaatattccatcaggagtctcactctgtcaccccggctgaagtgcaatggcacaatctcggctcattggaacctccacctcccaggtcatgtatggaatgttggtctttacattagtacttcgatctatttatattgttacatgggtttatccatggcttagaggactgggttatacatcattgggtatatttttattgggatttttattttggaatatagataacatattttgtgagtcactgaggaactttcgaaagaaggtaccacctatcataggtattaccacacaatttcatgcatggtggcatattttaactggccttggttcctatcttcacatccttttcagtttgtatacaagaacactttacctgagatataggccaaaagtgaagtttctctttggaatctggccagtgatcctgtttgagcctctcaggaagcattgatgaatcattccaccaagaaaacaaacaagcacctaccatagacctggcagaataaataaggaaatccttaaagatctacaagttcaaatatgtcatgaccatcacagcagaggagtgactttctgactaatgctgccacccacacagagaataaggagtagggcctgctgggtgtttagctcatggctttatcttatttgtccccctcctcctttcacgctccagtttataaagaaacagagatgatgtgtgtgtatgcctcaaatgcagaaacagttgggcttttcttaacaggttaacagtttgtgctggttataagaaattaaccttcttttctttttgccaagggttgcatgtgaattatacctttcttaatatttgattaaataatgcagtcagctaagagccaacaaaaccccatatccagatagttagctgtgagccagcactcagctgtgtcagatttgattaatattgtattaatctcatggatggttctcaaaggtaaaaaaagagagagaaagagagagagctagctgtgggattctgtgtagttcttcactatctgttccagggctagtcggaggatcataagcaagctcagacctgcccccagttcagtacttgaccacatcccaggatttatggtgtctgtctatggccacagccaaccagaatgagtgggtcatcttataacctttctgaagctccatgaggacatgtatagaatgctgcaccttcagccagctctgctctgatctttgcagatctttaagttgtcactgtttctacggctagacaaatatgactggtggtctagactacccatagttcatcctcctcacataacttatttgaagttgtcagggaatgtcattacactctgatttttaaaattatgcagtattttccagttctcagagaggtcatggttgtncccagggaagtgtgttgcattaactaaagctaaaattatcagaatcctatttacataaagcatattaaaatatctgctccttaattttctgaaggaaatagatgtaagtttctgctacttgaaacctacagaaccgacaaaaattagggtgctaaaaaaatgacagtgaaatctcatcgtaaggcagctagttctaatttgcatttgaatgtataacaaattgcatcacttttcacaaacttaacacctgcctggagtaaaaatctgatttgacccctctgctcatgtttcatcatatttgtagctctgcatcatttagcatttttatgactttttttgctttatataaattattgtaaaatccagattgtttttaccacatgatgacgtgactcaggattaaatcctgagctacagtttcaaaaggaaaatcatttttttcttatgcaaagatggtaaaacactgttgtcattttttccagtattcaataagtagcctttgtacaaatttaaaaccaaaaactattctgttgtttttcttcacctactagccttagtttttaaccaagtatccaaggatgtcaacttgacatccttcccttagcatgccaacaagccattagactgattcttccacctacttttatgaacctccaggaagaaaaacacttgccaaaacattaagagaactttgattctgccttaagagggtataaaactaaaccatttgaaggcacagcccataagactatacttgattttgccccaagattctgacttctggctacatttcacctgcagttacctgggctatcggccgtgatacattttttaattcatttgttttccaccattatatttttatacttttcagttagatatacttctgcataaagagtatatatacagtgtaggataaaggcatatcgtacatggcaatgctgttaaacatggtaagactgaggttctgcaggattaaagtcagattaagggtacagaaagcacaccttgatactgaggccatttagagcaatttgtttaatgagtggttcagccatcaccaccagtggccacctgttcaataaaattgcctagcaccacagtggagagtcatctacaccccaaggtgagctgtaagactggccaattctttgaagacctttttttctgttgggagaatggaaagcagaaagggaagccaggctctttaatgttccaagtcagctgtgcctcacacaaggctctctttttagctactaagtaacatactcaagactttgtatctgtgcagcattttatggaaatcactggtgacctataggatattactaaattatttcaatagctttatttttttcctacttggattctaggtggacattacagagttgaattcctcactaccccctcccgctgtcatttgttttattggaaaacttcatgttaactagagtgtacaaaaagtctgtttcctgctgagccaatagtgatttgtttgcatatcacctaatgtgaaaagtgctcatctgtgaactctatagcaaattatattttagaaaatactttgtgaggccgggcatggtggcagagcgagactccgtctcaaaaaaaaaggaaaagaaaagaaaatataaggatgtaaaagaagcaatttgcttgcacatctgaatatccttcttgtgtctccattttcactcttgaaaactgaaagcaatttgacttttatttttgtttttctaaagaacagctaggtgaaaggaggttaagctgattgtcactctgcctgcccactacctactccccaccatggtgtttcatgaaacatccccaccacctgaagtgatctttttaatccttgtgatagtaaatgcattgataattaacaggaaaaacatgtttttaaataatctacaaatgagaacccaaatagtagtgttttgtttgacagaagtaaatcaaatattatggtttaaatataatgcaaaatttcaggacagttaatttgggcttcccttaccctaagagggtttttcttataataaggagaagaggtgtggttcaaagaaaattaagagacaaaaccttcaggtacataatgcatgaaaatctttaaatgcctgcaaaaattaagttctgttataataccagccaattctgaattagccaatgccctaaaagcatctaacaatttaaggttatcttatgagtcctatgaaaacaattatttgttgctaaatttgagttttagctaccaacgccatgtttacgtgacaagaaattgttttggccctgtggtttatgacgtgctgctggataagcatttatgtaaaactgagtatttcaaagagaaccatttacaattggaatttccacctgtgtggctgtttgcagacctacctctgtcttccattttgcatcctgtcagtgctataattagtttgatcactttgtcttgtttttcagtgtctacaattatagcttattcactatgttctaactatttaaaaataatgggccgggcgcggtggctcatgcctgtagtcccagcactttgggaggccgaggtgagcagatcacaaggtcaggagatcgagaccatcctggctaacacagtgaaaccccgtctctactggaaatacagaaaaattagtcgggcatggtgctgggactacaggcacatgccaccatgccaccatgcctggctgatttttgtatttttagtagagctgggttggccaggctggtcttgaactcctgacctcaagtgattcacctgccttggcctcccaaagtcctggaattacaggcgtgagctaccgtgcccagctggtttttacattttaaaaacgtttagagaaagaagaatatgcaacagaaactgtatgtagcctgcaaagcctaaaatgtttactctctggcttgggagtttgtctcccctgctctagactgtcagcaagtggtacagtggtacagtacagtggtactgcccaactgcacttctctgcaaggtgattctagtgtgcacttgtcagaatgaaaatatgttattcatttaagacatctcatgtctttgaatgtaatcacatgatttgtatttaatatttacatgacctaattattttttcacgtcagtttttctagattggcaatagcctgttgcaaagtgcctaaacctttgagaaaaattactatgagcaaggtccatgatttagttttcaatataaagggaattccattctatactgtaaaatccaaaaatgctagttgccctcagcttttgagttgacttccagaaagttgagatcttttgaccattttttctcatgtcatataaaatgtgccacatggtagttgtcaagctgtggtagtcatgtacacttttttcttttttttaactttctaaaaggaaaagttcaaagtcctttccacagttagtcttcgcttcttttggatttttctttttagagctaaattattcataccaatgaataagtgagtctgttctaagatataggggccattatctatttttgcttaatggactcatgtggcattgttcactatcatgcctttccatacttgtaatatttctgagtcacttattaatgtgaccaacagataaactgttcaagctaatacagcatttcctaacttcatagttgtcgcagatgtttgttctagtagcgattatttaataaacatacattgtactgaatcttactagcaactaactattttcaggtaatctcagtctgcttattcactttttccatttgatttgctaatgccacaatcatttttctagaaaatagtaggataatgtattttttcctgtctgctataatggagactatatttctgcattcattacctctcataggtgaaaatattaaattaaataatattgttttgaataagaaaaaaaaa

SEQ ID NO: 276801 - DNA, 5850 bp, Homo sapiens
  misc_feature (1923)..(1923): n is a, c, g, or t
ggccgggccgggggcgcgagcgagcgcgcgggcctgggccggagccggcctggtcgccagcctaacccggcacagtgagcggagcgcctgggcggcggcggcggcggcgtgatggctccggccgcggaccgagagggctactggggccccacgacctccacgctggactggtgcgaggagaactactccgtgacctggtacatcgccgagttctggaatacagtgagtaacctgatcatgattatacctccaatgttcggtgcaattcagagtgttagagacggtctggaaaaacggtacattgcttcttatttagcactcacagaagtacttcagatttgagaaaagagcacataactatggctaaaagatgggatttgtaatctctggagttttttacttcaagtctgaggatccaaactgactaagtgaagtaaagaaataagcagctattggatgaactcccaatgatatacagctgttgcatatttgtgtactgcatgtttgaatgtttcaagatcaagaactcagtaaactaccatctgctttttaccttagttctattcagtttaatagtaaccacagtttaccttaaggtaaaagagccaatattccatcaggtcatgtatggaatgttggtctttacattagtacttcgatctatttatattgttacatgggtttatccatggcttagaggactgggttatacatcattgggtatatttttattgggatttttattttggaatatagataacatattttgtgagtcactgaggaactttcgaaagaaggtaccacctatcataggtattaccacacaatttcatgcatggtggcatattttaactggccttggttcctatcttcacatccttttcagtttgtatacaagaacactttacctgagatataggccaaaagtgaagtttctctttggaatctggccagtgatcctgtttgagcctctcaggaagcattgatgaatcattccaccaagaaaacaaacaagcacctaccatagacctggcagaataaataaggaaatccttaaagatctacaagttcaaatatgtcatgaccatcacagcagaggagtgactttctgactaatgctgccacccacacagagaataaggagtagggcctgctgggtgtttagctcatggctttatcttatttgtccccctcctcctttcacgctccagtttataaagaaacagagatgatgtgtgtgtatgcctcaaatgcagaaacagttgggcttttcttaacaggttaacagtttgtgctggttataagaaattaaccttcttttctttttgccaagggttgcatgtgaattatacctttcttaatatttgattaaataatgcagtcagctaagagccaacaaaaccccatatccagatagttagctgtgagccagcactcagctgtgtcagatttgattaatattgtattaatctcatggatggttctcaaaggtaaaaaaagagagagaaagagagagagctagctgtgggattctgtgtagttcttcactatctgttccagggctagtcggaggatcataagcaagctcagacctgcccccagttcagtacttgaccacatcccaggatttatggtgtctgtctatggccacagccaaccagaatgagtgggtcatcttataacctttctgaagctccatgaggacatgtatagaatgctgcaccttcagccagctctgctctgatctttgcagatctttaagttgtcactgtttctacggctagacaaatatgactggtggtctagactacccatagttcatcctcctcacataacttatttgaagttgtcagggaatgtcattacactctgatttttaaaattatgcagtattttccagttctcagagaggtcatggttgtncccagggaagtgtgttgcattaactaaagctaaaattatcagaatcctatttacataaagcatattaaaatatctgctccttaattttctgaaggaaatagatgtaagtttctgctacttgaaacctacagaaccgacaaaaattagggtgctaaaaaaatgacagtgaaatctcatcgtaaggcagctagttctaatttgcatttgaatgtataacaaattgcatcacttttcacaaacttaacacctgcctggagtaaaaatctgatttgacccctctgctcatgtttcatcatatttgtagctctgcatcatttagcatttttatgactttttttgctttatataaattattgtaaaatccagattgtttttaccacatgatgacgtgactcaggattaaatcctgagctacagtttcaaaaggaaaatcatttttttcttatgcaaagatggtaaaacactgttgtcattttttccagtattcaataagtagcctttgtacaaatttaaaaccaaaaactattctgttgtttttcttcacctactagccttagtttttaaccaagtatccaaggatgtcaacttgacatccttcccttagcatgccaacaagccattagactgattcttccacctacttttatgaacctccaggaagaaaaacacttgccaaaacattaagagaactttgattctgccttaagagggtataaaactaaaccatttgaaggcacagcccataagactatacttgattttgccccaagattctgacttctggctacatttcacctgcagttacctgggctatcggccgtgatacattttttaattcatttgttttccaccattatatttttatacttttcagttagatatacttctgcataaagagtatatatacagtgtaggataaaggcatatcgtacatggcaatgctgttaaacatggtaagactgaggttctgcaggattaaagtcagattaagggtacagaaagcacaccttgatactgaggccatttagagcaatttgtttaatgagtggttcagccatcaccaccagtggccacctgttcaataaaattgcctagcaccacagtggagagtcatctacaccccaaggtgagctgtaagactggccaattctttgaagacctttttttctgttgggagaatggaaagcagaaagggaagccaggctctttaatgttccaagtcagctgtgcctcacacaaggctctctttttagctactaagtaacatactcaagactttgtatctgtgcagcattttatggaaatcactggtgacctataggatattactaaattatttcaatagctttatttttttcctacttggattctaggtggacattacagagttgaattcctcactaccccctcccgctgtcatttgttttattggaaaacttcatgttaactagagtgtacaaaaagtctgtttcctgctgagccaatagtgatttgtttgcatatcacctaatgtgaaaagtgctcatctgtgaactctatagcaaattatattttagaaaatactttgtgaggccgggcatggtggcagagcgagactccgtctcaaaaaaaaaggaaaagaaaagaaaatataaggatgtaaaagaagcaatttgcttgcacatctgaatatccttcttgtgtctccattttcactcttgaaaactgaaagcaatttgacttttatttttgtttttctaaagaacagctaggtgaaaggaggttaagctgattgtcactctgcctgcccactacctactccccaccatggtgtttcatgaaacatccccaccacctgaagtgatctttttaatccttgtgatagtaaatgcattgataattaacaggaaaaacatgtttttaaataatctacaaatgagaacccaaatagtagtgttttgtttgacagaagtaaatcaaatattatggtttaaatataatgcaaaatttcaggacagttaatttgggcttcccttaccctaagagggtttttcttataataaggagaagaggtgtggttcaaagaaaattaagagacaaaaccttcaggtacataatgcatgaaaatctttaaatgcctgcaaaaattaagttctgttataataccagccaattctgaattagccaatgccctaaaagcatctaacaatttaaggttatcttatgagtcctatgaaaacaattatttgttgctaaatttgagttttagctaccaacgccatgtttacgtgacaagaaattgttttggccctgtggtttatgacgtgctgctggataagcatttatgtaaaactgagtatttcaaagagaaccatttacaattggaatttccacctgtgtggctgtttgcagacctacctctgtcttccattttgcatcctgtcagtgctataattagtttgatcactttgtcttgtttttcagtgtctacaattatagcttattcactatgttctaactatttaaaaataatgggccgggcgcggtggctcatgcctgtagtcccagcactttgggaggccgaggtgagcagatcacaaggtcaggagatcgagaccatcctggctaacacagtgaaaccccgtctctactggaaatacagaaaaattagtcgggcatggtgctgggactacaggcacatgccaccatgccaccatgcctggctgatttttgtatttttagtagagctgggttggccaggctggtcttgaactcctgacctcaagtgattcacctgccttggcctcccaaagtcctggaattacaggcgtgagctaccgtgcccagctggtttttacattttaaaaacgtttagagaaagaagaatatgcaacagaaactgtatgtagcctgcaaagcctaaaatgtttactctctggcttgggagtttgtctcccctgctctagactgtcagcaagtggtacagtggtacagtacagtggtactgcccaactgcacttctctgcaaggtgattctagtgtgcacttgtcagaatgaaaatatgttattcatttaagacatctcatgtctttgaatgtaatcacatgatttgtatttaatatttacatgacctaattattttttcacgtcagtttttctagattggcaatagcctgttgcaaagtgcctaaacctttgagaaaaattactatgagcaaggtccatgatttagttttcaatataaagggaattccattctatactgtaaaatccaaaaatgctagttgccctcagcttttgagttgacttccagaaagttgagatcttttgaccattttttctcatgtcatataaaatgtgccacatggtagttgtcaagctgtggtagtcatgtacacttttttcttttttttaactttctaaaaggaaaagttcaaagtcctttccacagttagtcttcgcttcttttggatttttctttttagagctaaattattcataccaatgaataagtgagtctgttctaagatataggggccattatctatttttgcttaatggactcatgtggcattgttcactatcatgcctttccatacttgtaatatttctgagtcacttattaatgtgaccaacagataaactgttcaagctaatacagcatttcctaacttcatagttgtcgcagatgtttgttctagtagcgattatttaataaacatacattgtactgaatcttactagcaactaactattttcaggtaatctcagtctgcttattcactttttccatttgatttgctaatgccacaatcatttttctagaaaatagtaggataatgtattttttcctgtctgctataatggagactatatttctgcattcattacctctcataggtgaaaatattaaattaaataatattgttttgaataagaaaaaaaaa

SEQ ID NO: 276802 - DNA, 454 bp, Homo sapiens
tgacccctctatgtttctctctttccctttttccttctctttccctgtttctctcccttcctttctctttctttctctcttgctctctctgtctcttgcttgctctctctctctttttgttcttagcccctctgaggaaggcaaagtttgttgagagcccacgaattccagaatccgagcttggctcaccaaccctcacttcagctcagaaactggacgtggatgcatactgccctggtgatgctgaacaggagcttggcccccctccatctgtagatgaggcagcaaacacactcatgactcgtctgggtttcctccttggagagaaagtcacagaagttcagccaggtgaccaatacagcatggaagtacaggatgaaaatcagacctcagcaatcacccagcggataagtccttgttccactctgactagcagcactgcctctccaccagc

SEQ ID NO: 276803 - DNA, 755 bp, Homo sapiens
  misc_feature (378)..(378): n is a, c, g, or t
  misc_feature (387)..(387): n is a, c, g, or t
  misc_feature (505)..(505): n is a, c, g, or t
tcagggatctcatacctgccttttaagatgaaatgtattttcatatgaggctttaaattctctgaaaaaagtaatttatgaatcatggtcagatttgaaaatattccatcgatgccatagatcttgagggagagtcagtcactcaatcagaatgcgctatcaggtggtcatggagagaatgtgatgatatgcatctcacttgtagccacttccaaaatctgaaatgtacacccttttatagggagctgtctggtctggtgattattacagcatggattatcctgtgccacagttcctcaaaaatccagttggtagcatcgataaacaccgtgtttatcgatgccacctgtaaatactattttcttttgcaaaataacnaaaaggacnaaaaaactttaaaaattacagtaaaacataaagtagttctcaagtggaaaagttatcattcacaatgtccttgagttgttccttccttaatcaacctttgtcacattctgcttcaccnaacttggtccacttaacagtagtataatttttaagactcattcaacagcttaattatttctactatattctgaggtttgatagaattttctgtactgttgccattgtgactaaggcagaggagatgtgaatgaaaagatattcgtgcacagttagattctgtgcccttcataaatcaagcccgaaggtgtatgttcagtttaaatgatccaaataatggactgattatgaagtggcatcgataacccggg

SEQ ID NO: 276804 - DNA, 852 bp, Homo sapiens
gtgaggaaggtagctttagtgaaaacagggtttggagttgaacctatacgggttcaaattcgacttccgtccaccaccgagacctgcgctccctgagggactcgctttcccatccgcgaaaccaggacggcgccgcctacaccccgcggcgttcggggcgggctgaatgggtcgctgagtgggggctacacccacgcccttcgctccccgcccccgggcggagcgacggccacggcagtgtccccaaggcaccgaaaccgaggcgggggtctcggtccctccgcgcaaggaggaaggcggaccgtacgtggcaggactcaccgccccgcgccgtgttctccgagccatggcgccagcgctgtggcgggcctgcaacggactcatggccgccttcttcgcgctggcggccttggtgcaggtaaatgacccagatgcagaggtgtgggtggtggtgtacacaatccctgcagtactgaccctgcttgttggacttaaccctgaagtcacaggtaatgttatttggaaaagtatctctgcaatacacatactcttttgtacggtgtgggctgttggcttggcgtcctacctcttgcatcgtacacaacagaacatcttacatgaggaagaaggcagggagctgtctggtctggtgattattacagcatggattatcctgtgccacagttcctcaaagaatccagttggtggaagaattcaattggctattgccattgtaatcacacttttcccatttatctcatgggtctacatatatattaacaaggaaatgcggtcctcttggccaactcactgcaagacagtaatttaaataaattcaagaacttcgttttt

SEQ ID NO: 276805 - DNA, 1532 bp, Homo sapiens
gtgaggaaggtagctttagtgaaaacagggtttggagttgaacctatacgggttcaaattcgacttccgtccaccaccgagacctgcgctccctgagggactcgctttcccatccgcgaaaccaggacggcgccgcctacaccccgcggcgttcggggcgggctgaatgggtcgctgagtgggggctacacccacgcccttcgctccccgcccccgggcggagcgacggccacggcagtgtccccaaggcaccgaaaccgaggcgggggtctcggtccctccgcgcaaggaggaaggcggaccgtacgtggcaggactcaccgccccgcgccgtgttctccgagccatggcgccagcgctgtggcgggcctgcaacggactcatggccgccttcttcgcgctggcggccttggtgcaggtaaatgacccagatgcagaggtgtgggtggtggtgtacacaatccctgcagtactgaccctgcttgttggacttaaccctgaagtcacaggtaatgttatttggaaaagtatctctgcaatacacatactcttttgtacggtgtgggctgttggcttggcgtcctacctcttgcatcgtacacaacagaacatcttacatgaggaagaaggcagggagctgtctggtctggtgattattacagcatggattatcctgtgccacagttcctcaaagaatccagttggtggaagaattcaattggctattgccattgtaatcacacttttcccatttatctcatgggtctacatatatattaacaaggaaatgcggtcctcttggccaactcactgcaagacagtaatttaaataaattcaagaacttcgttttttacaaatgaatattttcaatcaattttttataaacattaggggaacaagccaggagtttatttcaggtaatttgggctaatagttttaaaactccaaataactttttaagggtgcatataattcgatgtaagattggatgggacaagtaagagatggtctgatattttccagacgactttctgcagggtattgtgtcataatgtagtggaaaaggctagagaatagaagtttaaaaatacgagttctaacttaactttgtaactatgtaatttgggcaaatatataaacctcctggtggatatttatctataaaataggattaatgccagatctacttacttacacagtaacaaggatcaatctagataatgtaagaacactctgaagatataaagtgtttggaaagattacggagggctgcccatgattaaaatagaggggagcagggattgggtaatatactgaaatagacattcaagagagggctataccccgatctttttttttttttaagacagtcccactctattgcccaggctggagtgcagtggcatgatcatggctcactgcagtcctgacctcccggggctcaggtgatcctcctacctcagcctcccaagaagctacgactacaagtgtgcaccaccatgcccggctaaatttttttaaattttttgta

SEQ ID NO: 276806 - DNA, 1140 bp, Homo sapiens
tcagggatctcatacctgccttttaagatgaaatgtattttcatatgaggctttaaattctctgaaaaaagtaatttatgaatcatggtcagatttgaaaatattccatcgatgccatagatcttgagggagagtcagtcactcaatcagaatgcgctatcaggtggtcatggagagaatgtgatgatatgcatctcacttgtagccacttccaaaatctgaaatgtacacccttttatagggagctgtctggtctggtgattattacagcatggattatcctgtgccacagttcctcaaagaatccagttggtggaagaattcaattggctattgccattgtaatcacacttttcccatttatctcatgggtctacatatatattaacaaggaaatgcggtcctcttggccaactcactgcaagacagtaatttaaataaattcaagaacttcgttttttacaaatgaatattttcaatcaattttttataaacattaggggaacaagccaggagtttatttcaggtaatttgggctaatagttttaaaactccaaataactttttaagggtgcatataattcgatgtaagattggatgggacaagtaagagatggtctgatattttccagacgactttctgcagggtattgtgtcataatgtagtggaaaaggctagagaatagaagtttaaaaatacgagttctaacttaactttgtaactatgtaatttgggcaaatatataaacctcctggtggatatttatctataaaataggattaatgccagatctacttacttacacagtaacaaggatcaatctagataatgtaagaacactctgaagatataaagtgtttggaaagattacggagggctgcccatgattaaaatagaggggagcagggattgggtaatatactgaaatagacattcaagagagggctataccccgatctttttttttttttaagacagtcccactctattgcccaggctggagtgcagtggcatgatcatggctcactgcagtcctgacctcccggggctcaggtgatcctcctacctcagcctcccaagaagctacgactacaagtgtgcaccaccatgcccggctaaatttttttaaattttttgta

SEQ ID NO: 276807 - DNA, 946 bp, Homo sapiens
gtgaggaaggtagctttagtgaaaacagggtttggagttgaacctatacgggttcaaattcgacttccgtccaccaccgagacctgcgctccctgagggactcgctttcccatccgcgaaaccaggacggcgccgcctacaccccgcggcgttcggggcgggctgaatgggtcgctgagtgggggctacacccacgcccttcgctccccgcccccgggcggagcgacggccacggcagtgtccccaaggcaccgaaaccgaggcgggggtctcggtccctccgcgcaaggaggaaggcggaccgtacgtggcaggactcaccgccccgcgccgtgttctccgagccatggcgccagcgctgtggcgggcctgcaacggactcatggccgccttcttcgcgctggcggccttggtgcaggtaaatgacccagatgcagaggtgtgggtggtggtgtacacaatccctgcagtactgaccctgcttgttggacttaaccctgaagtcacaggtaatgttatttggaaaagtatctctgcaatacacatactcttttgtacggtgtgggctgttggcttggcgtcctacctcttgcatcgtacacaacagaacatcttacatgaggaagaaggcagggagctgtctggtctggtgattattacagcatggattatcctgtgccacagttcctcaaaaggcagagtcttgctttgttgcccagactggaaggcagtggcccgatcacagctcactgcagcttcaaactcctaggctccagtgacccactcacctcagcctcccaaagtgatgggattacaggcgtgagccaccacatctggccccaagaactgttttcaatgatagcattttatttaatattataaaattaatatgaagaagttgctactaaaagaagcactttagcaaataaaatttaatagatcaggt

SEQ ID NO: 276808 - DNA, 633 bp, Homo sapiens
cctggaaggggctggttccgcgcgtggaacttcccaggggacctcagaagaagcggccctggctcctgcgttaacgtccggcccgcggacgacactgaacatatctcagggcctaggagacgaagccgaccaaaaccctttatagcatcattaaactttttagtcggcttggggacccccttcataatcatttccctcatttcttgagactggtgggggtggagggcccttaaaatacccgttctgggttggcgagtcctctccagagctcccgtgaaggcttttcaaaaatgtgtggctgcctgttaaaaacatctgttgtgtcagccagaaaccccttcacccgtcctcatctggactatatcctgttcagattttgtaccctcgatgcctattgcagtgtctggcacttaacaaattaataaaaaatgtgcttaaatgaatttaaaaggaatggaacagcacaggatgtctgctaacaccttggtattctggcgttccaggtaaatgacccagatgcagaggtgtgggtggtgagtatgagccgcttccaggctttcctccgtttggaagaattggggaacggcacaaaacacacggttttatgtctttacccctcctccctgcttaatt

SEQ ID NO: 276809 - DNA, 1580 bp, Homo sapiens
gtgaggaaggtagctttagtgaaaacagggtttggagttgaacctatacgggttcaaattcgacttccgtccaccaccgagacctgcgctccctgagggactcgctttcccatccgcgaaaccaggacggcgccgcctacaccccgcggcgttcggggcgggctgaatgggtcgctgagtgggggctacacccacgcccttcgctccccgcccccgggcggagcgacggccacggcagtgtccccaaggcaccgaaaccgaggcgggggtctcggtccctccgcgcaaggaggaaggcggaccgtacgtggcaggactcaccgccccgcgccgtgttctccgagccatggcgccagcgctgtggcgggcctgcaacggactcatggccgccttcttcgcgctggcggccttggtgcaggtaaatgacccagatgcagaggtgtgggtggtggtgtacacaatccctgcagtactgaccctgcttgttggacttaaccctgaagtcacaggtaatgttatttggaaaagtatctctgcaatacacatactcttttgtacggtgtgggctgttggcttggcgtcctacctcttgcatcgtacacaacagaacatcttacatgaggaagaaggcaggttcaagctattcttctgcctcagcctcctgagtagctgggattacagggagctgtctggtctggtgattattacagcatggattatcctgtgccacagttcctcaaagaatccagttggtggaagaattcaattggctattgccattgtaatcacacttttcccatttatctcatgggtctacatatatattaacaaggaaatgcggtcctcttggccaactcactgcaagacagtaatttaaataaattcaagaacttcgttttttacaaatgaatattttcaatcaattttttataaacattaggggaacaagccaggagtttatttcaggtaatttgggctaatagttttaaaactccaaataactttttaagggtgcatataattcgatgtaagattggatgggacaagtaagagatggtctgatattttccagacgactttctgcagggtattgtgtcataatgtagtggaaaaggctagagaatagaagtttaaaaatacgagttctaacttaactttgtaactatgtaatttgggcaaatatataaacctcctggtggatatttatctataaaataggattaatgccagatctacttacttacacagtaacaaggatcaatctagataatgtaagaacactctgaagatataaagtgtttggaaagattacggagggctgcccatgattaaaatagaggggagcagggattgggtaatatactgaaatagacattcaagagagggctataccccgatctttttttttttttaagacagtcccactctattgcccaggctggagtgcagtggcatgatcatggctcactgcagtcctgacctcccggggctcaggtgatcctcctacctcagcctcccaagaagctacgactacaagtgtgcaccaccatgcccggctaaatttttttaaattttttgta

SEQ ID NO: 276810 - DNA, 481 bp, Homo sapiens
caacatggtgaaaccgtgtctatgcgaaaaatacaaacattagccaggcatggcagctcgggcctgtagtcacagctacttggggtatgaggcaggaggattgcttgagccaggatgcgcaggttgcagtgagtcgagatcacactactgcactccagcctgggtgacagtgaaatcctgtccaaaaaagagaaaaaaaaggccacgcgcggtggctcatgcctgtaatcccagcactttggtaggccaaggcaggtggatcacaaggtcaagagttcgagactagcctggccaacatagtgaaaccctgtttctactaaaaatacaaaaattagccaggtatggtggcacgcacctgtagtcccagctacttgggaggctgaggccggagaattgcttgaacccgggagacagaggttgcagtgagctgagaccacgccattgcactccagcctgggtgacagagtgagactccatctca

SEQ ID NO: 276811 - DNA, 656 bp, Homo sapiens
ttttttgtagatgtgggtcccactgtggcccaagctggtctccaactcctggcctcaagcgatcccccccatttcaacctcccaaagtgctgggattacaggcatgggccaccacgcctggcgtggcttaactgttactatcccatatcacagccataaattccaagctgggaagacagcatgtgtatgtctggtagatgaaaaactggatagcgattaagcagaaccatgtagaggtattccaggctgaaaaaggaatatctaaaatatcgcctctgttccacacgcacatacacatttacaaagacggcagcatcgttccaccctggagccctagctccttggaggtaaagaaaggtggtaaaagaggagtgggaactgagggtaaacctcacaccctgatacagtgatatccgctcccctaaccctaattcctgaggccaaggccctatccacactctaaaatgcagaggaggaacacaccttctgtcttcaaaccagccccacatcacgctaaccctaggccaagggctagtgtgcctacagtcagagggtggccgacctgaggtgagaaagtactttccattaagcagaggacgccacccccaacaccctgcactttcaaggtactcctggtgacttctatccagctcccc

SEQ ID NO: 276812 - DNA, 420 bp, Homo sapiens
ttttttgtagatgtgggtcccactgtggcccaagctggtctccaactcctggcctcaagcgatcccccccatttcaacctcccaaagtgctgggattacaggcatgggccaccacgcctggcgtggcttaactgttactatcccatatcacagccataaattccaagctgggaagacagcatgtgtatgtctggtagatgaaaaactggatagcgattaagcagaaccatgtagaggaggaacacaccttctgtcttcaaaccagccccacatcacgctaaccctaggccaagggctagtgtgcctacagtcagagggtggccgacctgaggtgagaaagtactttccattaagcagaggacgccacccccaacaccctgcactttcaaggtactcctggtgacttctatccagctcccc

SEQ ID NO: 276813 - DNA, 875 bp, Homo sapiens
gcacttatgcacttgtggttgcaactttagcagtttgaggtgcaacagcgaaactagctgagttgctttttttcttcttcatatgaatagaagactcattctgctgtaatcttagcaacctcagcatatgagagagtttttccttattgagtggagaagaaatttcacattttcccattaaggaagcactttgtagcttctttttggcatatctgaattgtcagcatcactattcttgtgctttggggccatgattaagtaaaataagggtcagttgaacacaagcactacgatactgcatcaggtgatctgacagctcctaagtgactaacaggtgggtagcattcgcagcatagatatgccaggacaattcacattcggggtggggtggagcaggatggtgcgagacgtcacactactcagaatggtgtacagtttaaacatgaattatttctggaattttctatttaatacttttaaatattgaacaaaggtaactgaagtggtgaaaaactacagaggagaggactactgtaattcccagccttgttcctttataggtaaggtttttttcctttgacttcttttttctttgtatttgattttctgaaattggaatataatatacctaattgtaggggtttttgtgaggggcgagagggcacttaccttgcttggtgttctctgtgtttcctccatctgtggtttggtttatgacattaatttggggaaattctccgtcattatttcctcaaagactgcttctgttcttccttcttttttagtatttctgttatgcgtatattacatcatttgtagttgtcctacagttcttggataatctgttccttttttttccctcaatattttatctg

SEQ ID NO: 276814 - DNA, 2530 bp, Homo sapiens
ctaaaggtcggcgaggcttctgaagacgcaattcctgcgacgcccgcggaggggccctggggggcggcgccgagcgtctggcctgtgttggctgtaggcaacgaaaggagccctcccggtctgcgccggatggccccgggcggtgactcggtccggagccctggaacgctacgcccacctggcggaaagcaccacggaaacgcatccttctgtggccactgttaggtctgccattttacacttttctgatctcctccttcccttctgtgagctatgtctcaggggtcagtgacattcagagatgtggccatagacttctcccaggaggagtggaaatggcttcagcctgctcaaagagatttgtacagatgtgtaatgttggagaactatggccatctggtctcactgggtctttccatttctaagccagatgtggtttccttattggagcaagggaaagaaccctggctggggaaaagggaagtgaaaagagatctgttttcagtttcagagtcaagtggtgagatcaaagacttttcaccaaaaaatgtcatttatgatgactcatcccagtatttgatcatggaaagaattctaagtcaaggccctgtgtattccagttttaaaggaggctggaaatgcaaggatcatactgagatgctgcaagaaaatcagggatgtattaggaaagtaacagtctctcatcaagaagccctggctcaacatatgaatatcagtactgtggagaggccctatggatgccatgaatgtggaaaaacttttggtcgacgcttttccctggtgttacaccagaggactcatactggagagaaaccatatgcatgtaaggaatgtggcaaaacctttagccagatttcaaaccttgtgaaacaccaaatgatacatactggaaagaaaccccatgagtgtaaggactgtaataaaacattcagttacctttcatttcttattgaacaccagagaacgcacactggggagaaaccttatgaatgtactgagtgtggaaaggcctttagccgtgcctccaacctcactcgacatcaaagaattcacataggaaagaaacaatatatatgtaggaaatgtggtaaagcatttagcagtggctcagaactcattcgccaccagattacacatactggagagaaaccttatgaatgcattgaatgtgggaaggcatttcgccgtttctcacaccttactcgacatcagagcatccatacaaccaaaaccccgtatgaatgtaatgaatgtaggaaagctttccgttgtcactcattccttattaaacatcagagaattcatgctggagaaaagctctatgaatgtgatgaatgtggtaaagttttcacttggcatgcatcccttattcaacatacgaagagtcacactggagagaaaccctatgcgtgtgctgaatgtgataaagccttcagccggagcttttccctcattctacatcagagaactcatactggagagaaaccctatgtatgtaaggtatgcaacaaatccttcagctggagctcaaaccttgctaaacatcagaggacacacactcttgacaacccctatgaatatgaaaattcatttaattaccactcattccttactgaacaccagtgaatttacactgcaaagaaaaactatgaatgtatggaattttttaaaaagaagtataatgccttacttcagagaactcttggaaagaagccttatgtgaaagtgatgactgtgaagtaatatggcccacactttattcaccaccctggagaaaaaaaaacccaggaatatgtggaaaagccattaataaccactcttttatttttttgcaataacaaggtgaaatcaatattgttgagaagattcttccatctggtaatgttgagaagacttcatttggtaggagtcccttactttacgtgtgtaaattcctaccaggaaagaatacatatccaatagattggagaaagccagagattagccctcattccgcatctgtcaaccaggacagaatgcatggacaagggatgagctttacaaagatgatgcactttggagatcagaaaattcatatttaagcaaagtgatacaaacacagtgatttgggaatgccttcatttacaatgcaatacttaaattttaatactcttgtaggagaaaaagcaactgtataaatgaatgtagagtgactttctgcaatatttcaaacctatatcagagaattacactgtgggaaaactaccattgtaataagtgtagcaaaatctccttagatatctgaaaagtcatactggatggaatctgtaggaaacggttctattttgagggaagggggattcctttttgttttttaagtgaattcagaaaatgttataaataaatcttttggtttattataaaccttctgcttgctgattttttcccacagcatgtgattctgaaaatgtaactacaatattgacataaaaaataaacagtagtttttcttgttgaaacatacaaacat

SEQ ID NO: 276815 - DNA, 3176 bp, Homo sapiens
atggattagccattctttattcctttactttcctaataaacttgctttcaccttatggattcgcctcaaattctttcttgtgcaagatccaagaaccctctcttagagtctgagatccggacccctttccagtagcaaaaggtcttagactgaagtactgactccacagtcgttgttaagaatcctagttgtttaatagaggcggtcttgggctcttgctgggccgcggtgtgttctgggaagtgtagtcacctgagtctccagttccttgtctctgggccgtgtgtgcacgccagcgaagcactgtgggagtcgtagtaggggaggaaaaccctataccctctggcgtgcggcgcaggagtttgggggaatgtagtcgccagagctctgcgttgtcttccggctttgggcgtggccacgatgcactctgggagtcgtagtaggggaagaacgtcctccgctcttttgcgcacggtcgctagaggttctgggaagtgtagttgcctgaagctcgtgttctttgtctttcgatgatgtgcgcttggcctcaaagcaccctgggagttgcagtggggcggggaaagccatatgctctctcgcgcggggtcgcggttgtttctgggaagtgtggtggcctgagttccacgttcttcgtttctccgctagttgtgcgcttggccgcgagacactctggcagttataggaacacaaaggtctgccattttacacttttctgatctcctccttcccttctgtgagctatgtctcaggggtcagtgacattcagagatgtggccatagacttctcccaggaggagtggaaatggcttcagcctgctcaaagagatttgtacagatgtgtaatgttggagaactatggccatctggtctcactgggtctttccatttctaagccagatgtggtttccttattggagcaagggaaagaaccctggctggggaaaagggaagtgaaaagagatctgttttcaggctttttttcagctaactgtgtcagcttctttagctgggcccatgtcgacggctccgctttcttggtagatggaaacttcttttgtaagttgtaactgaagtggtgaaaaactacagaggagaggactactgtaattcccagccttgttcctttatagtttcagagtcaagtggtgagatcaaagacttttcaccaaaaaatgtcatttatgatgactcatcccagtatttgatcatggaaagaattctaagtcaaggccctgtgtattccagttttaaaggaggctggaaatgcaaggatcatactgagatgctgcaagaaaatcagggatgtattaggaaagtaacagtctctcatcaagaagccctggctcaacatatgaatatcagtactgtggagaggccctatggatgccatgaatgtggaaaaacttttggtcgacgcttttccctggtgttacaccagaggactcatactggagagaaaccatatgcatgtaaggaatgtggcaaaacctttagccagatttcaaaccttgtgaaacaccaaatgatacatactggaaagaaaccccatgagtgtaaggactgtaataaaacattcagttacctttcatttcttattgaacaccagagaacgcacactggggagaaaccttatgaatgtactgagtgtggaaaggcctttagccgtgcctccaacctcactcgacatcaaagaattcacataggaaagaaacaatatatatgtaggaaatgtggtaaagcatttagcagtggctcagaactcattcgccaccagattacacatactggagagaaaccttatgaatgcattgaatgtgggaaggcatttcgccgtttctcacaccttactcgacatcagagcatccatacaaccaaaaccccgtatgaatgtaatgaatgtaggaaagctttccgttgtcactcattccttattaaacatcagagaattcatgctggagaaaagctctatgaatgtgatgaatgtggtaaagttttcacttggcatgcatcccttattcaacatacgaagagtcacactggagagaaaccctatgcgtgtgctgaatgtgataaagccttcagccggagcttttccctcattctacatcagagaactcatactggagagaaaccctatgtatgtaaggtatgcaacaaatccttcagctggagctcaaaccttgctaaacatcagaggacacacactcttgacaacccctatgaatatgaaaattcatttaattaccactcattccttactgaacaccagtgaatttacactgcaaagaaaaactatgaatgtatggaattttttaaaaagaagtataatgccttacttcagagaactcttggaaagaagccttatgtgaaagtgatgactgtgaagtaatatggcccacactttattcaccaccctggagaaaaaaaaacccaggaatatgtggaaaagccattaataaccactcttttatttttttgcaataacaaggtgaaatcaatattgttgagaagattcttccatctggtaatgttgagaagacttcatttggtaggagtcccttactttacgtgtgtaaattcctaccaggaaagaatacatatccaatagattggagaaagccagagattagccctcattccgcatctgtcaaccaggacagaatgcatggacaagggatgagctttacaaagatgatgcactttggagatcagaaaattcatatttaagcaaagtgatacaaacacagtgatttgggaatgccttcatttacaatgcaatacttaaattttaatactcttgtaggagaaaaagcaactgtataaatgaatgtagagtgactttctgcaatatttcaaacctatatcagagaattacactgtgggaaaactaccattgtaataagtgtagcaaaatctccttagatatctgaaaagtcatactggatggaatctgtaggaaacggttctattttgagggaagggggattcctttttgttttttaagtgaattcagaaaatgttataaataaatcttttggtttattataaaccttctgcttgctgattttttcccacagcatgtgattctgaaaatgtaactacaatattgacataaaaaataaacagtagtttttcttgttgaaacatacaaacat

SEQ ID NO: 276816 - DNA, 2696 bp, Homo sapiens
gagactgtatgccccatttgaagggtggtgctgttatctgctgtagccaattattaccctgaagaaattctggctgaattatattaaaataggctggtattaaggaaaatatacattgtttattaacataaaggaatactgtaaaatcttaagaatttttacaaccaatgccaaaaatccatattgttcatgtgtataatcctttattttgaataaaattgtaaattatctcaggacagataatttatgtttttctccttttctccagttatacaacaaaacacaagagctaggctcttcattatataattactcagaattctgaaaactctcactgttactacttagacacattgcctaacctccacagtgagactcattttattccttgatgagggagtttgggggcatgcgtgctggtcatgcaaatatctgtccgtcatttcaggggtcagtgacattcagagatgtggccatagacttctcccaggaggagtggaaatggcttcagcctgctcaaagagatttgtacagatgtgtaatgttggagaactatggccatctggtctcactgggtctttccatttctaagccagatgtggtttccttattggagcaagggaaagaaccctggctggggaaaagggaagtgaaaagagatctgttttcagtttcagagtcaagtggtgagatcaaagacttttcaccaaaaaatgtcatttatgatgactcatcccagtatttgatcatggaaagaattctaagtcaaggccctgtgtattccagttttaaaggaggctggaaatgcaaggatcatactgagatgctgcaagaaaatcagggatgtattaggaaagtaacagtctctcatcaagaagccctggctcaacatatgaatatcagtactgtggagaggccctatggatgccatgaatgtggaaaaacttttggtcgacgcttttccctggtgttacaccagaggactcatactggagagaaaccatatgcatgtaaggaatgtggcaaaacctttagccagatttcaaaccttgtgaaacaccaaatgatacatactggaaagaaaccccatgagtgtaaggactgtaataaaacattcagttacctttcatttcttattgaacaccagagaacgcacactggggagaaaccttatgaatgtactgagtgtggaaaggcctttagccgtgcctccaacctcactcgacatcaaagaattcacataggaaagaaacaatatatatgtaggaaatgtggtaaagcatttagcagtggctcagaactcattcgccaccagattacacatactggagagaaaccttatgaatgcattgaatgtgggaaggcatttcgccgtttctcacaccttactcgacatcagagcatccatacaaccaaaaccccgtatgaatgtaatgaatgtaggaaagctttccgttgtcactcattccttattaaacatcagagaattcatgctggagaaaagctctatgaatgtgatgaatgtggtaaagttttcacttggcatgcatcccttattcaacatacgaagagtcacactggagagaaaccctatgcgtgtgctgaatgtgataaagccttcagccggagcttttccctcattctacatcagagaactcatactggagagaaaccctatgtatgtaaggtatgcaacaaatccttcagctggagctcaaaccttgctaaacatcagaggacacacactcttgacaacccctatgaatatgaaaattcatttaattaccactcattccttactgaacaccagtgaatttacactgcaaagaaaaactatgaatgtatggaattttttaaaaagaagtataatgccttacttcagagaactcttggaaagaagccttatgtgaaagtgatgactgtgaagtaatatggcccacactttattcaccaccctggagaaaaaaaaacccaggaatatgtggaaaagccattaataaccactcttttatttttttgcaataacaaggtgaaatcaatattgttgagaagattcttccatctggtaatgttgagaagacttcatttggtaggagtcccttactttacgtgtgtaaattcctaccaggaaagaatacatatccaatagattggagaaagccagagattagccctcattccgcatctgtcaaccaggacagaatgcatggacaagggatgagctttacaaagatgatgcactttggagatcagaaaattcatatttaagcaaagtgatacaaacacagtgatttgggaatgccttcatttacaatgcaatacttaaattttaatactcttgtaggagaaaaagcaactgtataaatgaatgtagagtgactttctgcaatatttcaaacctatatcagagaattacactgtgggaaaactaccattgtaataagtgtagcaaaatctccttagatatctgaaaagtcatactggatggaatctgtaggaaacggttctattttgagggaagggggattcctttttgttttttaagtgaattcagaaaatgttataaataaatcttttggtttattataaaccttctgcttgctgattttttcccacagcatgtgattctgaaaatgtaactacaatattgacataaaaaataaacagtagtttttcttgttgaaacatacaaacat

SEQ ID NO: 276817 - DNA, 2116 bp, Homo sapiens
cttcattctgttgctaaagaagggagaaatggccttattttattcaatacaggaaaaagaaacattcacttttttttttggtatctttcagtttcagagtcaagtggtgagatcaaagacttttcaccaaaaaatgtcatttatgatgactcatcccagtatttgatcatggaaagaattctaagtcaaggccctgtgtattccagttttaaaggaggctggaaatgcaaggatcatactgagatgctgcaagaaaatcagggatgtattaggaaagtaacagtctctcatcaagaagccctggctcaacatatgaatatcagtactgtggagaggccctatggatgccatgaatgtggaaaaacttttggtcgacgcttttccctggtgttacaccagaggactcatactggagagaaaccatatgcatgtaaggaatgtggcaaaacctttagccagatttcaaaccttgtgaaacaccaaatgatacatactggaaagaaaccccatgagtgtaaggactgtaataaaacattcagttacctttcatttcttattgaacaccagagaacgcacactggggagaaaccttatgaatgtactgagtgtggaaaggcctttagccgtgcctccaacctcactcgacatcaaagaattcacataggaaagaaacaatatatatgtaggaaatgtggtaaagcatttagcagtggctcagaactcattcgccaccagattacacatactggagagaaaccttatgaatgcattgaatgtgggaaggcatttcgccgtttctcacaccttactcgacatcagagcatccatacaaccaaaaccccgtatgaatgtaatgaatgtaggaaagctttccgttgtcactcattccttattaaacatcagagaattcatgctggagaaaagctctatgaatgtgatgaatgtggtaaagttttcacttggcatgcatcccttattcaacatacgaagagtcacactggagagaaaccctatgcgtgtgctgaatgtgataaagccttcagccggagcttttccctcattctacatcagagaactcatactggagagaaaccctatgtatgtaaggtatgcaacaaatccttcagctggagctcaaaccttgctaaacatcagaggacacacactcttgacaacccctatgaatatgaaaattcatttaattaccactcattccttactgaacaccagtgaatttacactgcaaagaaaaactatgaatgtatggaattttttaaaaagaagtataatgccttacttcagagaactcttggaaagaagccttatgtgaaagtgatgactgtgaagtaatatggcccacactttattcaccaccctggagaaaaaaaaacccaggaatatgtggaaaagccattaataaccactcttttatttttttgcaataacaaggtgaaatcaatattgttgagaagattcttccatctggtaatgttgagaagacttcatttggtaggagtcccttactttacgtgtgtaaattcctaccaggaaagaatacatatccaatagattggagaaagccagagattagccctcattccgcatctgtcaaccaggacagaatgcatggacaagggatgagctttacaaagatgatgcactttggagatcagaaaattcatatttaagcaaagtgatacaaacacagtgatttgggaatgccttcatttacaatgcaatacttaaattttaatactcttgtaggagaaaaagcaactgtataaatgaatgtagagtgactttctgcaatatttcaaacctatatcagagaattacactgtgggaaaactaccattgtaataagtgtagcaaaatctccttagatatctgaaaagtcatactggatggaatctgtaggaaacggttctattttgagggaagggggattcctttttgttttttaagtgaattcagaaaatgttataaataaatcttttggtttattataaaccttctgcttgctgattttttcccacagcatgtgattctgaaaatgtaactacaatattgacataaaaaataaacagtagtttttcttgttgaaacatacaaacat

SEQ ID NO: 276818 - DNA, 1691 bp, Homo sapiens
ctaaaggtcggcgaggcttctgaagacgcaattcctgcgacgcccgcggaggggccctggggggcggcgccgagcgtctggcctgtgttggctgtaggcaacgaaaggagccctcccggtctgcgccggatggccccgggcggtgactcggtccggagccctggaacgctacgcccacctggcggaaagcaccacggaaacgcatccttctgtggccactgttaggtctgccattttacacttttctgatctcctccttcccttctgtgagctatgtctcaggggtcagtgacattcagagatgtggccatagacttctcccaggaggagtggaaatggcttcagcctgctcaaagagatttgtacagatgtgtaatgttggagaactatggccatctggtctcactgggtctttccatttctaagccagatgtggtttccttattggagcaagggaaagaaccctggctggggaaaagggaagtgaaaagagatctgttttcagtttcagagtcaagtggtgagatcaaagacttttcaccaaaaaatgtcatttatgatgactcatcccagtatttgatcatggaaagaattctaagtcaaggccctgtgtattccagttttaaaggaggctggaaatgcaaggatcatactgagatgctgcaagaaaatcagggatgtattaggaaagtaacagtctctcatcaagaagccctggctcaacatatgaatatcagtactgtggagaggccctatggatgccatgaatgtggaaaaacttttggtcgacgcttttccctggtgttacaccagaggactcatactggagagaaaccatatgcatgtaaggaatgtggcaaaacctttagccagatttcaaaccttgtgaaacaccaaatgatacatactggaaagaaaccccatgagtgtaaggactgtaataaaacattcagttacctttcatttcttattgaacaccagagaacgcacactggggagaaaccttatgaatgtactgagtgtggaaaggcctttagccgtgcctccaacctcactcgacatcaaagaattcacataggaaagaaacaatatatatgtaggaaatgtggtaaagcatttagcagtggctcagaactcattcgccaccagattacacatactggagagaaaccttatgaatgcattgaatgtgggaaggcatttcgccgtttctcacaccttactcgacatcagagcatccatacaaccaaaaccccgtatgaatgtaatgaatgtaggaaagctttccgttgtcactcattccttattaaacatcagagaattcatgctggagaaaagctctatgaatgtgatgaatgtggtaaagttttcacttggcatgcatcccttattcaacatacgaagaaattacactgtgggaaaactaccattgtaataagtgtagcaaaatctccttagatatctgaaaagtcatactggatggaatctgtaggaaacggttctattttgagggaagggggattcctttttgttttttaagtgaattcagaaaatgttataaataaatcttttggtttattataaaccttctgcttgctgattttttcccacagcatgtgattctgaaaatgtaactacaatattgacataaaaaataaacagtagtttttcttgttgaaacatacaaacat

SEQ ID NO: 276819 - DNA, 2420 bp, Homo sapiens
ctaaaggtcggcgaggcttctgaagacgcaattcctgcgacgcccgcggaggggccctggggggcggcgccgagcgtctggcctgtgttggctgtaggcaacgaaaggagccctcccggtctgcgccggatggccccgggcggtgactcggtccggagccctggaacgctacgcccacctggcggaaagcaccacggaaacgcatccttctgtggccactgttaggtctgccattttacacttttctgatctcctccttcccttctgtgagctatgtctcaggggtcagtgacattcagagatgtggccatagacttctcccaggaggagtggaaatggcttcagcctgctcaaagagatttgtacagatgtgtaatgttggagaactatggccatctggtctcactgggtctttccatttctaagccagatgtggtttccttattggagcaagggaaagaaccctggctggggaaaagggaagtgaaaagagatctgttttcagtttcagagtcaagtggtgagatcaaagacttttcaccaaaaaatgtcatttatgatgactcatcccagtatttgatcatggaaagaattctaagtcaaggccctgtgtattccagttttaaaggaggctggaaatgcaaggatcatactgagatgctgcaagaaaatcagggatgtattaggaaagtaacagtctctcatcaagaagccctggctcaacatatgaatatcagtactgtggagaggccctatggatgccatgaatgtggaaaaacttttggtcgacgcttttccctggtgttacaccagaggactcatactggagagaaaccatatgcatgtaaggaatgtggcaaaacctttagccagatttcaaaccttgtgaaacaccaaatgatacatactggaaagaaaccccatgagtgtaaggactgtaataaaacattcagttacctttcatttcttattgaacaccagagaacgcacactggggagaaaccttatgaatgtactgagtgtggaaaggcctttagccgtgcctccaacctcactcgacatcaaagaattcacataggaaagaaacaatatatatgtaggaaatgtggtaaagcatttagcagtggctcagaactcattcgccaccagattacacatactggagagaaaccttatgaatgcattgaatgtgggaaggcatttcgccgtttctcacaccttactcgacatcagagcatccatacaaccaaaaccccgtatgaatgtaatgaatgtaggaaagctttccgttgtcactcattccttattaaacatcagagaattcatgctggagaaaagctctatgaatgtgatgaatgtggtaaagttttcacttggcatgcatcccttattcaacatacgaagagtcacactggagagaaaccctatgcgtgtgctgaatgtgataaagccttcagccggagcttttccctcattctacatcagagaactcatactggagagaaaccctatgtatgtaaggtatgcaacaaatccttcagctggagctcaaaccttgctaaacatcagaggacacacactcttgacaacccctatgaatatgaaaattcatttaattaccactcattccttactgaacaccagtgaatttacactgcaaagaaaaactatgaatgtatggaattttttaaaaagaagtataatgccttacttcagagaactcttggaaagaagccttatgtgaaagtgatgactgtgaagtaatatggcccacactttattcaccaccctggagaaaaaaaaacccaggaatatgtggaaaagccattaataaccactcttttatttttttgcaataacaaggtgaaatcaatattgttgagaagattcttccatctggtaatgttgagaagacttcatttggtaggagtcccttactttacgtgtgtaaattcctaccaggaaagaatacatatccaatagattggagaaagccagagattagccctcattccgcatctgtcaaccaggacagaatgcatggacaagggatgagctttacaaagatgatgcactttggagatcagaaaattcatatttaagcaaagtgatacaaacacagtgatttgggaatgccttcatttacaatgcaatacttaaattttaatactcttgtaggagaaaaagcaactgtataaatgaatgtagagtgactttctgcaatatttcaaacctatatcagagaattacactgtgggaaaactaccattgtaataagtgtagcaaaatctccttagatatctgaaaagtcatactggatggaatctgtaggaaacggttctattttgagggaagggggattcctttttgttttttaagtgaattcagaaaatgttataaataaatcttttggtttatta

SEQ ID NO: 276820 - DNA, 3018 bp, Homo sapiens
atggattagccattctttattcctttactttcctaataaacttgctttcaccttatggattcgcctcaaattctttcttgtgcaagatccaagaaccctctcttagagtctgagatccggacccctttccagtagcaaaaggtcttagactgaagtactgactccacagtcgttgttaagaatcctagttgtttaatagaggcggtcttgggctcttgctgggccgcggtgtgttctgggaagtgtagtcacctgagtctccagttccttgtctctgggccgtgtgtgcacgccagcgaagcactgtgggagtcgtagtaggggaggaaaaccctataccctctggcgtgcggcgcaggagtttgggggaatgtagtcgccagagctctgcgttgtcttccggctttgggcgtggccacgatgcactctgggagtcgtagtaggggaagaacgtcctccgctcttttgcgcacggtcgctagaggttctgggaagtgtagttgcctgaagctcgtgttctttgtctttcgatgatgtgcgcttggcctcaaagcaccctgggagttgcagtggggcggggaaagccatatgctctctcgcgcggggtcgcggttgtttctgggaagtgtggtggcctgagttccacgttcttcgtttctccgctagttgtgcgcttggccgcgagacactctggcagttataggaacacaaaggtctgccattttacacttttctgatctcctccttcccttctgtgagctatgtctcaggggtcagtgacattcagagatgtggccatagacttctcccaggaggagtggaaatggcttcagcctgctcaaagagatttgtacagatgtgtaatgttggagaactatggccatctggtctcactgggtctttccatttctaagccagatgtggtttccttattggagcaagggaaagaaccctggctggggaaaagggaagtgaaaagagatctgttttcagtttcagagtcaagtggtgagatcaaagacttttcaccaaaaaatgtcatttatgatgactcatcccagtatttgatcatggaaagaattctaagtcaaggccctgtgtattccagttttaaaggaggctggaaatgcaaggatcatactgagatgctgcaagaaaatcagggatgtattaggaaagtaacagtctctcatcaagaagccctggctcaacatatgaatatcagtactgtggagaggccctatggatgccatgaatgtggaaaaacttttggtcgacgcttttccctggtgttacaccagaggactcatactggagagaaaccatatgcatgtaaggaatgtggcaaaacctttagccagatttcaaaccttgtgaaacaccaaatgatacatactggaaagaaaccccatgagtgtaaggactgtaataaaacattcagttacctttcatttcttattgaacaccagagaacgcacactggggagaaaccttatgaatgtactgagtgtggaaaggcctttagccgtgcctccaacctcactcgacatcaaagaattcacataggaaagaaacaatatatatgtaggaaatgtggtaaagcatttagcagtggctcagaactcattcgccaccagattacacatactggagagaaaccttatgaatgcattgaatgtgggaaggcatttcgccgtttctcacaccttactcgacatcagagcatccatacaaccaaaaccccgtatgaatgtaatgaatgtaggaaagctttccgttgtcactcattccttattaaacatcagagaattcatgctggagaaaagctctatgaatgtgatgaatgtggtaaagttttcacttggcatgcatcccttattcaacatacgaagagtcacactggagagaaaccctatgcgtgtgctgaatgtgataaagccttcagccggagcttttccctcattctacatcagagaactcatactggagagaaaccctatgtatgtaaggtatgcaacaaatccttcagctggagctcaaaccttgctaaacatcagaggacacacactcttgacaacccctatgaatatgaaaattcatttaattaccactcattccttactgaacaccagtgaatttacactgcaaagaaaaactatgaatgtatggaattttttaaaaagaagtataatgccttacttcagagaactcttggaaagaagccttatgtgaaagtgatgactgtgaagtaatatggcccacactttattcaccaccctggagaaaaaaaaacccaggaatatgtggaaaagccattaataaccactcttttatttttttgcaataacaaggtgaaatcaatattgttgagaagattcttccatctggtaatgttgagaagacttcatttggtaggagtcccttactttacgtgtgtaaattcctaccaggaaagaatacatatccaatagattggagaaagccagagattagccctcattccgcatctgtcaaccaggacagaatgcatggacaagggatgagctttacaaagatgatgcactttggagatcagaaaattcatatttaagcaaagtgatacaaacacagtgatttgggaatgccttcatttacaatgcaatacttaaattttaatactcttgtaggagaaaaagcaactgtataaatgaatgtagagtgactttctgcaatatttcaaacctatatcagagaattacactgtgggaaaactaccattgtaataagtgtagcaaaatctccttagatatctgaaaagtcatactggatggaatctgtaggaaacggttctattttgagggaagggggattcctttttgttttttaagtgaattcagaaaatgttataaataaatcttttggtttattataaaccttctgcttgctgattttttcccacagcatgtgattctgaaaatgtaactacaatattgacataaaaaataaacagtagtttttcttgttgaaacatacaaacat

SEQ ID NO: 276821 - DNA, 2597 bp, Homo sapiens
ctaaaggtcggcgaggcttctgaagacgcaattcctgcgacgcccgcggaggggccctggggggcggcgccgagcgtctggcctgtgttggctgtaggcaacgaaaggagccctcccggtctgcgccggatggccccgggcggtgactcggtccggagccctggaacgctacgcccacctggcggaaagcaccacggaaacgcatccttctgtggccactgttaggtctgccattttacacttttctgatctcctccttcccttctgtgagctatgtctcaggggtcagtgacattcagagatgtggccatagacttctcccaggaggagtggaaatggcttcagcctgctcaaagagatttgtacagatgtgtaatgttggagaactatggccatctggtctcactgggtctttccatttctaagccagatgtggtttccttattggagcaagggaaagaaccctggctggggaaaagggaagtgaaaagagatctgttttcaggtaactgaagtggtgaaaaactacagaggagaggactactgtaattcccagccttgttcctttatagtttcagagtcaagtggtgagatcaaagacttttcaccaaaaaatgtcatttatgatgactcatcccagtatttgatcatggaaagaattctaagtcaaggccctgtgtattccagttttaaaggaggctggaaatgcaaggatcatactgagatgctgcaagaaaatcagggatgtattaggaaagtaacagtctctcatcaagaagccctggctcaacatatgaatatcagtactgtggagaggccctatggatgccatgaatgtggaaaaacttttggtcgacgcttttccctggtgttacaccagaggactcatactggagagaaaccatatgcatgtaaggaatgtggcaaaacctttagccagatttcaaaccttgtgaaacaccaaatgatacatactggaaagaaaccccatgagtgtaaggactgtaataaaacattcagttacctttcatttcttattgaacaccagagaacgcacactggggagaaaccttatgaatgtactgagtgtggaaaggcctttagccgtgcctccaacctcactcgacatcaaagaattcacataggaaagaaacaatatatatgtaggaaatgtggtaaagcatttagcagtggctcagaactcattcgccaccagattacacatactggagagaaaccttatgaatgcattgaatgtgggaaggcatttcgccgtttctcacaccttactcgacatcagagcatccatacaaccaaaaccccgtatgaatgtaatgaatgtaggaaagctttccgttgtcactcattccttattaaacatcagagaattcatgctggagaaaagctctatgaatgtgatgaatgtggtaaagttttcacttggcatgcatcccttattcaacatacgaagagtcacactggagagaaaccctatgcgtgtgctgaatgtgataaagccttcagccggagcttttccctcattctacatcagagaactcatactggagagaaaccctatgtatgtaaggtatgcaacaaatccttcagctggagctcaaaccttgctaaacatcagaggacacacactcttgacaacccctatgaatatgaaaattcatttaattaccactcattccttactgaacaccagtgaatttacactgcaaagaaaaactatgaatgtatggaattttttaaaaagaagtataatgccttacttcagagaactcttggaaagaagccttatgtgaaagtgatgactgtgaagtaatatggcccacactttattcaccaccctggagaaaaaaaaacccaggaatatgtggaaaagccattaataaccactcttttatttttttgcaataacaaggtgaaatcaatattgttgagaagattcttccatctggtaatgttgagaagacttcatttggtaggagtcccttactttacgtgtgtaaattcctaccaggaaagaatacatatccaatagattggagaaagccagagattagccctcattccgcatctgtcaaccaggacagaatgcatggacaagggatgagctttacaaagatgatgcactttggagatcagaaaattcatatttaagcaaagtgatacaaacacagtgatttgggaatgccttcatttacaatgcaatacttaaattttaatactcttgtaggagaaaaagcaactgtataaatgaatgtagagtgactttctgcaatatttcaaacctatatcagagaattacactgtgggaaaactaccattgtaataagtgtagcaaaatctccttagatatctgaaaagtcatactggatggaatctgtaggaaacggttctattttgagggaagggggattcctttttgttttttaagtgaattcagaaaatgttataaataaatcttttggtttattataaaccttctgcttgctgattttttcccacagcatgtgattctgaaaatgtaactacaatattgacataaaaaataaacagtagtttttcttgttgaaacatacaaacat

SEQ ID NO: 276822 - DNA, 1776 bp, Homo sapiens
ctaaaggtcggcgaggcttctgaagacgcaattcctgcgacgcccgcggaggggccctggggggcggcgccgagcgtctggcctgtgttggctgtaggcaacgaaaggagccctcccggtctgcgccggatggccccgggcggtgactcggtccggagccctggaacgctacgcccacctggcggaaagcaccacggaaacgcatccttctgtggccactgttaggtctgccattttacacttttctgatctcctccttcccttctgtgagctatgtctcaggggtcagtgacattcagagatgtggccatagacttctcccaggaggagtggaaatggcttcagcctgctcaaagagatttgtacagatgtgtaatgttggagaactatggccatctggtctcactgggtctttccatttctaagccagatgtggtttccttattggagcaagggaaagaaccctggctggggaaaagggaagtgaaaagagatctgttttcagtttcagagtcaagtggtgagatcaaagacttttcaccaaaaaatgtcatttatgatgactcatcccagtatttgatcatggaaagaattctaagtcaaggccctgtgtattccagttttaaaggaggctggaaatgcaaggatcatactgagatgctgcaagaaaatcagggatgtattaggaaagtaacagtctctcatcaagaagccctggctcaacatatgaatatcagtactgtggagaggccctatggatgccatgaatgtggaaaaacttttggtcgacgcttttccctggtgttacaccagaggactcatactggagagaaaccatatgcatgtaaggaatgtggcaaaacctttagccagatttcaaaccttgtgaaacaccaaatgatacatactggaaagaaaccccatgagtgtaaggactgtaataaaacattcagttacctttcatttcttattgaacaccagagaacgcacactggggagaaaccttatgaatgtactgagtgtggaaaggcctttagccgtgcctccaacctcactcgacatcaaagaattcacataggaaagaaacaatatatatgtaggaaatgtggtaaagcatttagcagtggctcagaactcattcgccaccagattacacatactggagagaaaccttatgaatgcattgaatgtgggaaggcatttcgccgtttctcacaccttactcgacatcagagcatccatacaaccaaaaccccgtatgaatgtaatgaatgtaggaaagctttccgttgtcactcattccttattaaacatcagagaattcatgctggagaaaagctctatgaatgtgatgaatgtggtaaagttttcacttggcatgcatcccttattcaacatacgaagagtcacactggagagaaaccctatgcgtgtgctgaatgtgataaagccttcagccggagcttttccctcattctacatcagagaactcatactggagagaaaccctatgtatgtaaggtatgcaacaaatccttcagctggagctcaaaccttgctaaacatcagaggacacacactcttgacaacccctatgaatatgaaaattcatttaattaccactcattccttactgaacaccagtgaatttacactgcaaagaaaaactatgaatgtatggaattttttaaaaagaagtataatgccttacttcagagaactcttggaaagaagccttatgtgaaagttccgttgaagccgtcgggtaccgagctc

SEQ ID NO: 276823 - DNA, 867 bp, Homo sapiens
acggaacgctatacaggaatcagctatcaccgggaacagctatgacctggaaatcattatgaccaggtaatatggtatcacacggatacagctatccatgcgagaaaaaaatatccaaggagtatgtggaatagccatgaataaccatctataataattaggcaataccaaggtgaaaccttatgaatgtactgagtgtggaaaggcctttagccgtgcctccaacctcactcgacatcaaagaattcacataggaaagaaacaatatatatgtaggaaatgtggtaaagcatttagcagtggctcagaactcattcgccaccagattacacatactggagagaaaccttatgaatgcattgaatgtgggaaggcatttcgccgtttctcacaccttactcgacatcagagcatccatacaaccaaaaccccgtatgaatgtaatgaatgtaggaaagctttccgttgtcactcattccttattaaacatcagagaattcatgctggagaaaagctctatgaatgtgatgaatgtggtaaagttttcacttggcatgcatcccttattcaacatacgaagaaattacactgtgggaaaactaccattgtaataagtgtagcaaaatctccttagatatctgaaaagtcatactggatggaatctgtaggaaacggttctattttgagggaagggggattcctttttgttttttaagtgaattcagaaaatgttataaataaatcttttggtttattataaaccttctgcttgctgattttttcccacagcatgtgattctgaaaatgtaactacaatattgacataaaaaataaacagtagtttttcttgttgaaacatacaaacat

SEQ ID NO: 276824 - DNA, 307 bp, Homo sapiens
tcagtgtttttcccattgcccttaatgttctccagaaggatcctaagaaagctcccaatctggatctcttaaaggtcctacaaatacacaacataagaagctaaagaggaaattcataaggtccatttgaataccttggaaactactgaaagaataaaggggtcaggaggaaacccagacgagtcatgagtgtgtttgctgcctcatctacagatggaggggggccaagctcctgttcagcatcacctgtaacaagaaggcattgaagaacatgaatctttcaaaataaaatggtctagttctgcaa

SEQ ID NO: 276825 - DNA, 908 bp, Homo sapiens
ccaaagtgaaccaaatgctaatgcacattttattggatgaaaagacaaacaacataattatacttgaatttcagggaatcaaaagtagtacaacagcgtgtgcaccagactccagggcagggttcgtaagttagccatacacatgctcatttttccaagctggggaagtttgctaaaatgagctgagggctacttcaccagactgacaaaaaggaaaatgtctatcagtttttcttttgttctctctagatcctgttcaagtgtacactgagccagcaggttcaccagaaagctattgagcgtttgctggaacacattatgcagggtgaatttcttctggaatgttgccaaggattttttatgcttctgtggcaggcatttcttgaacattgtcatttagccaagcaaagaagattttcttaaaggatagaaaatgtttaaaaatttttgtttgtttgaagataggttaaatggctatatgatctcaggataagacagagaaaatcacttatttctctaagtgatctgattaggttagtgatgttttgcctttaaacagattcatcattattcctaaagtattgctgtattaatactgtcttctagaaagtatccaccagtgcctacttttcttcgatatcattagctgtttttcgaaactgaatttgctcttcagagatttctcatatgtttgcgtataaggaactactggtaatagccaagaaaatttggaggtgcagagaacatgctgaaacagaatttttcactttcaattctagaactatgccataaaaaaaaaggaaaatgtaaaaatgtctttatattagagcagatattttaaaagtattgcaaattcaatgataaattctaaggttaaaattggacacataaaaaatacaatatataaa

SEQ ID NO: 276826 - DNA, 691 bp, Homo sapiens
cgcgcggccgcggcgctacctttctccaaacaacgttgccacacgcggagagcacggagatttctggggctttggagggaatcgtgagcgggcgggaggaggccggggaccacacagagaataacttgtctgactaccagtattcttggatgcagaagtgctgaagatgagcacacacacgtacggagaatttctggagaattcagctgctcagaacaagaactgagatccagagagatgatgactttgcccatagaccaaacaaagaaatacatgtttcagtcctgtgtcctcctgctatgtgtgtccggaattggtgggttcttggtctcactgacttcaagaatgaagctgcggaccctcgcggaccgtgtgtgaatgcctgctctgtgagccctcagaatctactggctgaatgagtgcgtggaggaaatgtgctcagagctgctgtgtgtcatcctgtgtttgaagtgctcctgcagctatcattcatccagttaagaatttgaagaagtgtgtgcacaaaggtgacactttgcttatcctttccccaaaattacagttctaaaattttcctatacaatccttctaaattggatgacagttgtcccattttcctttgcaggatgtaccagactattaatattggtgaccatgggctagggagtatgttcttgataaatttacaaaa

SEQ ID NO: 276827 - DNA, 201 bp, Homo sapiens
cgcgcggccgcggcgctacctttctccaaacaacgttgccacacgcggagagcacggagatttctggggctttggagggaatcgtgagcgggcgggaggaggccggggaccacacaggtgagcccccgcccgcgccctgcccgggacggcggcgggcgctgccagccccgctcccccgcacccggggtccgcacggtgcct

SEQ ID NO: 276828 - DNA, 2132 bp, Homo sapiens
cgcgcggccgcggcgctacctttctccaaacaacgttgccacacgcggagagcacggagatttctggggctttggagggaatcgtgagcgggcgggaggaggccggggaccacacagagaataacttgtctgactaccagtattcttggatgcagaagtgctgaagatgagcacacacacgtacggagaatttctggagaattcagctgctcagaacaagaactgagatccagagagatgatgactttgcccatagaccaaacaaagaaatacatgtttcagtcctgtgtcctcctgctatgtgtgtccggaattggtgggttcttggtctcactgacttcaagaatgaagctgcggaccctcgcggaccgtgtgtgaatgcctgctctgtgagccctcagaatctactggctgaatgagtgcgtggaggaaatgtgctcagagctgctgtgtgtcatcctgtgtttgaagtgctcctgcagctatcattcatccagttaagaatttgaagaagtgtgtgcacaaagacggagtctcactctgttgcccaggctggagtgcagtggcacaatctcggctcactgcaacctctacctcctggattcaagcggttttcctgcctcagcctccagagtaacagggattacaggcatactccaccttgccctgctgattttgtatttttagtagagacaagagtttcaccatgttggccaggctggtcttgaactcctgacctcaagtgatccactgcctcagcctcccaaagtgctgggattataggcgtgagccactgcgcctggccaaatgctctactttttaatcaatgttttccaaaatagggatttttgctatgtgctttagaaattagagaacaaacggtgataatatatgctaaacttaaaattagtatgcctccttttatagacaacaagaactttgtcacttcccagtttgtcttgtcattcaggaggctcagagctacgatctgtgcccactcgtgctgcctcttcttaactttgatttcctgaagcagcgatttcatctccgtttcccctcatcacctgttcttttaactgtttaaaaacagcattacatgttgttgcaagtggcctcaaattctttttggtagaagggaaattgtaatccatgagaagaaaaaaattttcctaactattctcaggtgtgtttaagggctgcattccatgatgctatcagtgccttctttcagctcacaggatatcggccatgttaatgagtctgatgttgctagtatcacaggcaccggaaaatatgcacattatgctggagcattagaatgcaacagaaagagccctgggcttggagtatgcagaactggttcttgttacaactcctcttactagtgggctctggaagaaaacacattgaattcatgatcatggttaacctttggagagagagaggagaccaggatgaaggagccagtcgaagatcctgttcaagtgtacactgagccagcaggttcaccagaaagctattgagcgtttgctggaacacattatgcagggtgaatttcttctggaatgttgccaaggattttttatgcttctgtggcaggcatttcttgaacattgtcatttagccaagcaaagaagattttcttaaaggatagaaaatgtttaaaaatttttgtttgtttgaagataggttaaatggctatatgatctcaggataagacagagaaaatcacttatttctctaagtgatctgattaggttagtgatgttttgcctttaaacagattcatcattattcctaaagtattgctgtattaatactgtcttctagaaagtatccaccagtgcctacttttcttcgatatcattagctgtttttcgaaactgaatttgctcttcagagatttctcatatgtttgcgtataaggaactactggtaatagccaagaaaatttggaggtgcagagaacatgctgaaacagaatttttcactttcaattctagaactatgccataaaaaaaaaggaaaatgtaaaaatgtctttatattagagcagatattttaaaagtattgcaaattcaatgataaattctaaggttaaaattggacacataaaaaatacaatatataaa

SEQ ID NO: 276829 - DNA, 1267 bp, Homo sapiens
cgcgcggccgcggcgctacctttctccaaacaacgttgccacacgcggagagcacggagatttctggggctttggagggaatcgtgagcgggcgggaggaggccggggaccacacagagaataacttgtctgactaccagtattcttggatgcagaagtgctgaagatgagcacacacacgtacggagaatttctggagaattcagctgctcagaacaagaactgagatccagagagatgatgactttgcccatagaccaaacaaagaaatacatgtttcagtcctgtgtcctcctgctatgtgtgtccggaattggtgggttcttggtctcactgacttcaagaatgaagctgcggaccctcgcgctcacaggatatcggccatgttaatgagtctgatgttgctagtatcacaggcaccggaaaatatgcacattatgctggagcattagaatgcaacagaaagagccctgggcttggagtatgcagaactggttcttgttacaactcctcttactagtgggctctggaagaaaacacattgaattcatgatcatggttaacctttggagagagagaggagaccaggatgaaggagccagtcgaagatcctgttcaagtgtacactgagccagcaggttcaccagaaagctattgagcgtttgctggaacacattatgcagggtgaatttcttctggaatgttgccaaggattttttatgcttctgtggcaggcatttcttgaacattgtcatttagccaagcaaagaagattttcttaaaggatagaaaatgtttaaaaatttttgtttgtttgaagataggttaaatggctatatgatctcaggataagacagagaaaatcacttatttctctaagtgatctgattaggttagtgatgttttgcctttaaacagattcatcattattcctaaagtattgctgtattaatactgtcttctagaaagtatccaccagtgcctacttttcttcgatatcattagctgtttttcgaaactgaatttgctcttcagagatttctcatatgtttgcgtataaggaactactggtaatagccaagaaaatttggaggtgcagagaacatgctgaaacagaatttttcactttcaattctagaactatgccataaaaaaaaaggaaaatgtaaaaatgtctttatattagagcagatattttaaaagtattgcaaattcaatgataaattctaaggttaaaattggacacataaaaaatacaatatataaa

SEQ ID NO: 276830 - DNA, 2468 bp, Homo sapiens
agccgccacactttcccaagcccgcaggcgccccccccaacaccagcgctgcacccccgacccattccccgcggccccctccaggagaaaaaatgaaaccagactggccgaggaggggggcggcagggaccagggtgcggagcagaggtgagggagacgggacttactttgcgaggcgcggtgcagggcgccgccgacgagaaataaaggccccgatacgggctgcctggagccccccgagcgcagcaatgtcagggctccagtccgggcggcgttggcggccgcaggggacggggacgggcgcgcgtgcggcgggcgctctcgctgcgctccggctcgggccccggctccgcgcggctccgctcctggctcccctctggctcctggcaccaactccggacagtcacatgacgccggcgccgctcgctctgcgagcctcccggggctggcgggagaataacttgtctgactaccagtattcttggatgcagaagtgctgaagatgagcacacacacgtacggagaatttctggagaattcagctgctcagaacaagaactgagatccagagagatgatgactttgcccatagaccaaacaaagaaatacatgtttcagtcctgtgtcctcctgctatgtgtgtccggaattggtgggttcttggtctcactgacttcaagaatgaagctgcggaccctcgcggaccgtgtgtgaatgcctgctctgtgagccctcagaatctactggctgaatgagtgcgtggaggaaatgtgctcagagctgctgtgtgtcatcctgtgtttgaagtgctcctgcagctatcattcatccagttaagaatttgaagaagtgtgtgcacaaagacggagtctcactctgttgcccaggctggagtgcagtggcacaatctcggctcactgcaacctctacctcctggattcaagcggttttcctgcctcagcctccagagtaacagggattacaggcatactccaccttgccctgctgattttgtatttttagtagagacaagagtttcaccatgttggccaggctggtcttgaactcctgacctcaagtgatccactgcctcagcctcccaaagtgctgggattataggcgtgagccactgcgcctggccaaatgctctactttttaatcaatgttttccaaaatagggatttttgctatgtgctttagaaattagagaacaaacggtgataatatatgctaaacttaaaattagtatgcctccttttatagacaacaagaactttgtcacttcccagtttgtcttgtcattcaggaggctcagagctacgatctgtgcccactcgtgctgcctcttcttaactttgatttcctgaagcagcgatttcatctccgtttcccctcatcacctgttcttttaactgtttaaaaacagcattacatgttgttgcaagtggcctcaaattctttttggtagaagggaaattgtaatccatgagaagaaaaaaattttcctaactattctcaggtgtgtttaagggctgcattccatgatgctatcagtgccttctttcagctcacaggatatcggccatgttaatgagtctgatgttgctagtatcacaggcaccggaaaatatgcacattatgctggagcattagaatgcaacagaaagagccctgggcttggagtatgcagaactggttcttgttacaactcctcttactagtgggctctggaagaaaacacattgaattcatgatcatggttaacctttggagagagagaggagaccaggatgaaggagccagtcgaagatcctgttcaagtgtacactgagccagcaggttcaccagaaagctattgagcgtttgctggaacacattatgcagggtgaatttcttctggaatgttgccaaggattttttatgcttctgtggcaggcatttcttgaacattgtcatttagccaagcaaagaagattttcttaaaggatagaaaatgtttaaaaatttttgtttgtttgaagataggttaaatggctatatgatctcaggataagacagagaaaatcacttatttctctaagtgatctgattaggttagtgatgttttgcctttaaacagattcatcattattcctaaagtattgctgtattaatactgtcttctagaaagtatccaccagtgcctacttttcttcgatatcattagctgtttttcgaaactgaatttgctcttcagagatttctcatatgtttgcgtataaggaactactggtaatagccaagaaaatttggaggtgcagagaacatgctgaaacagaatttttcactttcaattctagaactatgccataaaaaaaaaggaaaatgtaaaaatgtctttatattagagcagatattttaaaagtattgcaaattcaatgataaattctaaggttaaaattggacacataaaaaatacaatatataaa

SEQ ID NO: 276831 - DNA, 3023 bp, Homo sapiens
cctgaatccttggagactgacatttttcccccctaaaggcatagacaacaaaagaaattttattgagaggaaaacacaagtccttaaactgcaaagatgtttgccaggatgtctgatctccatgttctgctgttaatggctctggtgggaaagacagcctgtgggttctccctgatgtctttattggaaagcctggacccagactggacccctgaccagtatgattacagctacgaggattataatcaggaagagaacaccagtagcacacttacccatgctgagaatcctgactggtactacactgaggaccaagctgatccatgccagcccaacccctgtgaacacggtggggactgcctcgtccatgggagcaccttcacatgcagctgcctggctcctttctctgggaataagtgtcagaaagtgcaaaatacgtgcaaggacaacccatgtggccggggccaatgtctcattacccagagtcctccctactaccgctgtgtctgtaaacacccttacacaggtcccagctgctcccaagtggttcctgtatgcaggccaaacccctgccagaatggggctacctgctcccggcataagcggagatccaagttcacctgtgcctgtcccgaccagttcaaggggaaattctgtgaaataggttctgatgactgctatgttggcgatggctactcttaccgagggaaaatgaataggacagtcaaccagcatgcgtgcctttactggaactcccacctcctcttgcaggagaattacaacatgtttatggaggatgctgaaacccatgggattggggaacacaatttctgcagaaacccagatgcggacgaaaagccctggtgctttattaaagttaccaatgacaaggtgaaatgggaatactgtgatgtctcagcctgctcagcccaggacgttgcctacccagaggaaagccccactgagccatcaaccaagcttccggggtttgactcctgtggaaagactgagatagcagagaggaagatcaagagaatctatggaggctttaagagcacggcgggcaagcacccatggcaggcgtccctccagtcctcgctgcctctgaccatctccatgccccagggccacttctgtggtggggcgctgatccacccctgctgggtgctcactgctgcccactgcaccgacataaaaaccagacatctaaaggtggtgctaggggaccaggacctgaagaaagaagaatttcatgagcagagctttagggtggagaagatattcaagtacagccactacaatgaaagagatgagattccccacaatgatattgcattgctcaagttaaagccagtggatggtcactgtgctctagaatccaaatacgtgaagactgtgtgcttgcctgatgggtcctttccctctgggagtgagtgccacatctctggctggggtgttacagaaacaggaaaagggtcccgccagctcctggatgccaaagtcaagctgattgccaacactttgtgcaactcccgccaactctatgaccacatgattgatgacagtatgatctgtgcaggaaatcttcagaaacctgggcaagacacctgccagggtgactctggaggccccctgacctgtgagaaggacggcacctactacgtctatgggatagtgagctggggcctggagtgtgggaagaggccaggggtctacacccaagttaccaaattcctgaattggatcaaagccaccatcaaaagtgaaagtggcttctaaggtactgtcttctggacctcagagcccactctccttggcaccctgacaccgggaggcctcatggccaacaatggacacctccagagcctccaggggaccacacagtagactatccctactctaagcagagacaactgccacccagcctgggccttcccagaccagcatttgcacaatatcaccaggcttcttctgcctcccttggtaacccaaggaatgatggaatcaacacaacatagtatgtttgctttccttacccaattgtaccttctagaaaatcagtgttcacagagactgcctccaccacaggcatcctgcaaatgcagactccagaatccccagcatcagcgggaaccaccatcacatctttattcctcagcccagacactcgaggcactcaacagaatcagccatccacgtctaggtatcagagaggaccacaaatacaacattctccatctgctttcagagttattattttaataaaggaagatctgggatgggctggtgggccattccagcttgccgaaatcaaagccatctgaagcctgtctctggtgaacaaacttcctctctggcctctcaggaatcagggtggcatggctcacaacagcagggccttcttctttttgacgtgcagaatctcagtggcatctgggttcacctccccactctgatgatctccagcctccactgcttctgccccccgctgctgaaatcaaacataccccaagttaaaatgaagctcccccacccccactcccggccccggttcccacaggacacgctaagaagcacagggagcatttaacaggctcaccctccctttccttttcccctcttctaccctccccaagaaaaagggccttcaaggcaggaatgagaaagcaaagccaatctctcatttagacctggcttctttcttctgaacaaagtagggttcaaaatgcagactgtcatatccagcgagtccctgaccctttctgcgaatgtaacgagcaagcagtcagcacagcctgggctgccctggcccgggattgatgtagccccggtaggtttgcctctgcagaactaatggctgtgacttcagagaaagccctgcaggaagtttaacctgcgtgtcatctgcctggtcatctcagacccatgaaattaggcgccttgtttgagctgcgtttcacacttctttagagctagctgacctttggccaaaaataaactttgaaaagaaaaaaaaaagtttg

SEQ ID NO: 276832 - DNA, 3105 bp, Homo sapiens
  misc_feature (315)..(315): n is a, c, g, or t
cctgaatccttggagactgacatttttcccccctaaaggcatagacaacaaaagaaattttattgagaggaaaacacaagtccttaaactgcaaagatgtttgccaggatgtctgatctccatgttctgctgttaatggctctggtgggaaagacagcctgtgggttctccgctgatgtctttattcgggaaagcgctggagcccagagctggatcccatggaccagctagtgattacagcgtacgcaggattagtaccatcagcgtagagcagacacagcgcgacggtagccgaacaaactgtagccgcagtgncgtgcagtaattcgctggagctggctatcatagcacatgtgatgtgacacagaagcatggagtcgcatgcactgaccgcatagcacgcctggtgaacgagcaggtagggagacatggccgtctgtcctatgtggagtcagcttcacgattgcagcgtgggctggcttccgtttctctgggaataagtgtcagaatgcaaaatacgtgcaaggacaacccatgtggccggggccaatgtctcattacccagagtcctccctactaccgctgtgtctgtaaacacccttacacaggtcccagctgctcccaagtggttcctgtatgcaggccaaacccctgccagaatggggctacctgctcccggcataagcggagatccaagttcacctgtgcctgtcccgaccagttcaaggggaaattctgtgaaataggttctgatgactgctatgttggcgatggctactcttaccgagggaaaatgaataggacagtcaaccagcatgcgtgcctttactggaactcccacctcctcttgcaggagaattacaacatgtttatggaggatgctgaaacccatgggattggggaacacaatttctgcagaaacccagatgcggacgaaaagccctggtgctttattaaagttaccaatgacaaggtgaaatgggaatactgtgatgtctcagcctgctcagcccaggacgttgcctacccagaggaaagccccactgagccatcaaccaagcttccggggtttgactcctgtggaaagactgagatagcagagaggaagatcaagagaatctatggaggctttaagagcacggcgggcaagcacccatggcaggcgtccctccagtcctcgctgcctctgaccatctccatgccccagggccacttctgtggtggggcgctgatccacccctgctgggtgctcactgctgcccactgcaccgacataaaaaccagacatctaaaggtggtgctaggggaccaggacctgaagaaagaagaatttcatgagcagagctttagggtggagaagatattcaagtacagccactacaatgaaagagatgagattccccacaatgatattgcattgctcaagttaaagccagtggatggtcactgtgctctagaatccaaatacgtgaagactgtgtgcttgcctgatgggtcctttccctctgggagtgagtgccacatctctggctggggtgttacagaaacaggaaaagggtcccgccagctcctggatgccaaagtcaagctgattgccaacactttgtgcaactcccgccaactctatgaccacatgattgatgacagtatgatctgtgcaggaaatcttcagaaacctgggcaagacacctgccagggtgactctggaggccccctgacctgtgagaaggacggcacctactacgtctatgggatagtgagctggggcctggagtgtgggaagaggccaggggtctacacccaagttaccaaattcctgaattggatcaaagccaccatcaaaagtgaaagtggcttctaaggtactgtcttctggacctcagagcccactctccttggcaccctgacaccgggaggcctcatggccaacaatggacacctccagagcctccaggggaccacacagtagactatccctactctaagcagagacaactgccacccagcctgggccttcccagaccagcatttgcacaatatcaccaggcttcttctgcctcccttggtaacccaaggaatgatggaatcaacacaacatagtatgtttgctttccttacccaattgtaccttctagaaaatcagtgttcacagagactgcctccaccacaggcatcctgcaaatgcagactccagaatccccagcatcagcgggaaccaccatcacatctttattcctcagcccagacactcgaggcactcaacagaatcagccatccacgtctaggtatcagagaggaccacaaatacaacattctccatctgctttcagagttattattttaataaaggaagatctgggatgggctggtgggccattccagcttgccgaaatcaaagccatctgaagcctgtctctggtgaacaaacttcctctctggcctctcaggaatcagggtggcatggctcacaacagcagggccttcttctttttgacgtgcagaatctcagtggcatctgggttcacctccccactctgatgatctccagcctccactgcttctgccccccgctgctgaaatcaaacataccccaagttaaaatgaagctcccccacccccactcccggccccggttcccacaggacacgctaagaagcacagggagcatttaacaggctcaccctccctttccttttcccctcttctaccctccccaagaaaaagggccttcaaggcaggaatgagaaagcaaagccaatctctcatttagacctggcttctttcttctgaacaaagtagggttcaaaatgcagactgtcatatccagcgagtccctgaccctttctgcgaatgtaacgagcaagcagtcagcacagcctgggctgccctggcccgggattgatgtagccccggtaggtttgcctctgcagaactaatggctgtgacttcagagaaagccctgcaggaagtttaacctgcgtgtcatctgcctggtcatctcagacccatgaaattaggcgccttgtttgagctgcgtttcacacttctttagagctagctgacctttggccaaaaataaactttgaaaagaaaaaaaaaagtttg

SEQ ID NO: 276833 - DNA, 2969 bp, Homo sapiens
cctgaatccttggagactgacatttttcccccctaaaggcatagacaacaaaagaaattttattgagaggaaaacacaagtccttaaactgcaaagatgtttgccaggatgtctgatctccatgttctgctgttaatggctctggtgggaaagacagcctgtgggttctccctgatgtctttattggaaagcctggacccagactggacccctgaccagtatgattacagctacgaggattataatcaggaagagaacaccagtagcacacttacccatgctgagaatcctgactggtactacactgaggaccaagctgatccatgccagcccaacccctgtgaacacggtggggactgcctcgtccatgggagcaccttcacatgcagctgcctggctcctttctctgggaataagtgtcagaaagtgcaaaatacgtgcaaggacaacccatgtggccggggccaatgtctcattacccagagtcctccctactaccgctgtgtctgtaaacacccttacacaggtcccagctgctcccaagtggttcctgtatgcaggccaaacccctgccagaatggggctacctgctcccggcataagcggagatccaagttcacctgtgcctgtcccgaccagttcaaggggaaattctgtgaaataggttctgatgactgctatgttggcgatggctactcttaccgagggaaaatgaataggacagtcaaccagcatgcgtgcctttactggaactcccacctcctcttgcaggagaattacaacatgtttatggaggatgctgaaacccatgggattggggaacacaatttctgcagaaacccagatgcggacgaaaagccctggtgctttattaaagttaccaatgacaaggtgaaatgggaatactgtgatgtctcagcctgctcagcccaggacgttgcctacccagaggaaagccccactgagccatcaaccaagcttccggggtttgactcctgtggaaagactgagatagcagagaggaagatcaagagaatctatggaggctttaagagcacggcgggcaagcacccatggcaggcgtccctccagtcctcgctgcctctgaccatctccatgccccagggccacttctgtggtggggcgctgatccacccctgctgggtgctcactgctgcccactgcaccgacataaaaaccagacatctaaaggtggtgctaggggaccaggacctgaagaaagaagaatttcatgagcagagctttagggtggagaagatattcaagtacagccactacaatgaaagagatgagattccccacaatgatattgcattgctcaagttaaagccagtggatggtcactgtgctctagaatccaaatacgtgaagactgtgtgcttgcctgatgggtcctttccctctgggagtgagtgccacatctctggctggggtgttacagaaacaggaaaagggtcccgccagctcctggatgccaaagtcaagctgattgccaacactttgtgcaactcccgccaactctatgaccacatgattgatgacagtatgatctgtgcaggaaatcttcagaaacctgggcaagacacctgccagggtgactctggaggccccctgacctgtgagaaggacggcacctactacgtctatgggatagtgagctggggcctggagtgtgggaagaggccaggggtctacacccaagttaccaaattcctgaattggatcaaagccaccatcaaaagtgaaagtggcttctaaggtactgtcttctggacctcagagcccactctccttggcaccctgacaccgggaggcctcatggccaacaatggacacctccagagcctccaggggaccacacagtagactatccctactctaagcagagacaactgccacccagcctgggccttcccagaccagcatttgcacaatatcaccaggcttcttctgcctcccttggtaacccaaggaatgatggaatcaacacaacatagtatgtttgctttccttacccaattgtaccttctagaaaatcagtgttcacagagactgcctccaccacaggcatcctgcaaatgcagactccagaatccccagcatcagcgggaaccaccatcacatctttattcctcagcccagacactcgaggcactcaacagaatcagccatccacgtctaggtatcagagaggaccacaaatacaacattctccatctgctttcagagttattattttaataaaggaagatctgggatgggctggtgggccattccagcttgccgaaatcaaagccatctgaagcctgtctctggtgaacaaacttcctctctggcctctcaggaatcagggtggcatggctcacaacagcagggccttcttctttttgacgtgcagaatctcagtggcatctgggttcacctccccactctgatgatctccagcctccactgcttctgccccccgctgctgaaatcaaacataccccaagttaaaatgaagctcccccacccccactcccggccccggttcccacaggacacgctaagaagcacagggagcatttaacaggctcaccctccctttccttttcccctcttctaccctccccaagaaaaagggccttcaaggcaggaatgagaaagcaaagccaatctctcatttagacctggcttctttcttctgaacaaagtagggttcaacaagcagtcagcacagcctgggctgccctggcccgggattgatgtagccccggtaggtttgcctctgcagaactaatggctgtgacttcagagaaagccctgcaggaagtttaacctgcgtgtcatctgcctggtcatctcagacccatgaaattaggcgccttgtttgagctgcgtttcacacttctttagagctagctgacctttggccaaaaataaactttgaaaagaaaaaaaaaagtttg

SEQ ID NO: 276834 - DNA, 1485 bp, Homo sapiens
ggctggcggccccgccccgccccgcccggctgctccatggcgctgtgcgaggccgcgggctgcgggagtgccctgctctggcctcgcttgttgctcttcggggactccatcacccagttttccttccagcagggtggatggggagcatcgctggctgacaggctggtcagaaaatgtgatgttctgaatcgtggattttcaggttacaataccaggtgggccaaaattatccttccaagattaatcaggaaaggaaacagtttggacatcccagtagcagttacaattttctttggggccaatgacagtgcactaaaagatgagaatcccaagcagcacattcccctggaggagtacgctgcgaacctaaagagcatggtgcagtacctgaagtccgtggacatccctgagaatcgagtcattctcatcacgccgaccccactttgtgaaacagcctgggaagaacagtgcatcatacaaggttgcaaactaaatcgcctgaactctgttgttggtgaatatgccaatgcgtgtttacaagtggcccaagactgtgggactgacgtacttgacctgtggaccctgatgcaggacagccaggacttctcatcttatttatcagatggactacatttgtctccaaaggggaatgaatttttgttctcgcatctctggcctttgatagagaaaaaggtctcttctctacctttgctgcttccttactggcgggatgtagcagaagcaaaacctgaattaagtctgctgggagatggagaccattagccaatcacaggagacccaaatctgcttgttatctacagaactcaaagttgtcaatacgtagaggtacgcttttttcctcaggcttaaacctttgccactgatattaataataaaagtattagatgatttttcagggaagttttatacttaggtccattgtgtttcgacagtatttattaatgcagatatcagtgctacagctataaaatataccctgagcagcttgttaattctataaatgacaaagactatgtttttaaaaagtcacaattttataaaaatggtttttcttacattcttttgagaactgtttcactcatacatacacccacacaccccactcaaccttgtatcaaattccaaaagtgtaactaaagtataagaatatcatgactagttaaaagatagcaaataccataaggtacaagttcaagtattagtataacaagtatctgagtaacaaatgtccttggaaatggggggtaggaggagatatgattagtcacaggtttggttaactgccctcaaaatttacaagttaaaatgttttggctggtgagcacatttcagttcttaggggaaaaaaagcttttaatggcaatttatagaaatcagaatccaggctaatgatttttatccttcacacagtaaatgcagcccatccagaatcctggagcaataaagtaagaagtaattcaaata

SEQ ID NO: 276835 - DNA, 1432 bp, Homo sapiens
ggctggcggccccgccccgccccgcccggctgctccatggcgctgtgcgaggccgcgggctgcgggagtgccctgctctggcctcgcttgttgctcttcggggactccatcacccagaaaatgtgatgttctgaatcgtggattttcaggttacaataccaggtgggccaaaattatccttccaagattaatcaggaaaggaaacagtttggacatcccagtagcagttacaattttctttggggccaatgacagtgcactaaaagatgagaatcccaagcagcacattcccctggaggagtacgctgcgaacctaaagagcatggtgcagtacctgaagtccgtggacatccctgagaatcgagtcattctcatcacgccgaccccactttgtgaaacagcctgggaagaacagtgcatcatacaaggttgcaaactaaatcgcctgaactctgttgttggtgaatatgccaatgcgtgtttacaagtggcccaagactgtgggactgacgtacttgacctgtggaccctgatgcaggacagccaggacttctcatcttatttatcagatggactacatttgtctccaaaggggaatgaatttttgttctcgcatctctggcctttgatagagaaaaaggtctcttctctacctttgctgcttccttactggcgggatgtagcagaagcaaaacctgaattaagtctgctgggagatggagaccattagccaatcacaggagacccaaatctgcttgttatctacagaactcaaagttgtcaatacgtagaggtacgcttttttcctcaggcttaaacctttgccactgatattaataataaaagtattagatgatttttcagggaagttttatacttaggtccattgtgtttcgacagtatttattaatgcagatatcagtgctacagctataaaatataccctgagcagcttgttaattctataaatgacaaagactatgtttttaaaaagtcacaattttataaaaatggtttttcttacattcttttgagaactgtttcactcatacatacacccacacaccccactcaaccttgtatcaaattccaaaagtgtaactaaagtataagaatatcatgactagttaaaagatagcaaataccataaggtacaagttcaagtattagtataacaagtatctgagtaacaaatgtccttggaaatggggggtaggaggagatatgattagtcacaggtttggttaactgccctcaaaatttacaagttaaaatgttttggctggtgagcacatttcagttcttaggggaaaaaaagcttttaatggcaatttatagaaatcagaatccaggctaatgatttttatccttcacacagtaaatgcagcccatccagaatcctggagcaataaagtaagaagtaattcaaata

SEQ ID NO: 276836 - DNA, 1557 bp, Homo sapiens
gaatgagggccctaggttggatcttagttgtaaagctcccccaggtgatccaagcgagcttgggacgagcaacctaaagaaagtcatgctctacgcccatcgccccgccccagggagcggggtcggcctctgcgccggcgcccctggcccttctgttactcatctacagctccgtgatttcaaggcatccttcccacccgttcgtttttagctcggctgccgaacttcattgcacagttgagaaaatgtgatgttctgaatcgtggattttcaggttacaataccaggtgggccaaaattatccttccaagattaatcaggaaaggaaacagtttggacatcccagtagcagttacaattttctttggggccaatgacagtgcactaaaagatgagaatcccaagcagcacattcccctggaggagtacgctgcgaacctaaagagcatggtgcagtacctgaagtccgtggacatccctgagaatcgagtcattctcatcacgccgaccccactttgtgaaacagcctgggaagaacagtgcatcatacaaggttgcaaactaaatcgcctgaactctgttgttggtgaatatgccaatgcgtgtttacaagtggcccaagactgtgggactgacgtacttgacctgtggaccctgatgcaggacagccaggacttctcatcttatttatcagatggactacatttgtctccaaaggggaatgaatttttgttctcgcatctctggcctttgatagagaaaaaggtctcttctctacctttgctgcttccttactggcgggatgtagcagaagcaaaacctgaattaagtctgctgggagatggagaccattagccaatcacaggagacccaaatctgcttgttatctacagaactcaaagttgtcaatacgtagaggtacgcttttttcctcaggcttaaacctttgccactgatattaataataaaagtattagatgatttttcagggaagttttatacttaggtccattgtgtttcgacagtatttattaatgcagatatcagtgctacagctataaaatataccctgagcagcttgttaattctataaatgacaaagactatgtttttaaaaagtcacaattttataaaaatggtttttcttacattcttttgagaactgtttcactcatacatacacccacacaccccactcaaccttgtatcaaattccaaaagtgtaactaaagtataagaatatcatgactagttaaaagatagcaaataccataaggtacaagttcaagtattagtataacaagtatctgagtaacaaatgtccttggaaatggggggtaggaggagatatgattagtcacaggtttggttaactgccctcaaaatttacaagttaaaatgttttggctggtgagcacatttcagttcttaggggaaaaaaagcttttaatggcaatttatagaaatcagaatccaggctaatgatttttatccttcacacagtaaatgcagcccatccagaatcctggagcaataaagtaagaagtaattcaaata

SEQ ID NO: 276837 - DNA, 900 bp, Homo sapiens
ggctggcggccccgccccgccccgcccggctgctccatggcgctgtgcgaggccgcgggctgcgggagtgccctgctctggcctcgcttgttgctcttcggggactccatcacccagttttccttccagcagggtggatggggagcatcgctggctgacaggctggtcagaaaatgtgatgttctgaatcgtggattttcaggttacaataccaggtgggccaaaattatccttccaagattaatcaggaaaggaaacagtttggacatcccagtagcagttacaattttctttggggccaatgacagtgcactaaaagatgagaatcccaagcagcacattcccctggaggagtacgctgcgaacctaaagagcatggtgcagtacctgaagtccgtggacatccctgagaatcgagtcattctcatcacgccgaccccactttgtgaaacagcctgggaagaacagtgcatcatacaaggttgcaaactaaatcgcctgaactctgttgttggtgaatatgccaatgcgtgtttacaagtggcccaagactgtgggactgacgtacttgacctgtggaccctgatgcaggacagccaggacttctcatcttatttatcagatggactacatttgtctccaaaggggaatgaatttttgttctcgcatctctggcctttgatagagaaaaaggtctcttctctacctttgctgcttccttactggcgggatgtagcagaagcaaaacctgaattaagtctgctgggagatggagaccattagccaatcacaggagacccaaatctgcttgttatctacagaactcaaagttgtcaatacgtagagtaaatgcagcccatccagaatcctggagcaataaagtaagaagtaattcaaata

SEQ ID NO: 276838 - DNA, 1752 bp, Homo sapiens
gcgagagcccgggctccaggcacagacgcgaggggacccggccgcgctgcccgccccgcgccgcctcccacccgggtcgagatgcgcggtcttcccctcagcgccctcctgggcagcggcctttcccctccgggtccgggttagcggccgcgggcgaccgcgcgctgtgtcccaggaggccccgcggccagctccgggcagaggcgccaggagctctctcgccccattccctgcgggcacaggtggggccgttaggggttgaccttggaagtaaaacgccttcaggaattagttttccttccagcagggtggatggggagcatcgctggctgacaggctggtcagaaaatgtgatgttctgaatcgtggattttcaggttacaataccaggtgggccaaaattatccttccaagattaatcaggaaaggaaacagtttggacatcccagtagcagttacaattttctttggggccaatgacagtgcactaaaagatgagaatcccaagcagcacattcccctggaggagtacgctgcgaacctaaagagcatggtgcagtacctgaagtccgtggacatccctgagaatcgagtcattctcatcacgccgaccccactttgtgaaacagcctgggaagaacagtgcatcatacaaggttgcaaactaaatcgcctgaactctgttgttggtgaatatgccaatgcgtgtttacaagtggcccaagactgtgggactgacgtacttgacctgtggaccctgatgcaggacagccaggccatatttacctgttaaggttctttcaaataacctgagaatcatgtcatatgattcagaagacctggaatgaggtcccagctcacttaatggacttctcatcttatttatcagatggactacatttgtctccaaaggggaatgaatttttgttctcgcatctctggcctttgatagagaaaaaggtctcttctctacctttgctgcttccttactggcgggatgtagcagaagcaaaacctgaattaagtctgctgggagatggagaccattagccaatcacaggagacccaaatctgcttgttatctacagaactcaaagttgtcaatacgtagaggtacgcttttttcctcaggcttaaacctttgccactgatattaataataaaagtattagatgatttttcagggaagttttatacttaggtccattgtgtttcgacagtatttattaatgcagatatcagtgctacagctataaaatataccctgagcagcttgttaattctataaatgacaaagactatgtttttaaaaagtcacaattttataaaaatggtttttcttacattcttttgagaactgtttcactcatacatacacccacacaccccactcaaccttgtatcaaattccaaaagtgtaactaaagtataagaatatcatgactagttaaaagatagcaaataccataaggtacaagttcaagtattagtataacaagtatctgagtaacaaatgtccttggaaatggggggtaggaggagatatgattagtcacaggtttggttaactgccctcaaaatttacaagttaaaatgttttggctggtgagcacatttcagttcttaggggaaaaaaagcttttaatggcaatttatagaaatcagaatccaggctaatgatttttatccttcacacagtaaatgcagcccatccagaatcctggagcaataaagtaagaagtaattcaaata

SEQ ID NO: 276839 - DNA, 873 bp, Homo sapiens
  misc_feature (158)..(158): n is a, c, g, or t
atataacccccataatttttaatatattgtgtgaaaatcttttcgccacatattgatggtgttacgcccataagaccgctagttgattatttcgcatggcggtatataattggtttggttggtgttcttccagttggtctctcccccacaatttgggntttcttcctcctaaaaaattatcctcaatagacgtgagtttttttgcaccaatcagaggttgttgttgttacactgcggcgccgtttccggggtttttgagccccccttggggggcccccttgttttgccacaaggggggcgcgccgtggggggccccccgcgggggtttttttttgggcgcgcccccccctcttttttttttttttttttgtttttttttttttttttttttttttttttttttttttttttttttttttttatgtttttaaaaagtcacaattttataaaaatggtttttcttacattcttttgagaactgtttcactcatacatacacccacacaccccactcaaccttgtatcaaattccaaaagtgtaactaaagtataagaatatcatgactagttaaaagatagcaaataccataaggtacaagttcaagtattagtataacaagtatctgagtaacaaatgtccttggaaatggggggtaggaggagatatgattagtcacaggtttggttaactgccctcaaaatttacaagttaaaatgttttggctggtgagcacatttcagttcttaggggaaaaaaagcttttaatggcaatttatagaaatcagaatccaggctaatgatttttatccttcacacagtaaatgcagcccatccagaatcctggagcaataaagtaagaagtaattcaaata

SEQ ID NO: 276840 - DNA, 1730 bp, Homo sapiens
gcgagagcccgggctccaggcacagacgcgaggggacccggccgcgctgcccgccccgcgccgcctcccacccgggtcgagatgcgcggtcttcccctcagcgccctcctgggcagcggcctttcccctccgggtccgggttagcggccgcgggcgaccgcgcgctgtgtcccaggaggccccgcggccagctccgggcagaggcgccaggagctctctcgccccattccctgcgggcacaggtggggccgttaggggttgaccttggaagtaaaacgccttcaggaattaggtagaaaaggaccatccgttcatccaagatcatctcacctcccatgaagggaacggtcttctaaatgcagttttccttccagcagggtggatggggagcatcgctggctgacaggctggtcagaaaatgtgatgttctgaatcgtggattttcaggttacaataccaggtgggccaaaattatccttccaagattaatcaggaaaggaaacagtttggacatcccagtagcagttacaattttctttggggccaatgacagtgcactaaaagatgagaatcccaagcagcacattcccctggaggagtacgctgcgaacctaaagagcatggtgcagtacctgaagtccgtggacatccctgagaatcgagtcattctcatcacgccgaccccactttgtgaaacagcctgggaagaacagtgcatcatacaaggttgcaaactaaatcgcctgaactctgttgttggtgaatatgccaatgcgtgtttacaagtggcccaagactgtgggactgacgtacttgacctgtggaccctgatgcaggacagccaggacttctcatcttatttatcagatggactacatttgtctccaaaggggaatgaatttttgttctcgcatctctggcctttgatagagaaaaaggtctcttctctacctttgctgcttccttactggcgggatgtagcagaagcaaaacctgaattaagtctgctgggagatggagaccattagccaatcacaggagacccaaatctgcttgttatctacagaactcaaagttgtcaatacgtagaggtacgcttttttcctcaggcttaaacctttgccactgatattaataataaaagtattagatgatttttcagggaagttttatacttaggtccattgtgtttcgacagtatttattaatgcagatatcagtgctacagctataaaatataccctgagcagcttgttaattctataaatgacaaagactatgtttttaaaaagtcacaattttataaaaatggtttttcttacattcttttgagaactgtttcactcatacatacacccacacaccccactcaaccttgtatcaaattccaaaagtgtaactaaagtataagaatatcatgactagttaaaagatagcaaataccataaggtacaagttcaagtattagtataacaagtatctgagtaacaaatgtccttggaaatggggggtaggaggagatatgattagtcacaggtttggttaactgccctcaaaatttacaagttaaaatgttttggctggtgagcacatttcagttcttaggggaaaaaaagcttttaatggcaatttatagaaatcagaatccaggctaatgatttttatccttcacacagtaaatgcagcccatccagaatcctggagcaataaagtaagaagtaattcaaata

SEQ ID NO: 276841 - DNA, 1681 bp, Homo sapiens
taattttagtagagacggggtttcgccatgttgaccaggctggtctcgaactcgagacctcatgtgatccgcccgccttggcctcccaaagtgctgggaatacaggctgtttagcttttgatagagaaaaatccccctctgctaaagtgctgccaggtgtacttacctgtaatccccaaaatgacctcctggagtgaagcaatcaaagccaagaagggagcgccgagaaaacagaagttgccaatcagaactgccctcgctgagatgcccggttacagtcattagtagtaataatgggcttttcttcctccagttttccttccagcagggtggatggggagcatcgctggctgacaggctggtcagaaaatgtgatgttctgaatcgtggattttcaggttacaataccaggtgggccaaaattatccttccaagattaatcaggaaaggaaacagtttggacatcccagtagcagttacaattttctttggggccaatgacagtgcactaaaagatgagaatcccaagcagcacattcccctggaggagtacgctgcgaacctaaagagcatggtgcagtacctgaagtccgtggacatccctgagaatcgagtcattctcatcacgccgaccccactttgtgaaacagcctgggaagaacagtgcatcatacaaggttgcaaactaaatcgcctgaactctgttgttggtgaatatgccaatgcgtgtttacaagtggcccaagactgtgggactgacgtacttgacctgtggaccctgatgcaggacagccaggacttctcatcttatttatcagatggactacatttgtctccaaaggggaatgaatttttgttctcgcatctctggcctttgatagagaaaaaggtctcttctctacctttgctgcttccttactggcgggatgtagcagaagcaaaacctgaattaagtctgctgggagatggagaccattagccaatcacaggagacccaaatctgcttgttatctacagaactcaaagttgtcaatacgtagaggtacgcttttttcctcaggcttaaacctttgccactgatattaataataaaagtattagatgatttttcagggaagttttatacttaggtccattgtgtttcgacagtatttattaatgcagatatcagtgctacagctataaaatataccctgagcagcttgttaattctataaatgacaaagactatgtttttaaaaagtcacaattttataaaaatggtttttcttacattcttttgagaactgtttcactcatacatacacccacacaccccactcaaccttgtatcaaattccaaaagtgtaactaaagtataagaatatcatgactagttaaaagatagcaaataccataaggtacaagttcaagtattagtataacaagtatctgagtaacaaatgtccttggaaatggggggtaggaggagatatgattagtcacaggtttggttaactgccctcaaaatttacaagttaaaatgttttggctggtgagcacatttcagttcttaggggaaaaaaagcttttaatggcaatttatagaaatcagaatccaggctaatgatttttatccttcacacagtaaatgcagcccatccagaatcctggagcaataaagtaagaagtaattcaaata

SEQ ID NO: 276842 - DNA, 1400 bp, Homo sapiens
ggctggcggccccgccccgccccgcccggctgctccatggcgctgtgcgaggccgcgggctgcgggagtgccctgctctggcctcgcttgttgctcttcggggactccatcacccaggttacaataccaggtgggccaaaattatccttccaagattaatcaggaaaggaaacagtttggacatcccagtagcagttacaattttctttggggccaatgacagtgcactaaaagatgagaatcccaagcagcacattcccctggaggagtacgctgcgaacctaaagagcatggtgcagtacctgaagtccgtggacatccctgagaatcgagtcattctcatcacgccgaccccactttgtgaaacagcctgggaagaacagtgcatcatacaaggttgcaaactaaatcgcctgaactctgttgttggtgaatatgccaatgcgtgtttacaagtggcccaagactgtgggactgacgtacttgacctgtggaccctgatgcaggacagccaggacttctcatcttatttatcagatggactacatttgtctccaaaggggaatgaatttttgttctcgcatctctggcctttgatagagaaaaaggtctcttctctacctttgctgcttccttactggcgggatgtagcagaagcaaaacctgaattaagtctgctgggagatggagaccattagccaatcacaggagacccaaatctgcttgttatctacagaactcaaagttgtcaatacgtagaggtacgcttttttcctcaggcttaaacctttgccactgatattaataataaaagtattagatgatttttcagggaagttttatacttaggtccattgtgtttcgacagtatttattaatgcagatatcagtgctacagctataaaatataccctgagcagcttgttaattctataaatgacaaagactatgtttttaaaaagtcacaattttataaaaatggtttttcttacattcttttgagaactgtttcactcatacatacacccacacaccccactcaaccttgtatcaaattccaaaagtgtaactaaagtataagaatatcatgactagttaaaagatagcaaataccataaggtacaagttcaagtattagtataacaagtatctgagtaacaaatgtccttggaaatggggggtaggaggagatatgattagtcacaggtttggttaactgccctcaaaatttacaagttaaaatgttttggctggtgagcacatttcagttcttaggggaaaaaaagcttttaatggcaatttatagaaatcagaatccaggctaatgatttttatccttcacacagtaaatgcagcccatccagaatcctggagcaataaagtaagaagtaattcaaata

SEQ ID NO: 276843 - DNA, 1447 bp, Homo sapiens
ggctggcggccccgccccgccccgcccggctgctccatggcgctgtgcgaggccgcgggctgcgggagtgccctgctctggcctcgcttgttgctcttcggggactccatcacccagttttccttccagcagggtggatggggagcatcgctggctgacaggctggtcagaaaatgtgatgttctgaatcgtggattttcaggttacaataccaggtgggccaaaattatccttccaagattaatcaggaaaggaaacagtttggacatcccagtagcagttacaattttctttggggccaatgacagtgcactaaaagatgagaatcccaagcagcacattcccctggaggagtacgctgcgaacctaaagagcatggtgcagtacctgaagtccgtggacatccctgagaatcgagtcattctcatcacgccgaccccactttgtgaaacagcctgggaagaacagtgcatcatacaaggttgcaaactaaatcgcctgaactctgttgttggtgaatatgccaatgcgtgtttacaagtggcccaagactgtgggactgacgtacttgacctgtggaccctgatgcaggacagccagggtacggtggcttgctcggtcctctcggggtaaataggatcacacagaagtaaaccaggtgtgtgtgcagcagctttccctagaaaggccctgcttagctaagacagtcatccctatagccaatgaaaacaaacaggcttgggggaggggaggaatggaggttccaggatggctcacaagcccagcagcttaattcagccaggctccttggctaggagttagtgcgcagtgacatcaatgagcaacacatggctcatatttatgaacgtccaggccaagttcttctttcatacagagaatggcagaaagctaaaacttgttaataggtaaaacaatgaatttaaatacagtattggctaataaaactgtttgagatatgtagttctaattaagttactttgttttaaagcctgaaagcacaaatataaaaggtaaaaagcaggtcccatggaatggtgcactgactcaggagacagctggtttctgacgcagtcacacatacacttagggaggacctggcagtccactcctgggttatctgccctagagaaatgaaaactatgttcacacagaacctgggtgtaactgttgacagcagcattattcctacctgctggaaacacgccagtgtccttctgtgatgaatagggaaactggtgtgtccgtggaatgggatactactcggcaataaagaggaggaactgacaagcgcagcaacgtgggtgactctcgaggcgcttcactgagggaaggaagctggtctctgaaggctacttactacatgagtccatctgttttggtgtctcaaaaaggcaagacttgggctgggtgtggtggctcacacctg

SEQ ID NO: 276844 - DNA, 910 bp, Homo sapiens
  misc_feature (85)..(85): n is a, c, g, or t
gctgtgagtgaggaatgcctctcaccagctgtgcctgagctgcagcactccagccactgctgtctccttagctgctcacatatgnatactttcacagttcaggattccactgcaatgagctggtggaggaataatttctggatcatcttagctgtggccatcatcgttgtctctgtgggtctgggcctcatcctgtactgtgtctgtaagtggcagcttagacgaggcaagaaatgggaaattgccaagcccctgaaacacaagcaagtagatgaagaaaagatgtatgagaatgttcttaatgagtcgccagttcaattaccgcctctgccaccgaggaattggccttctctagaagactcttccccacaggaagccccaagtcagccgcccgctacatactcactggtaaataaagttaaaaataagaagactgtttccatcccaagctacattgagcctgaagatgactatgacgatgttgaaatccctgcaaatactgaaaaagcatcattttgaaacagccatttcttctttttggcaaaactgaagagggttcacacaacttattttaaaacaatcaagaatggttgaacttcagtaggtctctgggccctgaaagccagtggtgattttatgaagctctataagataaagcacttcccaaaccttagatgaagacacccctgcgatcggatgactgcagccagaggagacacatgggtgctcggctctgaggacttagaggggtcagccttgtgctgttgaggaaactttccatgggaaggaccacggggctccatggctcccacctgtgggaaactactcatttcttggcattctttcccccttcattccctttggtttgcatggttctgagtgatattaaatctcagcatttggttgtgca

SEQ ID NO: 276845 - DNA, 1236 bp, Homo sapiens
  misc_feature (85)..(85): n is a, c, g, or t
gctgtgagtgaggaatgcctctcaccagctgtgcctgagctgcagcactccagccactgctgtctccttagctgctcacatatgnatactttcacagttcaggattccactgcaatgagctggtggaggaataatttctggatcatcttagctgtggccatcatcgttgtctctgtgggtctgggcctcatcctgtactgtgtctgtaagtggcagcttagacgaggcaagaaatgggaaattgccaagcccctgaaacacaagcaagtagatgaagaaaagatgtatgagaatgttcttaatgagtcgccagttcaattaccgcctctgccaccgaggaattggccttctctagaagactcttccccacaggaagccccaagtcagccgcccgctacatactcactggtaaataaagttaaaaataagaagactgtttccatcccaagctacattgagcctgaagatgactatgacgatgttgaaatccctgcaaatactgaaaaagcatcattttgaaacagccatttcttctttttggcaaaactgaagagggttcacacaacttattttaaaacaatcaagaatggttgaacttcagtaggtctctgggccctgaaagccagtggtgattttatgaagctctataagataaagcacttcccaaaccttagatgaagacacccctgcgatcggatgactgcagccagaggagacacatgggtgctcggctctgaggacttagaggggtcagccttgtgctgttgaggaaactttccatgggaaggaccacggggctccatggctcccacctgtgggaaactactcatttcttggcattctttcccccttcattccctttggtttgcatggttctgagtgatattaaatctcagcatttggttgtgcagaccctcccaggctcccatccccagcaaggccctcaccaagcatgctggtctttaccctctcaccccacccacctcctgcactgtgaggctgtgggtgagttacagctgagtgctctcgtgcccaggttcccacaccacatctcgcgagtttgcaagggcagggagtaccttttgttctcgtgaaccctccccacctagacaccctgcaaaccccagtgcctttatatgatgtaggccaaattgaccatagagatttgagttttcacctaggttttctccccgtgcttgcaagttgtactgtaacaatggacaaaggacaaaagtt

SEQ ID NO: 276846 - DNA, 1342 bp, Homo sapiens
cccaggatttcacctcctatcgcggccatacggatgtccccggccgtccctcttaatcatgggttcagttcagattgtagccatacttaaaaaaaaaaaaaaaagccaaaagatgatgacaacatttttatcagtattgtgaataaacttgaacacaaatacacgaagttccatgtcatgtcttcagttgtagaagtttttcctctttaaggtaaagcgaccaacttgaactttctctggcaacacgattcgcagttatataagggaatcagtgttcacgtctctgtatatatttatttatgtgtaatttaatgggaattgtaaatatggtgagtctgttttaagcctttttttttttatttatctgatcttgtttacctcttgtttagtgggttttgaatcttccctattagttcttcatgtggttcatggtactgatttagaaatccagtgtttgggggatttttttctctgggattcatgaatttagccctgttgtagcatgttaaaggtgacaaacagctggacaaatttttaaaaagtaaaataaaattttatctataattagtattattacatttagcttttcattgaaccgaaagaaaaaaagtgatattggaccctggaaagattttgaaacttgagtggtttgataacccttctatgtattgtagggagaaaaaaaaaagtttattttattccactgtcctcccttaaaagcatcatttgagcaataaatgaatattgtctttaaaccaagggttagggaattttcctctctctctctctctcctctctctttctgttcaaagaacttcaaacatttgggaccacctggtattctgtattttcactggccatattggaagcagttctagttgcattgtattgagttgtgctggcagtagtttccatgcctgtcaatgtatcatagtcctttgttgcccagataaataaatatttgatacgctttatgtcgatttttttttattcagtggctgtctttacccaggcgtatttttgttcttggcagtattttttattcagtatggttacagtaattgagtttaactctcccttggcaattgctccttgcaataagcagctgaacccattgtttccctcaagtataataaaaacttactttcaacttggagttcagagcagggtatcatttagatattccactgtgtctgtattcagacaaatgacacaataaaacccaatgtattcttttggataaaagattgtttgtactgctaaaggaatgacatactgtcttttccttactagaaacattaattttattattaaaaataaagttttattttatttatgttga

SEQ ID NO: 276847 - DNA, 1043 bp, Homo sapiens
ccttgacctgagacttgccatcaaactcctccagctcaggccccgaagcccgctattccagcggctctggttcatgaggctctcacggatttttgtcttgtggctccctattagttcttcatgtggttcatggtactgatttagaaatccagtgtttgggggatttttttctctgggattcatgaatttagccctgttgtagcatgttaaaggtgacaaacagctggacaaatttttaaaaagtaaaataaaattttatctataattagtattattacatttagcttttcattgaaccgaaagaaaaaaagtgatattggaccctggaaagattttgaaacttgagtggtttgataacccttctatgtattgtagggagaaaaaaaaaagtttattttattccactgtcctcccttaaaagcatcatttgagcaataaatgaatattgtctttaaaccaagggttagggaattttcctctctctctctctctcctctctctttctgttcaaagaacttcaaacatttgggaccacctggtattctgtattttcactggccatattggaagcagttctagttgcattgtattgagttgtgctggcagtagtttccatgcctgtcaatgtatcatagtcctttgttgcccagataaataaatatttgatacgctttatgtcgatttttttttattcagtggctgtctttacccaggcgtatttttgttcttggcagtattttttattcagtatggttacagtaattgagtttaactctcccttggcaattgctccttgcaataagcagctgaacccattgtttccctcaagtataataaaaacttactttcaacttggagttcagagcagggtatcatttagatattccactgtgtctgtattcagacaaatgacacaataaaacccaatgtattcttttggataaaagattgtttgtactgctaaaggaatgacatactgtcttttccttactagaaacattaattttattattaaaaataaagttttattttatttatgttga

SEQ ID NO: 276848 - DNA, 1873 bp, Homo sapiens
tccgagcgcacacgggagctctttcccttctctcctcctcctcgcccttctcctcgccctcctcctcctcctcgccctcctcttcctcctcctcctccttgccctcctcctctccctcctccttctcctcctccacctcctctccctcctcctcctcctcctgcgctcaccgccggcagccagcactttgcgctcacccagagagtagctccacttgggtgcgagaccgagaggggcatatccgttcacgccgatccatgaaaatgctttggaaattgacggataatatcaagtacgaggactgcgaggaccgtcacgacggcaccagcaacgggacggcacggttgccccagctgggcactgtaggtcaatctccctacacgagcgccccgccgctgtcccacacccccaatgccgacttccagcccccatacttccccccaccctaccagcctatctacccccagtcgcaagatccttactcccacgtcaacgacccctacagcctgaaccccctgcacgcccagccgcagccgcagcacccaggctggcccggccagaggcagagccaggagtctgggctcctgcacacgcaccgggggctgcctcaccagctgtcgggcctggatcctcgcagggactacaggcggcacgaggacctcctgcacggcccacacgcgctcagctcaggactcggagacctctcgatccactccttacctcacgccatcgaggaggtcccgcatgtagaagacccgggtattaacatcccagatcaaactgtaattaagaaaggccccgtgtccctgtccaagtccaacagcaatgccgtctccgccatccctattaacaaggacaacctcttcggcggcgtggtgaaccccaacgaagtcttctgttcagttccgggtcgcctctcgctcctcagctccacctcgaagtacaaggtcacggtggcggaagtgcagcggcggctctcaccacccgagtgtctcaacgcgtcgctgctgggcggagtgctccggagggcgaagtctaaaaatggaggaagatctttaagagaaaaactggacaaaataggattaaatctgcctgcagggagacgtaaagctgccaacgttaccctgctcacatcactagtagagggtaagcgaatccacttgctaactagaaggaacttccttcttggaaaatggataatatttagtggccagatgtttggtcgtattttatgtcagttgggcagtttcatctttgcagagaatatagccagatgtgaatggaattatttcatggcaaaaagaaacatttgcatgtactcctatacctccatccttcttccttcttttcctctaccataaagttacacctccccagcctaattctgagctaaacaacgcacaagtttaagaactgcacattctccaagtttctgtctcctttaaagggctcagcagtaaataacttaagttattctgacatctgcgtttgagaaatgcgtgaccattacttcctgaattaatttgggaatctttgacctgcgtcctgatttaagaccatcctgaaagctcagggttatgtgccctttcaggtctttgttttccaaacatatgctcccttatctctttaattgtgcttttctcttggagaagaagaaaagtgagcaatttttgattctggatgatgtggatatggaaagataaatataagcattgcaaaaagtttctcctggtagctttaaacatacatacacccttccaaatgcctcaaaacaaaaagccaacccttatcctcactccctgctctagataactgccaccggaagccactcatattcctgctgcctctagattaagtttttctgatacaagat

SEQ ID NO: 276849 - DNA, 3813 bp, Homo sapiens
acgcacgcagacacattctccctctctgcgctctctccttcggtctccctctctgcctctttctctttcacttttgcatgccctgcaaccttttaaaatgttgccccttccctgtgattcgccagacgccgcgccgcggccccccgcgcgctcgcccgctccctctctcgctcgctttttgtctctcgcgctccctctccccactccgatttgctacactgagactcccgtcaatggactgcattgagagccggctccggcgcgagttgcctctccgcttcacgctcgatttccaggcattcttcccttattaagtattcgtgtaatattaatagtcatgaatatctgctattaggaggctccaggaacgctgcccagcgcggttattagaagctcaagcgaagccgccgctaagaaaagagggggagacacggattaaggaacacgcacgcacccacacactcacacatactttttcctttttccttttttggggtttttcatttttaaagaactttgaatcataaccagtcgcggcaggatagagaccgtgggttcgaccagctgaaggcgccgcgcgaatcggtggttcaagttcggatggatccgagccgggctcccgcgctccggggagcgtcggcgccgtgactggagtcctgggtggcgcggggctctcggcgcctttgtgtggggcgcgctcgggcggcggggcagccgggcgctccaggcttgcttgtttttttccaccctgactcgttaccccagactcttcgcagatgttagttcacagtttttcagccatggaccgtcacgacggcaccagcaacgggacggcacggttgccccagctgggcactgtaggtcaatctccctacacgagcgccccgccgctgtcccacacccccaatgccgacttccagcccccatacttccccccaccctaccagcctatctacccccagtcgcaagatccttactcccacgtcaacgacccctacagcctgaaccccctgcacgcccagccgcagccgcagcacccaggctggcccggccagaggcagagccaggagtctgggctcctgcacacgcaccgggggctgcctcaccagctgtcgggcctggatcctcgcagggactacaggcggcacgaggacctcctgcacggcccacacgcgctcagctcaggactcggagacctctcgatccactccttacctcacgccatcgaggaggtcccgcatgtagaagacccgggtattaacatcccagatcaaactgtaattaagaaaggccccgtgtccctgtccaagtccaacagcaatgccgtctccgccatccctattaacaaggacaacctcttcggcggcgtggtgaaccccaacgaagtcttctgttcagttccgggtcgcctctcgctcctcagctccacctcgaagtacaaggtcacggtggcggaagtgcagcggcggctctcaccacccgagtgtctcaacgcgtcgctgctgggcggagtgctccggagggcgaagtctaaaaatggaggaagatctttaagagaaaaactggacaaaataggattaaatctgcctgcagggagacgtaaagctgccaacgttaccctgctcacatcactagtagagggagaagctgtccacctagccagggactttgggtacgtgtgcgaaaccgaatttcctgccaaagcagtagctgaatttctcaaccgacaacattccgatcccaatgagcaagtgacaagaaaaaacatgctcctggctacaaaacagatatgcaaagagttcaccgacctgctggctcaggaccgatctcccctggggaactcacggcccaaccccatcctggagcccggcatccagagctgcttgacccacttcaacctcatctcccacggcttcggcagccccgcggtgtgtgccgcggtcacggccctgcagaactatctcaccgaggccctcaaggccatggacaaaatgtacctcagcaacaaccccaacagccacacggacaacaacgccaaaagcagtgacaaagaggagaagcacagaaagtgaggctctcctcccgccccgcccctcccacgcctcaccagccccccgcgcgcccaccctccggcgggtgacagctccgggatcagcaacccttcctgctgctgctactgctgctgctgctgccgccgccgccgccgccgctgcccttgggtccccccgagtctccgggactgccctctcgactgtcagtggggcagcctctccgactctgcacccgcctcgacctccccacccgctcccacacccctgtgccctcatgtggagcctaagagaacagaacaggccgtgaagccagcagagaaaagttctgccaagtttgtgaacccttttttttttaaacaaaacaacaaatcaacaacagcaacaacaacaacaaaaattaaaaacttttttctaaaaaaaaagtgaaaataaaaaaaattatatgcgcttcatgggactgagtcaccaccttcccttacatacttcagttcagattgtagccatacttaaaaaaaaaaaaaaaagccaaaagatgatgacaacatttttatcagtattgtgaataaacttgaacacaaatacacgaagttccatgtcatgtcttcagttgtagaagtttttcctctttaaggtaaagcgaccaacttgaactttctctggcaacacgattcgcagttatataagggaatcagtgttcacgtctctgtatatatttatttatgtgtaatttaatgggaattgtaaatatggtgagtctgttttaagcctttttttttttatttatctgatcttgtttacctcttgtttagtgggttttgaatcttccctattagttcttcatgtggttcatggtactgatttagaaatccagtgtttgggggatttttttctctgggattcatgaatttagccctgttgtagcatgttaaaggtgacaaacagctggacaaatttttaaaaagtaaaataaaattttatctataattagtattattacatttagcttttcattgaaccgaaagaaaaaaagtgatattggaccctggaaagattttgaaacttgagtggtttgataacccttctatgtattgtagggagaaaaaaaaaagtttattttattccactgtcctcccttaaaagcatcatttgagcaataaatgaatattgtctttaaaccaagggttagggaattttcctctctctctctctctcctctctctttctgttcaaagaacttcaaacatttgggaccacctggtattctgtattttcactggccatattggaagcagttctagttgcattgtattgagttgtgctggcagtagtttccatgcctgtcaatgtatcatagtcctttgttgcccagataaataaatatttgatacgctttatgtcgatttttttttattcagtggctgtctttacccaggcgtatttttgttcttggcagtattttttattcagtatggttacagtaattgagtttaactctcccttggcaattgctccttgcaataagcagctgaacccattgtttccctcaagtataataaaaacttactttcaacttggagttcagagcagggtatcatttagatattccactgtgtctgtattcagacaaatgacacaataaaacccaatgtattcttttggataaaagattgtttgtactgctaaaggaatgacatactgtcttttccttactagaaacattaattttattattaaaaataaagttttattttatttatgttga

SEQ ID NO: 276850 - DNA, 3175 bp, Homo sapiens
tccgagcgcacacgggagctctttcccttctctcctcctcctcgcccttctcctcgccctcctcctcctcctcgccctcctcttcctcctcctcctccttgccctcctcctctccctcctccttctcctcctccacctcctctccctcctcctcctcctcctgcgctcaccgccggcagccagcactttgcgctcacccagagagtagctccacttgggtgcgagaccgagaggggcatatccgttcacgccgatccatgaaaatgctttggaaattgacggataatatcaagtacgaggactgcgaggaccgtcacgacggcaccagcaacgggacggcacggttgccccagctgggcactcctgaaccccctgcacgcccagccgcagccgcagcacccaggctggcccggccagaggcagagccaggagtctgggctcctgcacacgcaccgggggctgcctcaccagctgtcgggcctggatcctcgcagggactacaggcggcacgaggacctcctgcacggcccacacgcgctcagctcaggactcggagacctctcgatccactccttacctcacgccatcgaggaggtcccgcatgtagaagacccgggtattaacatcccagatcaaactgtaattaagaaaggccccgtgtccctgtccaagtccaacagcaatgccgtctccgccatccctattaacaaggacaacctcttcggcggcgtggtgaaccccaacgaagtcttctgttcagttccgggtcgcctctcgctcctcagctccacctcgaagtacaaggtcacggtggcggaagtgcagcggcggctctcaccacccgagtgtctcaacgcgtcgctgctgggcggagtgctccggagggcgaagtctaaaaatggaggaagatctttaagagaaaaactggacaaaataggattaaatctgcctgcagggagacgtaaagctgccaacgttaccctgctcacatcactagtagagggagaagctgtccacctagccagggactttgggtacgtgtgcgaaaccgaatttcctgccaaagcagtagctgaatttctcaaccgacaacattccgatcccaatgagcaagtgacaagaaaaaacatgctcctggctacaaaacagatatgcaaagagttcaccgacctgctggctcaggaccgatctcccctggggaactcacggcccaaccccatcctggagcccggcatccagagctgcttgacccacttcaacctcatctcccacggcttcggcagccccgcggtgtgtgccgcggtcacggccctgcagaactatctcaccgaggccctcaaggccatggacaaaatgtacctcagcaacaaccccaacagccacacggacaacaacgccaaaagcagtgacaaagaggagaagcacagaaagtgaggctctcctcccgccccgcccctcccacgcctcaccagccccccgcgcgcccaccctccggcgggtgacagctccgggatcagcaacccttcctgctgctgctactgctgctgctgctgccgccgccgccgccgccgctgcccttgggtccccccgagtctccgggactgccctctcgactgtcagtggggcagcctctccgactctgcacccgcctcgacctccccacccgctcccacacccctgtgccctcatgtggagcctaagagaacagaacaggccgtgaagccagcagagaaaagttctgccaagtttgtgaacccttttttttttaaacaaaacaacaaatcaacaacagcaacaacaacaacaaaaattaaaaacttttttctaaaaaaaaagtgaaaataaaaaaaattatatgcgcttcatgggactgagtcaccaccttcccttacatacttcagttcagattgtagccatacttaaaaaaaaaaaaaaaagccaaaagatgatgacaacatttttatcagtattgtgaataaacttgaacacaaatacacgaagttccatgtcatgtcttcagttgtagaagtttttcctctttaaggtaaagcgaccaacttgaactttctctggcaacacgattcgcagttatataagggaatcagtgttcacgtctctgtatatatttatttatgtgtaatttaatgggaattgtaaatatggtgagtctgttttaagcctttttttttttatttatctgatcttgtttacctcttgtttagtgggttttgaatcttccctattagttcttcatgtggttcatggtactgatttagaaatccagtgtttgggggatttttttctctgggattcatgaatttagccctgttgtagcatgttaaaggtgacaaacagctggacaaatttttaaaaagtaaaataaaattttatctataattagtattattacatttagcttttcattgaaccgaaagaaaaaaagtgatattggaccctggaaagattttgaaacttgagtggtttgataacccttctatgtattgtagggagaaaaaaaaaagtttattttattccactgtcctcccttaaaagcatcatttgagcaataaatgaatattgtctttaaaccaagggttagggaattttcctctctctctctctctcctctctctttctgttcaaagaacttcaaacatttgggaccacctggtattctgtattttcactggccatattggaagcagttctagttgcattgtattgagttgtgctggcagtagtttccatgcctgtcaatgtatcatagtcctttgttgcccagataaataaatatttgatacgctttatgtcgatttttttttattcagtggctgtctttacccaggcgtatttttgttcttggcagtattttttattcagtatggttacagtaattgagtttaactctcccttggcaattgctccttgcaataagcagctgaacccattgtttccctcaagtataataaaaacttactttcaacttggagttcagagcagggtatcatttagatattccactgtgtctgtattcagacaaatgacacaataaaacccaatgtattcttttggataaaagattgtttgtactgctaaaggaatgacatactgtcttttccttactagaaacattaattttattattaaaaataaagttttattttatttatgttga

SEQ ID NO: 276851 - DNA, 3235 bp, Homo sapiens
aaaaacccatgctctcaggcctagggtttggcctgctcaggctatggccgctgctgggagggtgtcggtgctcctggcagcccagatcctgacttcaaaccactgcactggcgacaggctgggacagccctgcagggtctagccctggaaagtcgaccattttctggacggagggcggcgccaagcctccagcccggttcagccgaggaattgtgctcagttcaggaccgtcacgacggcaccagcaacgggacggcacggttgccccagctgggcactgtaggtcaatctccctacacgagcgccccgccgctgtcccacacccccaatgccgacttccagcccccatacttccccccaccctaccagcctatctacccccagtcgcaagatccttactcccacgtcaacgacccctacagcctgaaccccctgcacgcccagccgcagccgcagcacccaggctggcccggccagaggcagagccaggagtctgggctcctgcacacgcaccgggggctgcctcaccagctgtcgggcctggatcctcgcagggactacaggcggcacgaggacctcctgcacggcccacacgcgctcagctcaggactcggagacctctcgatccactccttacctcacgccatcgaggaggtcccgcatgtagaagacccgggtattaacatcccagatcaaactgtaattaagaaaggccccgtgtccctgtccaagtccaacagcaatgccgtctccgccatccctattaacaaggacaacctcttcggcggcgtggtgaaccccaacgaagtcttctgttcagttccgggtcgcctctcgctcctcagctccacctcgaagtacaaggtcacggtggcggaagtgcagcggcggctctcaccacccgagtgtctcaacgcgtcgctgctgggcggagtgctccggagggcgaagtctaaaaatggaggaagatctttaagagaaaaactggacaaaataggattaaatctgcctgcagggagacgtaaagctgccaacgttaccctgctcacatcactagtagagggagaagctgtccacctagccagggactttgggtacgtgtgcgaaaccgaatttcctgccaaagcagtagctgaatttctcaaccgacaacattccgatcccaatgagcaagtgacaagaaaaaacatgctcctggctacaaaacagatatgcaaagagttcaccgacctgctggctcaggaccgatctcccctggggaactcacggcccaaccccatcctggagcccggcatccagagctgcttgacccacttcaacctcatctcccacggcttcggcagccccgcggtgtgtgccgcggtcacggccctgcagaactatctcaccgaggccctcaaggccatggacaaaatgtacctcagcaacaaccccaacagccacacggacaacaacgccaaaagcagtgacaaagaggagaagcacagaaagtgaggctctcctcccgccccgcccctcccacgcctcaccagccccccgcgcgcccaccctccggcgggtgacagctccgggatcagcaacccttcctgctgctgctactgctgctgctgctgccgccgccgccgccgccgctgcccttgggtccccccgagtctccgggactgccctctcgactgtcagtggggcagcctctccgactctgcacccgcctcgacctccccacccgctcccacacccctgtgccctcatgtggagcctaagagaacagaacaggccgtgaagccagcagagaaaagttctgccaagtttgtgaacccttttttttttaaacaaaacaacaaatcaacaacagcaacaacaacaacaaaaattaaaaacttttttctaaaaaaaaagtgaaaataaaaaaaattatatgcgcttcatgggactgagtcaccaccttcccttacatacttcagttcagattgtagccatacttaaaaaaaaaaaaaaaagccaaaagatgatgacaacatttttatcagtattgtgaataaacttgaacacaaatacacgaagttccatgtcatgtcttcagttgtagaagtttttcctctttaaggtaaagcgaccaacttgaactttctctggcaacacgattcgcagttatataagggaatcagtgttcacgtctctgtatatatttatttatgtgtaatttaatgggaattgtaaatatggtgagtctgttttaagcctttttttttttatttatctgatcttgtttacctcttgtttagtgggttttgaatcttccctattagttcttcatgtggttcatggtactgatttagaaatccagtgtttgggggatttttttctctgggattcatgaatttagccctgttgtagcatgttaaaggtgacaaacagctggacaaatttttaaaaagtaaaataaaattttatctataattagtattattacatttagcttttcattgaaccgaaagaaaaaaagtgatattggaccctggaaagattttgaaacttgagtggtttgataacccttctatgtattgtagggagaaaaaaaaaagtttattttattccactgtcctcccttaaaagcatcatttgagcaataaatgaatattgtctttaaaccaagggttagggaattttcctctctctctctctctcctctctctttctgttcaaagaacttcaaacatttgggaccacctggtattctgtattttcactggccatattggaagcagttctagttgcattgtattgagttgtgctggcagtagtttccatgcctgtcaatgtatcatagtcctttgttgcccagataaataaatatttgatacgctttatgtcgatttttttttattcagtggctgtctttacccaggcgtatttttgttcttggcagtattttttattcagtatggttacagtaattgagtttaactctcccttggcaattgctccttgcaataagcagctgaacccattgtttccctcaagtataataaaaacttactttcaacttggagttcagagcagggtatcatttagatattccactgtgtctgtattcagacaaatgacacaataaaacccaatgtattcttttggataaaagattgtttgtactgctaaaggaatgacatactgtcttttccttactagaaacattaattttattattaaaaataaagttttattttatttatgttga

SEQ ID NO: 276852 - DNA, 2504 bp, Homo sapiens
ttgataggtgtgaagttggaatacaagaagcattttaaaagagaatttggagaagtgtcatttagggtgggggatgggactggaggttggtggatgagattttcattttcaagtcttcttggccctctaggagaagtggtcatttttcctgataaatgcatccaccagatcctacagagaaggaaataaaatgcctgaaatgagaaaacaagtagtttgtgtttcctgcaacatctggggtgaagggaattagggagttgggagtggggaggaagttaggatccccactcttcattctctcgcactggctccctcctctcccctcttgccaggagaagctgtccacctagccagggactttgggtacgtgtgcgaaaccgaatttcctgccaaagcagtagctgaatttctcaaccgacaacattccgatcccaatgagcaagtgacaagaaaaaacatgctcctggctacaaaacagatatgcaaagagttcaccgacctgctggctcaggaccgatctcccctggggaactcacggcccaaccccatcctggagcccggcatccagagctgcttgacccacttcaacctcatctcccacggcttcggcagccccgcggtgtgtgccgcggtcacggccctgcagaactatctcaccgaggccctcaaggccatggacaaaatgtacctcagcaacaaccccaacagccacacggacaacaacgccaaaagcagtgacaaagaggagaagcacagaaagtgaggctctcctcccgccccgcccctcccacgcctcaccagccccccgcgcgcccaccctccggcgggtgacagctccgggatcagcaacccttcctgctgctgctactgctgctgctgctgccgccgccgccgccgccgctgcccttgggtccccccgagtctccgggactgccctctcgactgtcagtggggcagcctctccgactctgcacccgcctcgacctccccacccgctcccacacccctgtgccctcatgtggagcctaagagaacagaacaggccgtgaagccagcagagaaaagttctgccaagtttgtgaacccttttttttttaaacaaaacaacaaatcaacaacagcaacaacaacaacaaaaattaaaaacttttttctaaaaaaaaagtgaaaataaaaaaaattatatgcgcttcatgggactgagtcaccaccttcccttacatacttcagttcagattgtagccatacttaaaaaaaaaaaaaaaagccaaaagatgatgacaacatttttatcagtattgtgaataaacttgaacacaaatacacgaagttccatgtcatgtcttcagttgtagaagtttttcctctttaaggtaaagcgaccaacttgaactttctctggcaacacgattcgcagttatataagggaatcagtgttcacgtctctgtatatatttatttatgtgtaatttaatgggaattgtaaatatggtgagtctgttttaagcctttttttttttatttatctgatcttgtttacctcttgtttagtgggttttgaatcttccctattagttcttcatgtggttcatggtactgatttagaaatccagtgtttgggggatttttttctctgggattcatgaatttagccctgttgtagcatgttaaaggtgacaaacagctggacaaatttttaaaaagtaaaataaaattttatctataattagtattattacatttagcttttcattgaaccgaaagaaaaaaagtgatattggaccctggaaagattttgaaacttgagtggtttgataacccttctatgtattgtagggagaaaaaaaaaagtttattttattccactgtcctcccttaaaagcatcatttgagcaataaatgaatattgtctttaaaccaagggttagggaattttcctctctctctctctctcctctctctttctgttcaaagaacttcaaacatttgggaccacctggtattctgtattttcactggccatattggaagcagttctagttgcattgtattgagttgtgctggcagtagtttccatgcctgtcaatgtatcatagtcctttgttgcccagataaataaatatttgatacgctttatgtcgatttttttttattcagtggctgtctttacccaggcgtatttttgttcttggcagtattttttattcagtatggttacagtaattgagtttaactctcccttggcaattgctccttgcaataagcagctgaacccattgtttccctcaagtataataaaaacttactttcaacttggagttcagagcagggtatcatttagatattccactgtgtctgtattcagacaaatgacacaataaaacccaatgtattcttttggataaaagattgtttgtactgctaaaggaatgacatactgtcttttccttactagaaacattaattttattattaaaaataaagttttattttatttatgttga

SEQ ID NO: 276853 - DNA, 2422 bp, Homo sapiens
acgcacgcagacacattctccctctctgcgctctctccttcggtctccctctctgcctctttctctttcacttttgcatgccctgcaaccttttaaaatgttgccccttccctgtgattcgccagacgccgcgccgcggccccccgcgcgctcgcccgctccctctctcgctcgctttttgtctctcgcgctccctctccccactccgatttgctacactgagactcccgtcaatggactgcattgagagccggctccggcgcgagttgcctctccgcttcacgctcgatttccaggcattcttcccttattaagtattcgtgtaatattaatagtcatgaatatctgctattaggaggctccaggaacgctgcccagcgcggttattagaagctcaagcgaagccgccgctaagaaaagagggggagacacggattaaggaacacgcacgcacccacacactcacacatactttttcctttttccttttttggggtttttcatttttaaagaactttgaatcataaccagtcgcggcaggatagagaccgtgggttcgaccagctgaaggcgccgcgcgaatcggtggttcaagttcggatggatccgagccgggctcccgcgctccggggagcgtcggcgccgtgactggagtcctgggtggcgcggggctctcggcgcctttgtgtggggcgcgctcgggcggcggggcagccgggcgctccaggcttgcttgtttttttccaccctgactcgttaccccagactcttcgcagatgttagttcacagtttttcagccatggaccgtcacgacggcaccagcaacgggacggcacggttgccccagctgggcactgtaggtcaatctccctacacgagcgccccgccgctgtcccacacccccaatgccgacttccagcccccatacttccccccaccctaccagcctatctacccccagtcgcaagatccttactcccacgtcaacgacccctacagcctgaaccccctgcacgcccagccgcagccgcagcacccaggctggcccggccagaggcagagccaggagtctgggctcctgcacacgcaccgggggctgcctcaccagctgtcgggcctggatcctcgcagggactacaggcggcacgaggacctcctgcacggcccacacgcgctcagctcaggactcggagacctctcgatccactccttacctcacgccatcgaggaggtcccgcatgtagaagacccgggtattaacatcccagatcaaactgtaattaagaaaggccccgtgtccctgtccaagtccaacagcaatgccgtctccgccatccctattaacaaggacaacctcttcggcggcgtggtgaaccccaacgaagtcttctgttcagttccgggtcgcctctcgctcctcagctccacctcgaagtacaaggtcacggtggcggaagtgcagcggcggctctcaccacccgagtgtctcaacgcgtcgctgctgggcggagtgctccggagggcgaagtctaaaaatggaggaagatctttaagagaaaaactggacaaaataggattaaatctgcctgcagggagacgtaaagctgccaacgttaccctgctcacatcactagtagagggtgcagagatggcagcggttctgaggcaagagtactgaaatttgctttataatttacttgattatccaagttgtgcatttgaagaaacacatccatgtttccgtagtgcttagtgctatgggtgaaagaaatcttaaagtcaagcagagaagaaaaaaataaaacccacgcatacctcagaaaagcccaattcaactcctaacatcacccaaccaccccatcccagaagaatgaaaccatggagcacaacaggacccgaggtccagttgaattgagagcccaccccaggcgggaagacagccagctcctgcattcaattctgcctgtaggaagcaagggttgtggagacggccggcgaccccgctgggagcaaacacaggctccccttggctttcagacctggggcgcaaggactttctttaggctacggagagatctgtgtcttgttctggaaaacccagggcgttccctcccttctctaggcctctggagtagctgatttagcaaacgtatggacagccatgccagcagtacctcagtttccctaatgcggagaccaaggagggaagtttttgagaagacctgggacacgcttgtttctcgggaaatcaacgtgggggccggcaggaggagggagatcagtctcttccctgtagtccaaggtggtgtttcctggcgcgggaccctgggcagtcccagtaatccaatcccagcccagaacaatcagggcaagacgcggcgcaagctctccgccaccatctccattttacacattgtcaaa

SEQ ID NO: 276854 - DNA, 3318 bp, Homo sapiens
tccgagcgcacacgggagctctttcccttctctcctcctcctcgcccttctcctcgccctcctcctcctcctcgccctcctcttcctcctcctcctccttgccctcctcctctccctcctccttctcctcctccacctcctctccctcctcctcctcctcctgcgctcaccgccggcagccagcactttgcgctcacccagagagtagctccacttgggtgcgagaccgagaggggcatatccgttcacgccgatccatgaaaatgctttggaaattgacggataatatcaagtacgaggactgcgaggaccgtcacgacggcaccagcaacgggacggcacggttgccccagctgggcactgtaggtcaatctccctacacgagcgccccgccgctgtcccacacccccaatgccgacttccagcccccatacttccccccaccctaccagcctatctacccccagtcgcaagatccttactcccacgtcaacgacccctacagcctgaaccccctgcacgcccagccgcagccgcagcacccaggctggcccggccagaggcagagccaggagtctgggctcctgcacacgcaccgggggctgcctcaccagctgtcgggcctggatcctcgcagggactacaggcggcacgaggacctcctgcacggcccacacgcgctcagctcaggactcggagacctctcgatccactccttacctcacgccatcgaggaggtcccgcatgtagaagacccgggtattaacatcccagatcaaactgtaattaagaaaggccccgtgtccctgtccaagtccaacagcaatgccgtctccgccatccctattaacaaggacaacctcttcggcggcgtggtgaaccccaacgaagtcttctgttcagttccgggtcgcctctcgctcctcagctccacctcgaagtacaaggtcacggtggcggaagtgcagcggcggctctcaccacccgagtgtctcaacgcgtcgctgctgggcggagtgctccggagggcgaagtctaaaaatggaggaagatctttaagagaaaaactggacaaaataggattaaatctgcctgcagggagacgtaaagctgccaacgttaccctgctcacatcactagtagagggagaagctgtccacctagccagggactttgggtacgtgtgcgaaaccgaatttcctgccaaagcagtagctgaatttctcaaccgacaacattccgatcccaatgagcaagtgacaagaaaaaacatgctcctggctacaaaacagatatgcaaagagttcaccgacctgctggctcaggaccgatctcccctggggaactcacggcccaaccccatcctggagcccggcatccagagctgcttgacccacttcaacctcatctcccacggcttcggcagccccgcggtgtgtgccgcggtcacggccctgcagaactatctcaccgaggccctcaaggccatggacaaaatgtacctcagcaacaaccccaacagccacacggacaacaacgccaaaagcagtgacaaagaggagaagcacagaaagtgaggctctcctcccgccccgcccctcccacgcctcaccagccccccgcgcgcccaccctccggcgggtgacagctccgggatcagcaacccttcctgctgctgctactgctgctgctgctgccgccgccgccgccgccgctgcccttgggtccccccgagtctccgggactgccctctcgactgtcagtggggcagcctctccgactctgcacccgcctcgacctccccacccgctcccacacccctgtgccctcatgtggagcctaagagaacagaacaggccgtgaagccagcagagaaaagttctgccaagtttgtgaacccttttttttttaaacaaaacaacaaatcaacaacagcaacaacaacaacaaaaattaaaaacttttttctaaaaaaaaagtgaaaataaaaaaaattatatgcgcttcatgggactgagtcaccaccttcccttacatacttcagttcagattgtagccatacttaaaaaaaaaaaaaaaagccaaaagatgatgacaacatttttatcagtattgtgaataaacttgaacacaaatacacgaagttccatgtcatgtcttcagttgtagaagtttttcctctttaaggtaaagcgaccaacttgaactttctctggcaacacgattcgcagttatataagggaatcagtgttcacgtctctgtatatatttatttatgtgtaatttaatgggaattgtaaatatggtgagtctgttttaagcctttttttttttatttatctgatcttgtttacctcttgtttagtgggttttgaatcttccctattagttcttcatgtggttcatggtactgatttagaaatccagtgtttgggggatttttttctctgggattcatgaatttagccctgttgtagcatgttaaaggtgacaaacagctggacaaatttttaaaaagtaaaataaaattttatctataattagtattattacatttagcttttcattgaaccgaaagaaaaaaagtgatattggaccctggaaagattttgaaacttgagtggtttgataacccttctatgtattgtagggagaaaaaaaaaagtttattttattccactgtcctcccttaaaagcatcatttgagcaataaatgaatattgtctttaaaccaagggttagggaattttcctctctctctctctctcctctctctttctgttcaaagaacttcaaacatttgggaccacctggtattctgtattttcactggccatattggaagcagttctagttgcattgtattgagttgtgctggcagtagtttccatgcctgtcaatgtatcatagtcctttgttgcccagataaataaatatttgatacgctttatgtcgatttttttttattcagtggctgtctttacccaggcgtatttttgttcttggcagtattttttattcagtatggttacagtaattgagtttaactctcccttggcaattgctccttgcaataagcagctgaacccattgtttccctcaagtataataaaaacttactttcaacttggagttcagagcagggtatcatttagatattccactgtgtctgtattcagacaaatgacacaataaaacccaatgtattcttttggataaaagattgtttgtactgctaaaggaatgacatactgtcttttccttactagaaacattaattttattattaaaaataaagttttattttatttatgttga

SEQ ID NO: 276855 - DNA, 3199 bp, Homo sapiens
ggtcggcaggtagcaacccagctctttatgaccaggtgagatgttggtgagcaggtaaaaaaggaggatttgcctaagcgattccagggagctggcccgaccgagccctccagcccatgcccggcggggaccagtcgccaggagcgcagagccgcgatgtccatacttgccaaaatgggggactggcaggaccgtcacgacggcaccagcaacgggacggcacggttgccccagctgggcactgtaggtcaatctccctacacgagcgccccgccgctgtcccacacccccaatgccgacttccagcccccatacttccccccaccctaccagcctatctacccccagtcgcaagatccttactcccacgtcaacgacccctacagcctgaaccccctgcacgcccagccgcagccgcagcacccaggctggcccggccagaggcagagccaggagtctgggctcctgcacacgcaccgggggctgcctcaccagctgtcgggcctggatcctcgcagggactacaggcggcacgaggacctcctgcacggcccacacgcgctcagctcaggactcggagacctctcgatccactccttacctcacgccatcgaggaggtcccgcatgtagaagacccgggtattaacatcccagatcaaactgtaattaagaaaggccccgtgtccctgtccaagtccaacagcaatgccgtctccgccatccctattaacaaggacaacctcttcggcggcgtggtgaaccccaacgaagtcttctgttcagttccgggtcgcctctcgctcctcagctccacctcgaagtacaaggtcacggtggcggaagtgcagcggcggctctcaccacccgagtgtctcaacgcgtcgctgctgggcggagtgctccggagggcgaagtctaaaaatggaggaagatctttaagagaaaaactggacaaaataggattaaatctgcctgcagggagacgtaaagctgccaacgttaccctgctcacatcactagtagagggagaagctgtccacctagccagggactttgggtacgtgtgcgaaaccgaatttcctgccaaagcagtagctgaatttctcaaccgacaacattccgatcccaatgagcaagtgacaagaaaaaacatgctcctggctacaaaacagatatgcaaagagttcaccgacctgctggctcaggaccgatctcccctggggaactcacggcccaaccccatcctggagcccggcatccagagctgcttgacccacttcaacctcatctcccacggcttcggcagccccgcggtgtgtgccgcggtcacggccctgcagaactatctcaccgaggccctcaaggccatggacaaaatgtacctcagcaacaaccccaacagccacacggacaacaacgccaaaagcagtgacaaagaggagaagcacagaaagtgaggctctcctcccgccccgcccctcccacgcctcaccagccccccgcgcgcccaccctccggcgggtgacagctccgggatcagcaacccttcctgctgctgctactgctgctgctgctgccgccgccgccgccgccgctgcccttgggtccccccgagtctccgggactgccctctcgactgtcagtggggcagcctctccgactctgcacccgcctcgacctccccacccgctcccacacccctgtgccctcatgtggagcctaagagaacagaacaggccgtgaagccagcagagaaaagttctgccaagtttgtgaacccttttttttttaaacaaaacaacaaatcaacaacagcaacaacaacaacaaaaattaaaaacttttttctaaaaaaaaagtgaaaataaaaaaaattatatgcgcttcatgggactgagtcaccaccttcccttacatacttcagttcagattgtagccatacttaaaaaaaaaaaaaaaagccaaaagatgatgacaacatttttatcagtattgtgaataaacttgaacacaaatacacgaagttccatgtcatgtcttcagttgtagaagtttttcctctttaaggtaaagcgaccaacttgaactttctctggcaacacgattcgcagttatataagggaatcagtgttcacgtctctgtatatatttatttatgtgtaatttaatgggaattgtaaatatggtgagtctgttttaagcctttttttttttatttatctgatcttgtttacctcttgtttagtgggttttgaatcttccctattagttcttcatgtggttcatggtactgatttagaaatccagtgtttgggggatttttttctctgggattcatgaatttagccctgttgtagcatgttaaaggtgacaaacagctggacaaatttttaaaaagtaaaataaaattttatctataattagtattattacatttagcttttcattgaaccgaaagaaaaaaagtgatattggaccctggaaagattttgaaacttgagtggtttgataacccttctatgtattgtagggagaaaaaaaaaagtttattttattccactgtcctcccttaaaagcatcatttgagcaataaatgaatattgtctttaaaccaagggttagggaattttcctctctctctctctctcctctctctttctgttcaaagaacttcaaacatttgggaccacctggtattctgtattttcactggccatattggaagcagttctagttgcattgtattgagttgtgctggcagtagtttccatgcctgtcaatgtatcatagtcctttgttgcccagataaataaatatttgatacgctttatgtcgatttttttttattcagtggctgtctttacccaggcgtatttttgttcttggcagtattttttattcagtatggttacagtaattgagtttaactctcccttggcaattgctccttgcaataagcagctgaacccattgtttccctcaagtataataaaaacttactttcaacttggagttcagagcagggtatcatttagatattccactgtgtctgtattcagacaaatgacacaataaaacccaatgtattcttttggataaaagattgtttgtactgctaaaggaatgacatactgtcttttccttactagaaacattaattttattattaaaaataaagttttattttatttatgttga

SEQ ID NO: 276856 - DNA, 3134 bp, Homo sapiens
ggcctatttatcaaaaagacgggacgtgtggtgtggacaacaaaatccaccacttcccagcgtggtgcctcaattaaaacgctcgtttacagggtgctttagccatctaaattgtcggctgattttaataatgggtctttgaagcagtttttccccgacactaaaaccccacccagcaaaacccctgaagtacaagtaacttgctctcggtttgcaaatgtaattccctcccctgcaccctgaacccgtggtcctggacctcatctggggcccactccgctcggatgctcagcgcctcaggggtcaccaatttcaccacccatctctagagagcacccttgacggcgaaggggaaagggtcaaggcagaaacgcaggccaggctggctgggggagggcagggccgcctcccggccgccgggtgaggtagggaagggctcgagcccgaggaagggaagtagcagagccacagaatttcagagccggacggaaaagcggggactgtggcccaaagcctgggatccggccctggccgggatgagggccggggtcgggcaggatttgggggtgatccacgacgcccaacacgcggcctcccctctgtctccgcaggccccgtgtccctgtccaagtccaacagcaatgccgtctccgccatccctattaacaaggacaacctcttcggcggcgtggtgaaccccaacgaagtcttctgttcagttccgggtcgcctctcgctcctcagctccacctcgaagtacaaggtcacggtggcggaagtgcagcggcggctctcaccacccgagtgtctcaacgcgtcgctgctgggcggagtgctccggagggcgaagtctaaaaatggaggaagatctttaagagaaaaactggacaaaataggattaaatctgcctgcagggagacgtaaagctgccaacgttaccctgctcacatcactagtagagggagaagctgtccacctagccagggactttgggtacgtgtgcgaaaccgaatttcctgccaaagcagtagctgaatttctcaaccgacaacattccgatcccaatgagcaagtgacaagaaaaaacatgctcctggctacaaaacagatatgcaaagagttcaccgacctgctggctcaggaccgatctcccctggggaactcacggcccaaccccatcctggagcccggcatccagagctgcttgacccacttcaacctcatctcccacggcttcggcagccccgcggtgtgtgccgcggtcacggccctgcagaactatctcaccgaggccctcaaggccatggacaaaatgtacctcagcaacaaccccaacagccacacggacaacaacgccaaaagcagtgacaaagaggagaagcacagaaagtgaggctctcctcccgccccgcccctcccacgcctcaccagccccccgcgcgcccaccctccggcgggtgacagctccgggatcagcaacccttcctgctgctgctactgctgctgctgctgccgccgccgccgccgccgctgcccttgggtccccccgagtctccgggactgccctctcgactgtcagtggggcagcctctccgactctgcacccgcctcgacctccccacccgctcccacacccctgtgccctcatgtggagcctaagagaacagaacaggccgtgaagccagcagagaaaagttctgccaagtttgtgaacccttttttttttaaacaaaacaacaaatcaacaacagcaacaacaacaacaaaaattaaaaacttttttctaaaaaaaaagtgaaaataaaaaaaattatatgcgcttcatgggactgagtcaccaccttcccttacatacttcagttcagattgtagccatacttaaaaaaaaaaaaaaaagccaaaagatgatgacaacatttttatcagtattgtgaataaacttgaacacaaatacacgaagttccatgtcatgtcttcagttgtagaagtttttcctctttaaggtaaagcgaccaacttgaactttctctggcaacacgattcgcagttatataagggaatcagtgttcacgtctctgtatatatttatttatgtgtaatttaatgggaattgtaaatatggtgagtctgttttaagcctttttttttttatttatctgatcttgtttacctcttgtttagtgggttttgaatcttccctattagttcttcatgtggttcatggtactgatttagaaatccagtgtttgggggatttttttctctgggattcatgaatttagccctgttgtagcatgttaaaggtgacaaacagctggacaaatttttaaaaagtaaaataaaattttatctataattagtattattacatttagcttttcattgaaccgaaagaaaaaaagtgatattggaccctggaaagattttgaaacttgagtggtttgataacccttctatgtattgtagggagaaaaaaaaaagtttattttattccactgtcctcccttaaaagcatcatttgagcaataaatgaatattgtctttaaaccaagggttagggaattttcctctctctctctctctcctctctctttctgttcaaagaacttcaaacatttgggaccacctggtattctgtattttcactggccatattggaagcagttctagttgcattgtattgagttgtgctggcagtagtttccatgcctgtcaatgtatcatagtcctttgttgcccagataaataaatatttgatacgctttatgtcgatttttttttattcagtggctgtctttacccaggcgtatttttgttcttggcagtattttttattcagtatggttacagtaattgagtttaactctcccttggcaattgctccttgcaataagcagctgaacccattgtttccctcaagtataataaaaacttactttcaacttggagttcagagcagggtatcatttagatattccactgtgtctgtattcagacaaatgacacaataaaacccaatgtattcttttggataaaagattgtttgtactgctaaaggaatgacatactgtcttttccttactagaaacattaattttattattaaaaataaagttttattttatttatgttga

SEQ ID NO: 276857 - DNA, 2280 bp, Homo sapiens
acgcacgcagacacattctccctctctgcgctctctccttcggtctccctctctgcctctttctctttcacttttgcatgccctgcaaccttttaaaatgttgccccttccctgtgattcgccagacgccgcgccgcggccccccgcgcgctcgcccgctccctctctcgctcgctttttgtctctcgcgctccctctccccactccgatttgctacactgagactcccgtcaatggactgcattgagagccggctccggcgcgagttgcctctccgcttcacgctcgatttccaggcattcttcccttattaagtattcgtgtaatattaatagtcatgaatatctgctattaggaggctccaggaacgctgcccagcgcggttattagaagctcaagcgaagccgccgctaagaaaagagggggagacacggattaaggaacacgcacgcacccacacactcacacatactttttcctttttccttttttggggtttttcatttttaaagaactttgaatcataaccagtcgcggcaggatagagaccgtgggttcgaccagctgaaggcgccgcgcgaatcggtggttcaagttcggatggatccgagccgggctcccgcgctccggggagcgtcggcgccgtgactggagtcctgggtggcgcggggctctcggcgcctttgtgtggggcgcgctcgggcggcggggcagccgggcgctccaggcttgcttgtttttttccaccctgactcgttaccccagactcttcgcagatgttagttcacagtttttcagccatggaccgtcacgacggcaccagcaacgggacggcacggttgccccagctgggcactgtaggtcaatctccctacacgagcgccccgccgctgtcccacacccccaatgccgacttccagcccccatacttccccccaccctaccagcctatctacccccagtcgcaagatccttactcccacgtcaacgacccctacagcctgaaccccctgcacgcccagccgcagccgcagcacccaggctggcccggccagaggcagagccaggagtctgggctcctgcacacgcaccgggggctgcctcaccagctgtcgggcctggatcctcgcagggactacaggcggcacgaggacctcctgcacggcccacacgcgctcagctcaggactcggagacctctcgatccactccttacctcacgccatcgaggaggtcccgcatgtagaagacccgggtattaacatcccagatcaaactgtaattaagaaaggccccgtgtccctgtccaagtccaacagcaatgccgtctccgccatccctattaacaaggacaacctcttcggcggcgtggtgaaccccaacgaagtcttctgttcagttccgggtcgcctctcgctcctcagctccacctcgaagtacaaggtcacggtggcggaagtgcagcggcggctctcaccacccgagtgtctcaacgcgtcgctgctgggcggagtgctccggagggcgaagtctaaaaatggaggaagatctttaagagaaaaactggacaaaataggattaaatctgcctgcagggagacgtaaagctgccaacgttaccctgctcacatcactagtagagggagaagctgtccacctagccagggactttgggtacgtgtgcgaaaccgaatttcctgccaaagcagtagctgaatttctcaaccgacaacattccgatcccaatgagcaagtgacaagaaaaaacatgctcctggctacaaaacagatatgcaaagagttcaccgacctgctggctcaggaccgatctcccctggggaactcacggcccaaccccatcctggagcccggcatccagagctgcttgacccacttcaacctcatctcccacggcttcggcagccccgcggtgtgtgccgcggtcacggccctgcagaactatctcaccgaggccctcaaggccatggacaaaatgtacctcagcaacaaccccaacagccacacggaccacggaaaccccatccactacccatccccttcccatgtgaggccgaccaccccggccccccaaccacccctaaaataagacgccaacccaaggcctgacatataagcccccaatcaaccaacctctcccgaaacatgccaaggaactgcccgccccagaaataccccaaatagtctgtgcagattaggaagagaccggtggcttcgcccaccctctctgtaaactctggtactgtgtcctctgcgctgcccca

SEQ ID NO: 276858 - DNA, 2016 bp, Homo sapiens
acgcacgcagacacattctccctctctgcgctctctccttcggtctccctctctgcctctttctctttcacttttgcatgccctgcaaccttttaaaatgttgccccttccctgtgattcgccagacgccgcgccgcggccccccgcgcgctcgcccgctccctctctcgctcgctttttgtctctcgcgctccctctccccactccgatttgctacactgagactcccgtcaatggactgcattgagagccggctccggcgcgagttgcctctccgcttcacgctcgatttccaggcattcttcccttattaagtattcgtgtaatattaatagtcatgaatatctgctattaggaggctccaggaacgctgcccagcgcggttattagaagctcaagcgaagccgccgctaagaaaagagggggagacacggattaaggaacacgcacgcacccacacactcacacatactttttcctttttccttttttggggtttttcatttttaaagaactttgaatcataaccagtcgcggcaggatagagaccgtgggttcgaccagctgaaggcgccgcgcgaatcggtggttcaagttcggatggatccgagccgggctcccgcgctccggggagcgtcggcgccgtgactggagtcctgggtggcgcggggctctcggcgcctttgtgtggggcgcgctcgggcggcggggcagccgggcgctccaggcttgcttgtttttttccaccctgactcgttaccccagactcttcgcagatgttagttcacagtttttcagccatggaccgtcacgacggcaccagcaacgggacggcacggttgccccagctgggcactgtaggtcaatctccctacacgagcgccccgccgctgtcccacacccccaatgccgacttccagcccccatacttccccccaccctaccagcctatctacccccagtcgcaagatccttactcccacgtcaacgacccctacagcctgaaccccctgcacgcccagccgcagccgcagcacccaggctggcccggccagaggcagagccaggagtctgggctcctgcacacgcaccgggggctgcctcaccagctgtcgggcctggatcctcgcagggactacaggcggcacgaggacctcctgcacggcccacacgcgctcagctcaggactcggagacctctcgatccactccttacctcacgccatcgaggaggtcccgcatgtagaagacccgggtattaacatcccagatcaaactgtaattaagaaaggccccgtgtccctgtccaagtccaacagcaatgccgtctccgccatccctattaacaaggacaacctcttcggcggcgtggtgaaccccaacgaagtcttctgttcagttccgggtcgcctctcgctcctcagctccacctcgaagtacaaggtcacggtggcggaagtgcagcggcggctctcaccacccgagtgtctcaacgcgtcgctgctgggcggagtgctccggagggcgaagtctaaaaatggaggaagatctttaagagaaaaactggacaaaataggattaaatctgcctgcagggagacgtaaagctgccaacgttaccctgctcacatcactagtagagggtgcagagatggcagcggttctgaggcaagagtactgaaatttgctttataatttacttgattatccaagttgtgcatttgaagaaacacatccatgtttccgtagtgcttagtgctatgggtgaaagaaatcttaaagtcaagcagagaagaaaaaaataaaacccacgcatacctcagaaaagcccaattcaactcctaacatcacccaaccaccccatcccagaagaatgaaaccatggagcacaacaggtaatatcagttttcacacctctgcatccccttttaggatgctccgggatatttttccttgtgaatttcagtgaacgattcttttctatattaaacttggtttactacctgagttgcacaggt

SEQ ID NO: 276859 - DNA, 499 bp, Homo sapiens
gtttcatgggagaagcgctaaactttacctcaacatttatgtaaagttaaagctgcacagaataaaccaagattctgagtcttgaaagtttatttcaaagaaaagacaatgcctgtgccacatatttgacttggttttaatttgcagtagaaagaataagaacaagaagaggggaggaaaggaggtgtcagaaggcaaaaagaagagtactttgaggctcttcggagacctagagtaaaaaatactgccattaaatggagccaccatgagttttataaatattacgaagctccaggaaatatgagcaggatctcaaatatattcaacaagcttccaatttttgtcttttgagatggttgctcttggaacacagaaatatgctttaagatgtcaagcctcctctgctgatgctgtatggagaacagacaagctttcccatcaagccctaaccaaactgcagaactgtgaataaaatcaataattgttatgaaaaggcaaa

SEQ ID NO: 276860 - DNA, 653 bp, Homo sapiens
agactttttattgaagccaatttttattagttatacatcactaccttgttttatattttttcctaatgttaagggtcagttcattcttttcaactccaaatattttacagaaaataaatgggaaaaaaaccagagtatttatataaatgatcctcataaggataagcctttacatttaaaactttagtcaacaataataactacacataaaggttgataagaatatcttgctactaagaggataatctgccactagaattaaaaaaattcatacttcctagaaacatcaattcaatcagtgatctacacaaagagttagaatataccagttcataattcttgttctaagatttcataaattattatcccaagcaatgtcatctgctagctttaaagccttctagaaagaagacactataatatctccttctgataaaactcttgcattaaattttttccttttatcgcagctgagaagtatatacacttgacccacaggtttgaaatgctctgccacccccaagactgcaagactgcaacccctccacttcctcctcatccttaacttacctaaaatgaagatgatgagaatgtacaccttgatgatgagccatttccacctaataaatagtaaatatattttctcttcctta

SEQ ID NO: 276861 - DNA, 393 bp, Homo sapiens
gtttcatgggagaagcgctaaactttacctcaacatttatgtaaagttaaagctgcacaggagacacacgttgaagtattttgcggtgaaatgttatgatgtctgcaaggaactctcaaatggttgaagaaaaatgtgtatgtcagataaagagggaagagaaaacattattttttcctgtccctcattgcttctggatgactctcaacactgagaagtatatacacttgacccacaggtttgaaatgctctgccacccccaagactgcaagactgcaacccctccacttcctcctcatccttaacttacctaaaatgaagatgatgagaatgtacaccttgatgatgagccatttccacctaataaatagtaaatatattttctcttcctta

SEQ ID NO: 276862 - DNA, 363 bp, Homo sapiens
gtttcatgggagaagcgctaaactttacctcaacatttatgtaaagttaaagctgcacagaataaaccaagattctgagtcttgaaagtttatttcaaagaaaagacaatgcctgtgccacatatttgacttggttttataaatattacgaagctccaggaaatatgagcaggatctcaaatatattcaacaagcttccaatttttgtcttttgagatggttgctcttggaacacagaaatatgctttaagatgtcaagcctcctctgctgatgctgtatggagaacagacaagctttcccatcaagccctaaccaaactgcagaactgtgaataaaatcaataattgttatgaaaaggcaaa

SEQ ID NO: 276863 - DNA, 2749 bp, Homo sapiens
atgttctgagagtcagagggagtgcaggcacagaatccaggtccccatgggggctggcaggggacagctgcacattttacaccccctggcagggctcaacctttccttagagatgggctgtgaaggttgtctgccttgagggaaggagctcctgacgtcacagagcggtggtgcttccacctaccctgtccccaaggagcctgcacactgatggaggaggtacagccgtggaggagaaccagagtctggaggggaggcacagtcctcaggagcccccaggctgacaggggaaacaaaacacacaataaaccccaaacttgcaaggttctggggcaggcaccgaggtccgagtggcaaggagacaggatccagccctgtgcagtggtgaggaggcccctggggctgctgtgatcggcctggaatgtcaggctgtgagctcagccctctcggcctgcgtgtcgggctgtcagcagggccggcgcacgggagaagatttccagccccctctgggccatggacaggcctaaatttagctagtagacaaggggctggccccaagcccagggacagtcggccttataaagcggccgcagtcggagcctggcacgctcgcccagaggcctgcgcccacaccctctcctgtccagccctcgcccgcctgggcagggcccggcgccgtccgtggatgagccacagaacctcttccaccttccgagcggagagaagtttccattcctcttcctcttcctcctcctcttccacctcctcctcggcctcccgtgctctcccggcccaggacccgcccatggagaaggccctgagcatgttttccgatgactttggcagcttcatgcggccccactcggagcccctggccttcccagcccgccccggtggggcaggcaacatcaagaccctaggagacgcctatgagtttgcggtggacgtgagagacttctcacctgaagacatcattgtcaccacctccaacaaccacatcgaggtgcgggctgagaagctggcggctgacggcactgtcatgaacaccttcgctcacaagtgccagctgccggaggacgtggacccgacgtcggtgacctcggctctgcgggaggacggcagcctcactatccgggcacggcgtcacccgcatacagaacacgtccagcagaccttccggacggagatcaaaatctgagtgcctctcccttccctttccctgtccccccgccccacgcctgccagcaaagcctcgctaaccccattacaacagctccaggacatctcagcccaggttctagcccccacgcaccccagaccccaggtggaccatcctcccaaactagggccctccactctatccagggcaggccagggactccctggcctgacacatgatgcccagatttcagatttggcctccgtcacttaatccagagtacaggggctggggtcagggaaggaagatctaaagaacccactgtgggtcaggggaatgggaccagcaggacatatgggcaagctctgcaggacagacagacagacaaaccctctgatctatgaagtctctgcagggcaaggggaccagggacctggaaccctcttggccaaggggagtgggagggacagagggaaggtcacaggcaagggtgcctatctaagtggaactaattgcccgagggctcagcaaggccaagaggagacagccgtgacggtaaacttcccctctaccagcctccaagccccacgccagcgagcaggctgcctgcccaccccgtgcccccagccagctggctgtgccagggcagagccatgccacatctgtatatagatggggtttttccaatacagctggttcgtgataaactgcatgaaactcctgccgtcctgcgcctgctggggcctccaggcaaggccaagtggggttgggggtggggctggtccttctccctcccacaggcctgtgttcttggggctgctcccatgcagacaggatcacctaacagagatggaagccagggcatggatggggctttgggtcctcgaggttggaccccagcttcttgccaccttcccctccgggcagtcagctctccatccatccccctctttaatctatgaatctataggctcggtgtgtgtaacacacacacccctatcgttgtccttcaaatactcagcattaccattggttgaggccaaattcagagctttctcaaatcagatttacaatctccattttcattaacggggaaacatccccgagccactgagtgctgtgctttgtcactgaaggttagatctgaacccagggtgtcaactgctgctctcaactccccacctctgggcactgaggagtatttcccctcattctacctctctaaggctatgcaaccctccccacgtcttccagctgggggatgggggggagtcataggaaaagcccccatctcccatctgggatagggaccttccatcagccttaaccctgggaaatgcctgctgcccccaatgactcttggtttcgtctcccacatacagaagcagggtggaggggaagggtgggtctcagttagcaggggtccccagggcaagtcagcctcctccctccatgcctctctggtcagtgtgccttagggtggcctctcactcccaccactctgggccccttgggggaggactggggagggggccgtgggagagccctgacgctggaacctgtatacacaataaaggacagtctcacaga

SEQ ID NO: 276864 - DNA, 3306 bp, Homo sapiens
atgttctgagagtcagagggagtgcaggcacagaatccaggtccccatgggggctggcaggggacagctgcacattttacaccccctggcagggctcaacctttccttagagatgggctgtgaaggttgtctgccttgagggaaggagctcctgacgtcacagagcggtggtgcttccacctaccctgtccccaaggagcctgcacactgatggaggaggtacagccgtggaggagaaccagagtctggaggggaggcacagtcctcaggagcccccaggctgacaggggaaacaaaacacacaataaaccccaaacttgcaaggttctggggcaggcaccgaggtccgagtggcaaggagacaggatccagccctgtgcagtggtgaggaggcccctggggctgctgtgatcggcctggaatgtcaggctgtgagctcagccctctcggcctgcgtgtcgggctgtcagcagggccggcgcacgggagaagatttccagccccctctgggccatggacaggcctaaatttagctagtagacaaggggctggccccaagcccagggacagtcggccttataaagcggccgcagtcggagcctggcacgctcgcccagaggcctgcgcccacaccctctcctgtccagccctcgcccgcctgggcagggcccggcgccgtccgtggatgagccacagaacctcttccaccttccgagcggagagaagtttccattcctcttcctcttcctcctcctcttccacctcctcctcggcctcccgtgctctcccggcccaggacccgcccatggagaaggccctgagcatgttttccgatgactttggcagcttcatgcggccccactcggagcccctggccttcccaggcaagtgatccgggccctgaggggaggggaggtgcacagggaggggacgtctgctccagggcgccaccgaaggcgctgtggctgccggtcggcctggaacaggtgctgcacagcctgcagccatgtgtggccaccaagacagatgtggccacagggacagatgtggccatgaaaacaggtgggcctctaaggaacagttgtggccctgggggttggacatggttccatggccacccatgctctgtaaccacagccaatcccagctggagccctggagggctggatgggtgagcggtggggggcagcccccaggctccaggcctggggtggggttgttacagacctagcctcatatacacacacactgtgctgggtgaggccccacccccaccccagaaaaggtgggctgtaggaatgaggaggagcttagggagaaacagctaggggggaggtagggcctgggggagccgccccttgccccaagagaaggagccagaacccccggatctgcatgcaaggcctgctccatgcctcgctcacagcagcccatcccacagcccgccccggtggggcaggcaacatcaagaccctaggagacgcctatgagtttgcggtggacgtgagagacttctcacctgaagacatcattgtcaccacctccaacaaccacatcgaggtgcgggctgagaagctggcggctgacggcactgtcatgaacaccttcgctcacaagtgccagctgccggaggacgtggacccgacgtcggtgacctcggctctgcgggaggacggcagcctcactatccgggcacggcgtcacccgcatacagaacacgtccagcagaccttccggacggagatcaaaatctgagtgcctctcccttccctttccctgtccccccgccccacgcctgccagcaaagcctcgctaaccccattacaacagctccaggacatctcagcccaggttctagcccccacgcaccccagaccccaggtggaccatcctcccaaactagggccctccactctatccagggcaggccagggactccctggcctgacacatgatgcccagatttcagatttggcctccgtcacttaatccagagtacaggggctggggtcagggaaggaagatctaaagaacccactgtgggtcaggggaatgggaccagcaggacatatgggcaagctctgcaggacagacagacagacaaaccctctgatctatgaagtctctgcagggcaaggggaccagggacctggaaccctcttggccaaggggagtgggagggacagagggaaggtcacaggcaagggtgcctatctaagtggaactaattgcccgagggctcagcaaggccaagaggagacagccgtgacggtaaacttcccctctaccagcctccaagccccacgccagcgagcaggctgcctgcccaccccgtgcccccagccagctggctgtgccagggcagagccatgccacatctgtatatagatggggtttttccaatacagctggttcgtgataaactgcatgaaactcctgccgtcctgcgcctgctggggcctccaggcaaggccaagtggggttgggggtggggctggtccttctccctcccacaggcctgtgttcttggggctgctcccatgcagacaggatcacctaacagagatggaagccagggcatggatggggctttgggtcctcgaggttggaccccagcttcttgccaccttcccctccgggcagtcagctctccatccatccccctctttaatctatgaatctataggctcggtgtgtgtaacacacacacccctatcgttgtccttcaaatactcagcattaccattggttgaggccaaattcagagctttctcaaatcagatttacaatctccattttcattaacggggaaacatccccgagccactgagtgctgtgctttgtcactgaaggttagatctgaacccagggtgtcaactgctgctctcaactccccacctctgggcactgaggagtatttcccctcattctacctctctaaggctatgcaaccctccccacgtcttccagctgggggatgggggggagtcataggaaaagcccccatctcccatctgggatagggaccttccatcagccttaaccctgggaaatgcctgctgcccccaatgactcttggtttcgtctcccacatacagaagcagggtggaggggaagggtgggtctcagttagcaggggtccccagggcaagtcagcctcctccctccatgcctctctggtcagtgtgccttagggtggcctctcactcccaccactctgggccccttgggggaggactggggagggggccgtgggagagccctgacgctggaacctgtatacacaataaaggacagtctcacaga

SEQ ID NO: 276865 - DNA, 1336 bp, Homo sapiens
atgttctgagagtcagagggagtgcaggcacagaatccaggtccccatgggggctggcaggggacagctgcacattttacaccccctggcagggctcaacctttccttagagatgggctgtgaaggttgtctgccttgagggaaggagctcctgacgtcacagagcggtggtgcttccacctaccctgtccccaaggagcctgcacactgatggaggaggtacagccgtggaggagaaccagagtctggaggggaggcacagtcctcaggagcccccaggctgacaggggaaacaaaacacacaataaaccccaaacttgcaaggttctggggcaggcaccgaggtccgagtggcaaggagacaggatccagccctgtgcagtggtgaggaggcccctggggctgctgtgatcggcctggaatgtcaggctgtgagctcagccctctcggcctgcgtgtcgggctgtcagcagggccggcgcacgggagaagatttccagccccctctgggccatggacaggcctaaatttagctagtagacaaggggctggccccaagcccagggacagtcggccttataaagcggccgcagtcggagcctggcacgctcgcccagaggcctgcgcccacaccctctcctgtccagccctcgcccgcctgggcagggcccggcgccgtccgtggatgagccacagaacctcttccaccttccgagcggagagaagtttccattcctcttcctcttcctcctcctcttccacctcctcctcggcctcccgtgctctcccggcccaggacccgcccatggagaaggccctgagcatgttttccgatgactttggcagcttcatgcggccccactcggagcccctggccttcccagcccgccccggtggggcaggcaacatcaagaccctaggagacgcctatgagtttgcggtggacgtgagagacttctcacctgaagacatcattgtcaccacctccaacaaccacatcgaggtgcgggctgagaagctggcggctgacggcactgtcatgaacaccttcgctcacaagtgccagctgccggaggacgtggacccgacgtcggtgacctcggctctgcgggaggacggcagcctcactatccgggcacggcgtcacccgcatacagaacacgtccagcagaccttccggacggagatcaaaatctgagtgcctctctggtcagtgtgccttagggtggcctctcactcccaccactctgggccccttgggggaggactggggagggggccgtgggagagccctgacgctggaacctgtatacacaataaaggacagtctcacaga

SEQ ID NO: 276866 - DNA, 1951 bp, Homo sapiens
aggctaggatcgaggcctggtgttcagaccccggatctgcatgcaaggcctgctccatgcctcgctcacagcagcccatcccacagcccgccccggtggggcaggcaacatcaagaccctaggagacgcctatgagtttgcggtggacgtgagagacttctcacctgaagacatcattgtcaccacctccaacaaccacatcgaggtgcgggctgagaagctggcggctgacggcactgtcatgaacaccttcgctcacaagtgccagctgccggaggacgtggacccgacgtcggtgacctcggctctgcgggaggacggcagcctcactatccgggcacggcgtcacccgcatacagaacacgtccagcagaccttccggacggagatcaaaatctgagtgcctctcccttccctttccctgtccccccgccccacgcctgccagcaaagcctcgctaaccccattacaacagctccaggacatctcagcccaggttctagcccccacgcaccccagaccccaggtggaccatcctcccaaactagggccctccactctatccagggcaggccagggactccctggcctgacacatgatgcccagatttcagatttggcctccgtcacttaatccagagtacaggggctggggtcagggaaggaagatctaaagaacccactgtgggtcaggggaatgggaccagcaggacatatgggcaagctctgcaggacagacagacagacaaaccctctgatctatgaagtctctgcagggcaaggggaccagggacctggaaccctcttggccaaggggagtgggagggacagagggaaggtcacaggcaagggtgcctatctaagtggaactaattgcccgagggctcagcaaggccaagaggagacagccgtgacggtaaacttcccctctaccagcctccaagccccacgccagcgagcaggctgcctgcccaccccgtgcccccagccagctggctgtgccagggcagagccatgccacatctgtatatagatggggtttttccaatacagctggttcgtgataaactgcatgaaactcctgccgtcctgcgcctgctggggcctccaggcaaggccaagtggggttgggggtggggctggtccttctccctcccacaggcctgtgttcttggggctgctcccatgcagacaggatcacctaacagagatggaagccagggcatggatggggctttgggtcctcgaggttggaccccagcttcttgccaccttcccctccgggcagtcagctctccatccatccccctctttaatctatgaatctataggctcggtgtgtgtaacacacacacccctatcgttgtccttcaaatactcagcattaccattggttgaggccaaattcagagctttctcaaatcagatttacaatctccattttcattaacggggaaacatccccgagccactgagtgctgtgctttgtcactgaaggttagatctgaacccagggtgtcaactgctgctctcaactccccacctctgggcactgaggagtatttcccctcattctacctctctaaggctatgcaaccctccccacgtcttccagctgggggatgggggggagtcataggaaaagcccccatctcccatctgggatagggaccttccatcagccttaaccctgggaaatgcctgctgcccccaatgactcttggtttcgtctcccacatacagaagcagggtggaggggaagggtgggtctcagttagcaggggtccccagggcaagtcagcctcctccctccatgcctctctggtcagtgtgccttagggtggcctctcactcccaccactctgggccccttgggggaggactggggagggggccgtgggagagccctgacgctggaacctgtatacacaataaaggacagtctcacaga

SEQ ID NO: 276867 - DNA, 1374 bp, Homo sapiens
tcagggagggtaggtcatctccaaatcttgaatagtaagtggccctttcacagtgccgtatcagtaaccatgaaggtaaagagattgtggactttggtaatactcactgtaaaatcacagtggtagacagtcatcagagacctatatatgcatacaagttattcagcaccaacaccaggagatatcctgtatttaggatgtaaaactttttctagagtgttttttgaaattttgctttcaattgacttggttaacaaattattgtttcctgtggatctctaaatttgaggccctaatggaaacaaactagaatcaagctacaatcatttctgttatatcagccaatcagaagagttatttgttctgtctggctatatgttgttaaattctatatggtaatgtgaaaaaatacttcagcttagagcacctctccctcccctacatacctacccacacatttctcagaggagttcttattgccacagcctttggagtaaaacagctcagagcttgaacctggctctgttgcataatagctgtagctcctcagttttcatctataaaatgaaaataacggagatgaggattaagggaaattatatacacagcactttgcagccaaatactggatacaaggtaagcactcgatcaatggtatgctgaattattttatcctacattaatgtatttgaaaaaaacataattggggatgattaatatgtcattacagatgtttttccccttttcgatgaaaatgggataaatagaccagtctgttcctatgttaaaccacttcgagctggacggcttcttgatactccaaggcaagcagcaagatttgttaatgtccttggttatgaacgagcccctgttattggaggaggaggtaaacaggagcagtggtgcactctgctggcctttctctgtagaaacaagcttggaagagaaatgaggttctcatagggtcaaagtagaatgcataaagagccaagagcagctctagacctctaccctgaagatgggagtggagagggaggtattcaaccagcaagaaatcggaaaacgcgcagagcggccgcggggtcacgggaaactgccggaggctttcagggcccagggcccggcggggaggcttcagcgggcctgcattttcttaggcatccgctccaggcgggttcaagttttcaaccagaccttcggcgatccagcgcctccagagcgtgcatcccccggcccgtgcggccccctaaggggcgggcgctgggcggcgctggacggcgcgaggcggggcggggcggggcggggcgccggacgccatcgcgtcgctaccggccggcggctgtctgaccgggactgcagccgtgtcctcgccgc

SEQ ID NO: 276868 - DNA, 496 bp, Homo sapiens
taatgtaggagaaagagctgagctggtcaggaggcctgaattccagtaccaactgtttcatttactgcttctgtattttgtcctatgactgtattttctcttctgtaagataggaataataatatctgacccttcaagttgtataactgaagagcacattttgaaagtataaatagcactacagatgtataaggtattacaattgtgggcaatgaaaatttaggttacaacattaaaaaatatgctgttttttttttttcctttctggtgcacttttctaggtgaatgtgcctcttaggagcacttgtccagaagtgtctgggaaaagcttgggctgcacagtgatggtgctccctgaaagactcagagcagcacagccagtacctccagagtatgaagcatgaagtacacttattctacaagaataagaagtaaatataaaaaaagtcaaggattcaatttttaataaagtaacaaaatcaacaaaacaaaaaaa

SEQ ID NO: 276869 - DNA, 2508 bp, Homo sapiens
  misc_feature (2482)..(2482): n is a, c, g, or t
agccctgtttgtccgccactgtttgaaaacagttggcgccgccgccgccggggcctcatttccaggtcagccccgggcctgacgcggcgttgcgtcccccgggagctgcgctaggcgaacggctgcggcgctttgtgctccagtcgctcctaacgctccctggcccggccggggccgcgcagttagggcatctgaggcggggagaagcggcggggagacgccggctgccagcatgtcgctgcctccggagaaagcctccgagctgaagcagctcatccaccagcagctgagcaagatggatgtccatggtagaataagagaaatccttgctgagactatacgggaagaattggcacctgatcaacagcatttatcaacagaagatttgatcaaagcccttagacgtcgaggaatcattgacgatgtgatgaaagaacttaattttgttactgacagtgttgagcaagaactcccttcctctccaaaacaacctatttgttttgatagacaatcgacattaaaaaaaactaatattgatccaacacggaggtatctttaccttcaggttttgggtggaaaagctttcttggaacatctgcaagaacctgagcctttacctggacaagtttgttcaacgtttactttatgtttacattatcgaaaccaacgttttcgttctaaacctgttccatgtgcctgtgaaccagattttcatgatggctttttacttgaagtacacagagaaagcttgggtgatggaactagaatggctgattcaacaacaatgttatcaataagtgatccaattcatatggtgctaatcaaaacagacatatttggtgagacgactttagtagcatcatattttctggaatggcgatcggttttgggctcagaaaatggagtgaccagtctgactgtggaacttatgggtgtaggcacagaatcaaaagtttctgtgggaattttaaatataaaacttgaaatgtatccaccactcaatcaaacgttatctcaagaagtagtgaacacacagcttgctttggaacgtcagaaaactgcagagaaagagcgattatttcttgtatatgctaagcagtggtggagagaatatttgcaaattcgaccctcacacaactcacgactggttaagatttttgcacaggatgaaaatgggataaatagaccagtctgttcctatgttaaaccacttcgagctggacggcttcttgatactccaaggcaagcagcaagatttgttaatgtccttggttatgaacgagcccctgttattggaggaggaggtaaacaggagcagtggtgcactctgctggcctttctctgtagaaacaagggtgactgtgaagatcacgctaaccttctgtgcagccttcttcttggatatggattagaagcctttgtttgtgttgggaccaaggcaaaaggagtacctcatgcatgggttatgacttgtggaactgatggggccatcactttttgggagagtttaacaggacacaggtacatccataaacctaccaatcctgatgaacctccagttgctgaacagcccaaaccactgtacccatatcgaacaattggttgtgttttcaaccatcagatgttcctgggaaattgtcaaccctctgatgcagtagaaacctgtgtatttgatttgaacgatgaatccaaatggaaacccatgagtgaggaagcaattaaatctgtgtgtgctcctggagctacaacatcccttcctccctttccacctctgtgtgcatccacaattgacgcgtcagtaacaagtaatgaaattgaaatgcagctgaggctcctggtgtcagaacacaggaaggatcttggcctcactactgtttgggaagaccagctctcctaccttttatcaccagctttggcttcttatgaatttgagcgtacaacaagtatatcagcaggcaatgaagaatttcaagatgccataagaagggctgtacctgatggtcacacatttaaagggttcccaatacattttgtgtatagaaatgcaagacgtgcatttgccacatgtcttcgatctcctttctgtgaagaaataatctgttgccgtggagaccaagtgcgactggcagttcgtgtccgagtatttacttaccctgaatctgcatgtgctgtttggatcatgtttgcttgtaaatatcgctcggtattatagggccaatatttatataagatttatacctgtgtttaattggaattttacacattgtacattacttagctatttagaggtttgttattttaaaatcacaatctggcttgaatggcatacttcaattttgtatatacttgactggtaatgtttaaaaaaaatcatgcattcctttaaaaattaaggctgaaaaacttgtataaatctccctggaatttagtataaattaagtgtatattctattttaataaatgctactttgtttacagttanaaaaaaaaatcgccctcgttgcctca

SEQ ID NO: 276870 - DNA, 2416 bp, Homo sapiens
attttaatacagcacctttttttggtttttgaagtttatgaacccgtttgttataaaaattgacctaataacagcttctactctgtgatgacactttattaaaatcagctcatagtggaattataagccaactgttacataaggtttacagaaagtttaaccttgttgaaggacagtgttgagcaagaactcccttcctctccaaaacaacctatttgttttgatagacaatcgacattaaaaaaaactaatattgatccaacacggaggtatctttaccttcaggttttgggtggaaaagctttcttggaacatctgcaagaacctgagcctttacctggacaagtttgttcaacgtttactttatgtttacattatcgaaaccaacgttttcgttctaaacctgttccatgtgcctgtgaaccagattttcatgatggctttttacttgaagtacacagagaaagcttgggtgatggaactagaatggctgattcaacaacaatgttatcaataagtgatccaattcatatggtgctaatcaaaacagacatatttggtgagacgactttagtagcatcatattttctggaatggcgatcggttttgggctcagaaaatggagtgaccagtctgactgtggaacttatgggtgtaggcacagaatcaaaagtttctgtgggaattttaaatataaaacttgaaatgtatccaccactcaatcaaacgttatctcaagaagtagtgaacacacagcttgctttggaacgtcagaaaactgcagagaaagagcgattatttcttgtatatgctaagcagtggtggagagaatatttgcaaattcgaccctcacacaactcacgactggttaagatttttgcacaggatgaaaatgggataaatagaccagtctgttcctatgttaaaccacttcgagctggacggcttcttgatactccaaggcaagcagcaagatttgttaatgtccttggttatgaacgagcccctgttattggaggaggaggtaaacaggagcagtggtgcactctgctggcctttctctgtagaaacaagggtgactgtgaagatcacgctaaccttctgtgcagccttcttcttggatatggattagaagcctttgtttgtgttgggaccaaggcaaaaggagtacctcatgcatgggttatgacttgtggaactgatggggccatcactttttgggagagtttaacaggacacaggtacatccataaacctaccaatcctgatgaacctccagttgctgaacagcccaaaccactgtacccatatcgaacaattggttgtgttttcaaccatcagatgttcctgggaaattgtcaaccctctgatgcagtagaaacctgtgtatttgatttgaacgatgaatccaaatggaaacccatgagtgaggaagcaattaaatctgtgtgtgctcctggagctacaacatcccttcctccctttccacctctgtgtgcatccacaattgacgcgtcagtaacaagtaatgaaattgaaatgcagctgaggctcctggtgtcagaacacaggaaggatcttggcctcactactgtttgggaagaccagctctcctaccttttatcaccagctttggcttcttatgaatttgagcgtacaacaagtatatcagcaggcaatgaagaatttcaagatgccataagaagggctgtacctgatggtcacacatttaaagggttcccaatacattttgtgtatagaaatgcaagacgtgcatttgccacatgtcttcgatctcctttctgtgaagaaataatctgttgccgtggagaccaagtgcgactggcagttcgtgtccgagtatttacttaccctgaatctgcatgtgctgtttggatcatgtttgcttgtaaatatcgctcggtattatagggccaatatttatataagatttatacctgtgtttaattggaattttacacattgtacattacttagctatttagaggtttgttattttaaaatcacaatctggcttgaatggcatacttcaattttgtatatacttgactggtaatgtttaaaaaaaatcatgcattcctttaaaaattaaggctgaaaaacttgtataaatctccctggaatttagtataaattaagtgtatattctattttaataaatgctactttgtttacagttatcagtagtttaaatattaatataaaatgcattcagttttctttacacaaacaggtaatcaaagagatgtttgtctaagggtttgagccctagacaaatcagtatgatcattacttttcacaggttaatggaattattttatacagattaggagaaattaacctcatgacagatttatttattgcattggtgaaaataaatgttaatgaattacca

SEQ ID NO: 276871 - DNA, 2404 bp, Homo sapiens
agccctgtttgtccgccactgtttgaaaacagttggcgccgccgccgccggggcctcatttccaggtcagccccgggcctgacgcggcgttgcgtcccccgggagctgcgctaggcgaacggctgcggcgctttgtgctccagtcgctcctaacgctccctggcccggccggggccgcgcagttagggcatctgaggcggggagaagcggcggggagacgccggctgccagcatgtcgctgcctccggagaaagcctccgagctgaagcagctcatccaccagcagctgagcaagatggatgtccatggtagaataagagaaatccttgctgagactatacgggaagaattggcacctgatcaacagcatttatcaacagaagatttgatcaaagcccttagacgtcgaggaatcattgacgatgtgatgaaagaacttaattttgttactgacagtgttgagcaagaactcccttcctctccaaaacaacctatttgttttgatagacaatcgacattaaaaaaaactaatattgatccaacacggaggtatctttaccttcaggttttgggtggaaaagctttcttggaacatctgcaagaacctgagcctttacctggacaagtttgttcaacgtttactttatgtttacattatcgaaaccaacgttttcgttctaaacctgttccatgtgcctgtgaaccagattttcatgatggctttttacttgaagtacacagagaaagcttgggtgatggaactagaatggctgattcaacaacaatgttatcaataagtgatccaattcatatggtgctaatcaaaacagacatatttggtgagacgactttagtagcatcatattttctggaatggcgatcggttttgggctcagaaaatggagtgaccagtctgactgtggaacttatgggtgtaggcacagaatcaaaagtttctgtgggaattttaaatataaaacttgaaatgtatccaccactcaatcaaacgttatctcaagaagtagtgaacacacagcttgctttggaacgtcagaaaactgcagagaaagagcgattatttcttgtatatgctaagcagtggtggagagaatatttgcaaattcgaccctcacacaactcacgactggttaagatttttgcacaggatgaaaatgggataaatagaccagtctgttcctatgttaaaccacttcgagctggacggcttcttgatactccaaggcaagcagcaagatttgttaatgtccttggttatgaacgagcccctgttattggaggaggaggtaaacaggagcagtggtgcactctgctggcctttctctgtagaaacaagggtgactgtgaagatcacgctaaccttctgtgcagccttcttcttggatatggattagaagcctttgtttgtgttgggaccaaggcaaaaggagtacctcatgcatgggttatgacttgtggaactgatggggccatcactttttgggagagtttaacaggacacaggtacatccataaacctaccaatcctgatgaacctccagttgctgaacagcccaaaccactgtacccatatcgaacaattggttgtgttttcaaccatcagatgttcctgggaaattgtcaaccctctgatgcagtagaaacctgtgtatttgatttgaacgatgaatccaaatggaaacccatgagtgaggaagcaattaaatctgtgtgtgctcctggagctacaacatcccttcctccctttccacctctgtgtgcatccacaattgacgcgtcagtaacaagtaatgaaattgaaatgcagctgaggctcctggtgtcagaacacaggaaggatcttggcctcactactgtttgggaagaccagctctcctaccttttatcaccagctttggcttcttatgaatttgagcgtacaacaagtatatcagcaggcaatgaagaatttcaagatgccataagaagggctgtacctgatggtcacacatttaaagggttcccaatacattttgtgtatagaaatgcaagacgtgcatttgccacatgtcttcgatctcctttctgtgaagaaataatctgttgccgtggagaccaagtgcgactggcagttcgtgtccgagtatttacttaccctgaatctgcatgtgctgtttggatcatgtttgcttgtgaatgtgcctcttaggagcacttgtccagaagtgtctgggaaaagcttgggctgcacagtgatggtgctccctgaaagactcagagcagcacagccagtacctccagagtatgaagcatgaagtacacttattctacaagaataagaagtaaatataaaaaaagtcaaggattcaatttttaataaagtaacaaaatcaacaaaacaaaaaaa

SEQ ID NO: 276872 - DNA, 2278 bp, Homo sapiens
tcagggagggtaggtcatctccaaatcttgaatagtaagtggccctttcacagtgccgtatcagtaaccatgaaggtaaagagattgtggactttggtaatactcactgtaaaatcacagtggtagacagtcatcagagacctatatatgcatacaagttattcagcaccaacaccaggagatatcctgtatttaggatgtaaaactttttctagagtgttttttgaaattttgctttcaattgacttggttaacaaattattgtttcctgtggatctctaaatttgaggccctaatggaaacaaactagaatcaagctacaatcatttctgttatatcagccaatcagaagagttatttgttctgtctggctatatgttgttaaattctatatggtaatgtgaaaaaatacttcagcttagagcacctctccctcccctacatacctacccacacatttctcagaggagttcttattgccacagcctttggagtaaaacagctcagagcttgaacctggctctgttgcataatagctgtagctcctcagttttcatctataaaatgaaaataacggagatgaggattaagggaaattatatacacagcactttgcagccaaatactggatacaaggtaagcactcgatcaatggtatgctgaattattttatcctacattaatgtatttgaaaaaaacataattggggatgattaatatgtcattacagatgtttttccccttttcgatgaaaatgggataaatagaccagtctgttcctatgttaaaccacttcgagctggacggcttcttgatactccaaggcaagcagcaagatttgttaatgtccttggttatgaacgagcccctgttattggaggaggaggtaaacaggagcagtggtgcactctgctggcctttctctgtagaaacaagggtgactgtgaagatcacgctaaccttctgtgcagccttcttcttggatatggattagaagcctttgtttgtgttgggaccaaggcaaaaggagtacctcatgcatgggttatgacttgtggaactgatggggccatcactttttgggagagtttaacaggacacaggtacatccataaacctaccaatcctgatgaacctccagttgctgaacagcccaaaccactgtacccatatcgaacaattggttgtgttttcaaccatcagatgttcctgggaaattgtcaaccctctgatgcagtagaaacctgtgtatttgatttgaacgatgaatccaaatggaaacccatgagtgaggaagcaattaaatctgtgtgtgctcctggagctacaacatcccttcctccctttccacctctgtgtgcatccacaattgacgcgtcagtaacaagtaatgaaattgaaatgcagctgaggctcctggtgtcagaacacaggaaggatcttggcctcactactgtttgggaagaccagctctcctaccttttatcaccagctttggcttcttatgaatttgagcgtacaacaagtatatcagcaggcaatgaagaatttcaagatgccataagaagggctgtacctgatggtcacacatttaaagggttcccaatacattttgtgtatagaaatgcaagacgtgcatttgccacatgtcttcgatctcctttctgtgaagaaataatctgttgccgtggagaccaagtgcgactggcagttcgtgtccgagtatttacttaccctgaatctgcatgtgctgtttggatcatgtttgcttgtaaatatcgctcggtattatagggccaatatttatataagatttatacctgtgtttaattggaattttacacattgtacattacttagctatttagaggtttgttattttaaaatcacaatctggcttgaatggcatacttcaattttgtatatacttgactggtaatgtttaaaaaaaatcatgcattcctttaaaaattaaggctgaaaaacttgtataaatctccctggaatttagtataaattaagtgtatattctattttaataaatgctactttgtttacagttatcagtagtttaaatattaatataaaatgcattcagttttctttacacaaacaggtaatcaaagagatgtttgtctaagggtttgagccctagacaaatcagtatgatcattacttttcacaggttaatggaattattttatacagattaggagaaattaacctcatgacagatttatttattgcattggtgaaaataaatgttaatgaattacca

SEQ ID NO: 276873 - DNA, 1792 bp, Homo sapiens
agccctgtttgtccgccactgtttgaaaacagttggcgccgccgccgccggggcctcatttccaggtcagccccgggcctgacgcggcgttgcgtcccccgggagctgcgctaggcgaacggctgcggcgctttgtgctccagtcgctcctaacgctccctggcccggccggggccgcgcagttagggcatctgaggcggggagaagcggcggggagacgccggctgccagcatgtcgctgcctccggagaaagcctccgagctgaagcagctcatccaccagcagctgagcaagatggatgtccatggtagaataagagaaatccttgctgagactatacgggaagaattggcacctgatcaacagcatttatcaacagaagatttgatcaaagcccttagacgtcgaggaatcattgacgatgtgatgaaagaacttaattttgttactgacagtgttgagcaagaactcccttcctctccaaaacaacctatttgttttgatagacaatcgacattaaaaaaaactaatattgatccaacacggaggtatctttaccttcaggttttgggtggaaaagctttcttggaacatctgcaagaacctgagcctttacctggacaagtttgttcaacgtttactttatgtttacattatcgaaaccaacgttttcgttctaaacctgttccatgtgcctgtgaaccagattttcatgatggctttttacttgaagtacacagagaaagcttgggtgatggaactagaatggctgattcaacaacaatgttatcaataagtgatccaattcatatggtgctaatcaaaacagacatatttggtgagacgactttagtagcatcatattttctggaatggcgatcggttttgggctcagaaaatggagtgaccagtctgactgtggaacttatgggtgtaggcacagaatcaaaagtttctgtgggaattttaaatataaaacttgaaatgtatccaccactcaatcaaacgttatctcaagaagtagtgaacacacagcttgctttggaacgtcagaaaactgcagagaaagagcgattatttcttgtatatgctaagcagtggtggagagaatatttgcaaattcgaccctcacacaactcacgactggttaagatttttgcacaggatgaaaatgggataaatagaccagtctgttcctatgttaaaccacttcgagctggacggcttcttgatactccaaggcaagcagcaagatttgttaatgtccttggttatgaacgagcccctgttattggaggaggaggtaaacaggagcagtggtgcactctgctggcctttctctgtagaaacaagcttggaagagaaatgaggttctcatagggtcaaagtagaatgcataaagagccaagagcagctctagacctctaccctgaagatgggagtggagagggaggtattcaaccagcaagaaatcggaaaacgcgcagagcggccgcggggtcacgggaaactgccggaggctttcagggcccagggcccggcggggaggcttcagcgggcctgcattttcttaggcatccgctccaggcgggttcaagttttcaaccagaccttcggcgatccagcgcctccagagcgtgcatcccccggcccgtgcggccccctaaggggcgggcgctgggcggcgctggacggcgcgaggcggggcggggcggggcggggcgccggacgccatcgcgtcgctaccggccggcggctgtctgaccgggactgcagccgtgtcctcgccgc

SEQ ID NO: 276874 - DNA, 1283 bp, Homo sapiens
agccctgtttgtccgccactgtttgaaaacagttggcgccgccgccgccggggcctcatttccaggtcagccccgggcctgacgcggcgttgcgtcccccgggagctgcgctaggcgaacggctgcggcgctttgtgctccagtcgctcctaacgctccctggcccggccggggccgcgcagttagggcatctgaggcggggagaagcggcggggagacgccggctgccagcatgtcgctgcctccggagaaagcctccgagctgaagcagctcatccaccagcagctgagcaagatggatgtccatggtagaataagagaaatccttgctgagactatacgggaagaattggcacctgatcaacagcatttatcaacagaagatttgatcaaagcccttagacgtcgaggaatcattgacgatgtgatgaaagaacttaattttgttactgacagtgttgagcaagaactcccttcctctccaaaacaacctatttgttttgatagacaatcgacattaaaaaaaactaatattgatccaacacggaggtatctttaccttcaggttttgggtggaaaagctttcttggaacatctgcaagaacctgagcctttacctggacaagtttgttcaacgtttactttatgtttacattatcgaaaccaacgttttcgttctaaacctgttccatgtgcctgtgaaccagattttcatgatggctttttacttgaagtacacagagaaagcttgggtgatggaactagaatggctgattcaacaacaatgttatcaataagtgatccaattcatatggtgctaatcaaaacagacatatttggtgagacgactttagtagcatcatattttctggaatggcgatcggttttgggctcagaaaatggagtgaccagtctgactgtggaacttatgggtgtaggcacagaatcaaaagtttctgtgggaattttaaatataaaacttgaaatgtatccaccactcaatcaaacgttatctcaagaagtagtgaacacacagcttgctttggaacgtcagaaaactgcagagaaagagcgattatttcttgtatatgctaagcagtggtggagagaatatttgcaaattcgaccctcacacaactcacgactggttaagatttttgcacaggtttgtaaattatattagaataattttatgcctgtatttgagatttactgttatgtgtgtaaatttcatttaatatttatttgtaaaatgtattccaaaaaataaaagtgtatttgta

SEQ ID NO: 276875 - DNA, 2696 bp, Homo sapiens
agccctgtttgtccgccactgtttgaaaacagttggcgccgccgccgccggggcctcatttccaggtcagccccgggcctgacgcggcgttgcgtcccccgggagctgcgctaggcgaacggctgcggcgctttgtgctccagtcgctcctaacgctccctggcccggccggggccgcgcagttagggcatctgaggcggggagaagcggcggggagacgccggctgccagcatgtcgctgcctccggagaaagcctccgagctgaagcagctcatccaccagcagctgagcaagatggatgtccatggtagaataagagaaatccttgctgagactatacgggaagaattggcacctgatcaacagcatttatcaacagaagatttgatcaaagcccttagacgtcgaggaatcattgacgatgtgatgaaagaacttaattttgttactgacagtgttgagcaagaactcccttcctctccaaaacaacctatttgttttgatagacaatcgacattaaaaaaaactaatattgatccaacacggaggtatctttaccttcaggttttgggtggaaaagctttcttggaacatctgcaagaacctgagcctttacctggacaagtttgttcaacgtttactttatgtttacattatcgaaaccaacgttttcgttctaaacctgttccatgtgcctgtgaaccagattttcatgatggctttttacttgaagtacacagagaaagcttgggtgatggaactagaatggctgattcaacaacaatgttatcaataagtgatccaattcatatggtgctaatcaaaacagacatatttggtgagacgactttagtagcatcatattttctggaatggcgatcggttttgggctcagaaaatggagtgaccagtctgactgtggaacttatgggtgtaggcacagaatcaaaagtttctgtgggaattttaaatataaaacttgaaatgtatccaccactcaatcaaacgttatctcaagaagtagtgaacacacagcttgctttggaacgtcagaaaactgcagagaaagagcgattatttcttgtatatgctaagcagtggtggagagaatatttgcaaattcgaccctcacacaactcacgactggttaagatttttgcacaggatgaaaatgggataaatagaccagtctgttcctatgttaaaccacttcgagctggacggcttcttgatactccaaggcaagcagcaagatttgttaatgtccttggttatgaacgagcccctgttattggaggaggaggtaaacaggagcagtggtgcactctgctggcctttctctgtagaaacaagggtgactgtgaagatcacgctaaccttctgtgcagccttcttcttggatatggattagaagcctttgtttgtgttgggaccaaggcaaaaggagtacctcatgcatgggttatgacttgtggaactgatggggccatcactttttgggagagtttaacaggacacaggtacatccataaacctaccaatcctgatgaacctccagttgctgaacagcccaaaccactgtacccatatcgaacaattggttgtgttttcaaccatcagatgttcctgggaaattgtcaaccctctgatgcagtagaaacctgtgtatttgatttgaacgatgaatccaaatggaaacccatgagtgaggaagcaattaaatctgtgtgtgctcctggagctacaacatcccttcctccctttccacctctgtgtgcatccacaattgacgcgtcagtaacaagtaatgaaattgaaatgcagctgaggctcctggtgtcagaacacaggaaggatcttggcctcactactgtttgggaagaccagctctcctaccttttatcaccagctttggcttcttatgaatttgagcgtacaacaagtatatcagcaggcaatgaagaatttcaagatgccataagaagggctgtacctgatggtcacacatttaaagggttcccaatacattttgtgtatagaaatgcaagacgtgcatttgccacatgtcttcgatctcctttctgtgaagaaataatctgttgccgtggagaccaagtgcgactggcagttcgtgtccgagtatttacttaccctgaatctgcatgtgctgtttggatcatgtttgcttgtaaatatcgctcggtattatagggccaatatttatataagatttatacctgtgtttaattggaattttacacattgtacattacttagctatttagaggtttgttattttaaaatcacaatctggcttgaatggcatacttcaattttgtatatacttgactggtaatgtttaaaaaaaatcatgcattcctttaaaaattaaggctgaaaaacttgtataaatctccctggaatttagtataaattaagtgtatattctattttaataaatgctactttgtttacagttatcagtagtttaaatattaatataaaatgcattcagttttctttacacaaacaggtaatcaaagagatgtttgtctaagggtttgagccctagacaaatcagtatgatcattacttttcacaggttaatggaattattttatacagattaggagaaattaacctcatgacagatttatttattgcattggtgaaaataaatgttaatgaattacca

SEQ ID NO: 276876 - DNA, 2567 bp, Homo sapiens
agccctgtttgtccgccactgtttgaaaacagttggcgccgccgccgccggggcctcatttccaggtcagccccgggcctgacgcggcgttgcgtcccccgggagctgcgctaggcgaacggctgcggcgctttgtgctccagtcgctcctaacgctccctggcccggccggggccgcgcagttagggcatctgaggcggggagaagcggcggggagacgccggctgccagcatgtcgctgcctccggagaaagcctccgagctgaagcagctcatccaccagcagctgagcaagatggatgtccatggtagaataagagaaatccttgctgagactatacgggaagaattggcacctgatcaacagcatttatcaacagaagatttgatcaaagcccttagacgtcgaggaatcattgacgatgtgatgaaagaacttaattttgttactgacagtgttgagcaagaactcccttcctctccaaaacaacctatttgttttgatagacaatcgacattaaaaaaaactaatattgatccaacacggaggtatctttaccttcaggttttgggtggaaaagctttcttggaacatctgcaagaacctgagcctttacctggacaagtttgttcaacgtttactttatgtttacattatcgaaaccaacgttttcgttctaaacctgttccatgtgcctgtgaaccagattttcatgatggctttttacttgaagtacacagagaaagcttgggtgatggaactagaatggctgattcaacaacaatgttatcaataagtgatccaattcatatggtgctaatcaaaacagacatatttggtgagacgactttagtagcatcatattttctggaatggcgatcggttttgggctcagaaaatggagtgaccagtctgactgtggaacttatgggtgtaggcacagaatcaaaagtttctgtgggaattttaaatataaaacttgaaatgtatccaccactcaatcaaacgttatctcaagaagtagtgaacacacaggatgaaaatgggataaatagaccagtctgttcctatgttaaaccacttcgagctggacggcttcttgatactccaaggcaagcagcaagatttgttaatgtccttggttatgaacgagcccctgttattggaggaggaggtaaacaggagcagtggtgcactctgctggcctttctctgtagaaacaagggtgactgtgaagatcacgctaaccttctgtgcagccttcttcttggatatggattagaagcctttgtttgtgttgggaccaaggcaaaaggagtacctcatgcatgggttatgacttgtggaactgatggggccatcactttttgggagagtttaacaggacacaggtacatccataaacctaccaatcctgatgaacctccagttgctgaacagcccaaaccactgtacccatatcgaacaattggttgtgttttcaaccatcagatgttcctgggaaattgtcaaccctctgatgcagtagaaacctgtgtatttgatttgaacgatgaatccaaatggaaacccatgagtgaggaagcaattaaatctgtgtgtgctcctggagctacaacatcccttcctccctttccacctctgtgtgcatccacaattgacgcgtcagtaacaagtaatgaaattgaaatgcagctgaggctcctggtgtcagaacacaggaaggatcttggcctcactactgtttgggaagaccagctctcctaccttttatcaccagctttggcttcttatgaatttgagcgtacaacaagtatatcagcaggcaatgaagaatttcaagatgccataagaagggctgtacctgatggtcacacatttaaagggttcccaatacattttgtgtatagaaatgcaagacgtgcatttgccacatgtcttcgatctcctttctgtgaagaaataatctgttgccgtggagaccaagtgcgactggcagttcgtgtccgagtatttacttaccctgaatctgcatgtgctgtttggatcatgtttgcttgtaaatatcgctcggtattatagggccaatatttatataagatttatacctgtgtttaattggaattttacacattgtacattacttagctatttagaggtttgttattttaaaatcacaatctggcttgaatggcatacttcaattttgtatatacttgactggtaatgtttaaaaaaaatcatgcattcctttaaaaattaaggctgaaaaacttgtataaatctccctggaatttagtataaattaagtgtatattctattttaataaatgctactttgtttacagttatcagtagtttaaatattaatataaaatgcattcagttttctttacacaaacaggtaatcaaagagatgtttgtctaagggtttgagccctagacaaatcagtatgatcattacttttcacaggttaatggaattattttatacagattaggagaaattaacctcatgacagatttatttattgcattggtgaaaataaatgttaatgaattacca

SEQ ID NO: 276877 - DNA, 2653 bp, Homo sapiens
agccctgtttgtccgccactgtttgaaaacagttggcgccgccgccgccggggcctcatttccaggtcagccccgggcctgacgcggcgttgcgtcccccgggagctgcgctaggcgaacggctgcggcgctttgtgctccagtcgctcctaacgctccctggcccggccggggccgcgcagttagggcatctgaggcggggagaagcggcggggagacgccggctgccagcatgtcgctgcctccggagaaagcctccgagctgaagcagctcatccaccagcagctgagcaagatggatgtccatggtagaataagagaaatccttgctgagactatacgggaagaattggcacctgatcaacagcatttatcaacagaagatttgatcaaagcccttagacgtcgaggaatcattgacgatgtgatgaaagaacttaattttgttactgacagtgttgagcaagaactcccttcctctccaaaacaacctatttgttttgatagacaatcgacattaaaaaaaagggtggaaaagctttcttggaacatctgcaagaacctgagcctttacctggacaagtttgttcaacgtttactttatgtttacattatcgaaaccaacgttttcgttctaaacctgttccatgtgcctgtgaaccagattttcatgatggctttttacttgaagtacacagagaaagcttgggtgatggaactagaatggctgattcaacaacaatgttatcaataagtgatccaattcatatggtgctaatcaaaacagacatatttggtgagacgactttagtagcatcatattttctggaatggcgatcggttttgggctcagaaaatggagtgaccagtctgactgtggaacttatgggtgtaggcacagaatcaaaagtttctgtgggaattttaaatataaaacttgaaatgtatccaccactcaatcaaacgttatctcaagaagtagtgaacacacagcttgctttggaacgtcagaaaactgcagagaaagagcgattatttcttgtatatgctaagcagtggtggagagaatatttgcaaattcgaccctcacacaactcacgactggttaagatttttgcacaggatgaaaatgggataaatagaccagtctgttcctatgttaaaccacttcgagctggacggcttcttgatactccaaggcaagcagcaagatttgttaatgtccttggttatgaacgagcccctgttattggaggaggaggtaaacaggagcagtggtgcactctgctggcctttctctgtagaaacaagggtgactgtgaagatcacgctaaccttctgtgcagccttcttcttggatatggattagaagcctttgtttgtgttgggaccaaggcaaaaggagtacctcatgcatgggttatgacttgtggaactgatggggccatcactttttgggagagtttaacaggacacaggtacatccataaacctaccaatcctgatgaacctccagttgctgaacagcccaaaccactgtacccatatcgaacaattggttgtgttttcaaccatcagatgttcctgggaaattgtcaaccctctgatgcagtagaaacctgtgtatttgatttgaacgatgaatccaaatggaaacccatgagtgaggaagcaattaaatctgtgtgtgctcctggagctacaacatcccttcctccctttccacctctgtgtgcatccacaattgacgcgtcagtaacaagtaatgaaattgaaatgcagctgaggctcctggtgtcagaacacaggaaggatcttggcctcactactgtttgggaagaccagctctcctaccttttatcaccagctttggcttcttatgaatttgagcgtacaacaagtatatcagcaggcaatgaagaatttcaagatgccataagaagggctgtacctgatggtcacacatttaaagggttcccaatacattttgtgtatagaaatgcaagacgtgcatttgccacatgtcttcgatctcctttctgtgaagaaataatctgttgccgtggagaccaagtgcgactggcagttcgtgtccgagtatttacttaccctgaatctgcatgtgctgtttggatcatgtttgcttgtaaatatcgctcggtattatagggccaatatttatataagatttatacctgtgtttaattggaattttacacattgtacattacttagctatttagaggtttgttattttaaaatcacaatctggcttgaatggcatacttcaattttgtatatacttgactggtaatgtttaaaaaaaatcatgcattcctttaaaaattaaggctgaaaaacttgtataaatctccctggaatttagtataaattaagtgtatattctattttaataaatgctactttgtttacagttatcagtagtttaaatattaatataaaatgcattcagttttctttacacaaacaggtaatcaaagagatgtttgtctaagggtttgagccctagacaaatcagtatgatcattacttttcacaggttaatggaattattttatacagattaggagaaattaacctcatgacagatttatttattgcattggtgaaaataaatgttaatgaattacca

SEQ ID NO: 276878 - DNA, 1564 bp, Homo sapiens
agccctgtttgtccgccactgtttgaaaacagttggcgccgccgccgccggggcctcatttccaggtcagccccgggcctgacgcggcgttgcgtcccccgggagctgcgctaggcgaacggctgcggcgctttgtgctccagtcgctcctaacgctccctggcccggccggggccgcgcagttagggcatctgaggcggggagaagcggcggggagacgccggctgccagcatgtcgctgcctccggagaaagcctccgagctgaagcagctcatccaccagcagctgagcaagatggatgtccatggtagaataagagaaatccttgctgagactatacgggaagaattggcacctgatcaacagcatttatcaacagaagatttgatcaaagcccttagacgtcgaggaatcattgacgatgtgatgaaagaacttaattttgttactgacagtgttgagcaagaactcccttcctctccaaaacaacctatttgttttgatagacaatcgacattaaaaaaaactaatattgatccaacacggaggtatctttaccttcaggttttgggtggaaaagctttcttggaacatctgcaagaacctgagcctttacctggacaagtttgttcaacgtttactttatgtttacattatcgaaaccaacgttttcgttctaaacctgttccatgtgcctgtgaaccagattttcatgatggctttttacttgaagtacacagagaaagcttgggtgatggaactagaatggctgattcaacaacaatgttatcaataagtgatccaattcatatggtgctaatcaaaacagacatatttggtgagacgactttagtagcatcatattttctggaatggcgatcggttttgggctcagaaaatggagtgaccagtctgactgtggaacttatgggtgtaggcacagaatcaaaagtttctgtgggaattttaaatataaaacttgaaatgtatccaccactcaatcaaacgttatctcaagaagtagtgaacacacagcttgctttggaacgtcagaaaactgcagagaaagagcgattatttcttgtatatgctaagcagtggtggagagaatatttgcaaattcgaccctcacacaactcacgactggttaagatttttgcacaggatgaaaatgggataaatagaccagtctgttcctatgttaaaccacttcgagctggacggcttcttgatactccaaggcaagcagcaagatttgttaatgtccttggttatgaacgagcccctgttattggaggaggaggtaaacaggagcagtggtgcactctgctggcctttctctgtagaaacaagacaaggtattatacacacataatagaattaagtagcagtatatcatagttactctgaatttgtaatccatttgtaaaagaatgccttagaaaaatgcacatatagtcaaccctctgtacccacaggttctgtatctgtagattcaaccaactgcagatcaaaaatacttacaaaagtaaaaaattacaataataaaaaatagtacaaatt

SEQ ID NO: 276879 - DNA, 648 bp, Homo sapiens
caacgggtgatgcggttggcagaggtgggagtacctgttttctgccctaattctgaccctgcttcccagagagctcgtgtagaatttgccagcctgaggttcgtgtccaggctccctgtctgtggaaggtgaccatcttcctccccctaatgggtgtggccgaggatgggctgggcctgggtcagcagggtggtctctattccacagggcctacgcttctcaggggtcaatgacacagatttccgagtctatctgcttggcaacccggtgagtgcctaaacattcccggctcaggccctggagcacttgcccgtggagagcggctgcgttctcatctgcccattcccatttctgcacaggtggtttggtggctgaatctgttgagcatcgccctctacctcctctcagggagcatcattgctgtagccatgcagagaggggcacggctgccagcggaggttgcaggtcaggtcctctgggctctccctcccctgacctggcggcagcagggcacctgcgcccctggggagggccggctgcctgctgatgggccatcctttgcgtttacaacccaaacttcccttatccttgcttttgaaaggtaacaaccccagtacccgtgctgggtaacaacactttacttcctcc

SEQ ID NO: 276880 - DNA, 6407 bp, Homo sapiens
  misc_feature (2251)..(2251): n is a, c, g, or t
  misc_feature (2342)..(2342): n is a, c, g, or t
ccacgcgtccggccgcctcctagcggcccgggccgcgaccacgctgcccgccccgccccgagcccggggccccgcgctccgctgcagtgaagggcgttgcatttcccggggtaccccgagctgccctcttgtgactccttggcggggcggctggtcagacaaagtgtgcctccgggccggagggcgacccagaggagggggaagatgccgccggccacgggcggaggcctggcagagtccgagctgcgtccccggaggggccgctgtggcccccaggctgctagggccgcaggccgggacgtggccgctgaggctgtggcgcgaagccccaaacggcctgcttggggctcacggcgcttcgaggcggtcggctggtgggccctgctggccttggtgacgctgctgtccttcgccacccgcttccaccgcttggacgagccgccgcacatctgttgggatgagactcactttggaaaaatgggaagttactatatcaaccgtacatttttctttgatgtgcacccgcccctgggaaagatgctgataggtcttgctggctacctgagtggatatgatggtacctttttgttccagaagcctggggataaatatgagcatcacagctacatgggaatgagaggattctgtgcattccttggctcctggctggtcccctttgcctacctcactgtactggatctgtccaagtccctctcggcagcactgctcacagctgccctcctcacctttgacacgggatgcctcactctgtcccagtacatcctccttgaccccatcctgatgttcttcatcatggctgccatgctgagcatggtcaagtacaactcttgcgccgacaggcccttctctgccccctggtggttctggctcagcctgactggcgttagtcttgctggtgctttaggggtcaagtttgttggcctctttatcatccttcaagtggggctgaacaccattgcagacctttggtacctgttcggagacctcagtctttcattggtgagcacccaagggtttgctgtggaaatgtttttgctccctgatgttgctgagtaggagctggtggccttctctgtctctactgcaggtggcagagtggctgtgttctgggtcccaggtgggctggaccccccaacctccgcagacagcaggacatcagggagtgggcccggctgaggactggatagggttcaagggagaggatagattaacattcttggaagtctctttttgcatttgttttataatgtctgtcttttttttttttttttgagatagagtttcactctgttacccaggctggagtgcagtgggccgatcttggctcactgcaacttccgcctcctgggtacgagtgattcttttgcctcagcctcccaagtagctgggattacaggcacataccaccatgcccagctaatttttgtagttttagtagagatgcggttctaccatgttggccagattgttctcaaacccctgacctcaagtgatccgcccgccttggcctcccaaagtgcggggattacaggcatgagccaccgagcccggtctgaactcacaattttcatttcctgacccacggtctccatatttggaggccagtaagggcctttacagtttattatttattaagggctgattctacgccaggcactatgcgaaacgctttaccttcattatctcatttacccctcataatagtcctatgaggtagggagttattaccctgattttcaaatgaggaaatcaaaacctacagaggtaatgacttccccgaggccatcggggagtgagaggtgtatctaggagtcacaaccaggttaggttggccccaggccatcactctgctgtggtgctgctccatcacctccaaaccagctcctaacaagtttattcattcattcattcatttattcagaaaatgtgtaaagatcatccagccactgtgtgtgaggtgctggaatatacagatgaatataatatggtccccaccctctgtggtcaatggagagagagaaataaggaagcaggcagttacagtcagccaggagtgctgggagagcacagaaaagggcactcggccagtcccaggcaatccaggaaggcctctggaaggaagccgcgaagttaagataaggagccattagccatgtgatgggttgggctgggacagtagaggaagcactgggaaagttcaaggaggttagtgtacctggaacatggagcngactggtgagcaactgtgttgcagatgcaggtgccttgtccttggcacagtaacatcctggggttttgggtgtagagcctggagaggtagnagagggctggcccatgtttatcttgtgtagtgcttgggtggtgggtgttacagaaaggcttagggtttccacatattcttctctctcctcttggccattttttatgattatgactgatatattaaaagctatatataatgcatgcatagtgcctaaggaataatgaggtctcacatgcctagcaccccacgctggcctctgtttgcaggtgactgtgggaaaacacctgactgctcgtgtcctgtgcctcatagtgctgcccctggctctctatacagccacctttgctgttcacttcatggtgctgagtaaaagtggccctggtgacggtttcttcagttctgccttccaggcccggctttcagggaacaacctgcacaatgcttccatccctgaacacctggcctacggctctgtgatcactgtgaagaacctccggatggccatcggctatctgcactcccacaggcacctctaccccgagggcattggtgcccgtcagcagcaggtcaccacctatttgcacaaggactacaacaacctgtggattatcaagaaacataacacaaactcagatcccctagacccttccttcccagtggagtttgtaagacatggagacattattcgactagaacacaaagaaacttcccggaacttgcacagtcactatcatgaggcccccatgacccggaagcactatcaggtcaccggctatggcataaatggaacaggggactcaaatgatttctggcggattgaggtcgtaaacagaaaatttggaaaccggatcaaagtgctgagaagtcgaattcgcttcatccatttggtcacaggttgtgtcctgggctcctcgggaaaggttctgcccaagtggggctgggagcagttggaagttacttgcaccccatacctgaaagaaaccctcaactccatctggaatgtggaggaccatatcaatcccaagttgccaaacatcagcctggatgtgctacagcccagttttcctgagatcttgctggaatcccacatggtcatgatccgggggaacagtggcctcaaacccaaggacaatgagttcacgtccaaaccctggcactggcctatcaactatcagggcctacgcttctcaggggtcaatgacacagatttccgagtctatctgcttggcaacccggtggtttggtggctgaatctgttgagcatcgccctctacctcctctcagggagcatcattgctgtagccatgcagagaggggcacggctgccagcggaggttgcagggttgtcccaggtcctgctgcgaggaggcggccaggtcctgctcggctggacactccattacttcccgtttttcctgatgggccgggtcctctacttccaccactacttcccagccatgctcttctcaagcatgttgacaggcattctgtgggacaccctcctgcggctctgtgcctggggcttggcctcatggcccctggcgaggggcatacatgtggcgggaatcctgagcctgctcctgggaactgcctacagcttctacctcttccaccctctggcttacgggatggttggtcccctggcccaggacccccaaagtccaatggcaggactaaggtggctggactcatgggacttttgaggccactgcaaagattccagcctgggtccaggaacttcccaggagagccagctgggaagcagtactggaccatccggccatgaggaagctgcctaaggagcccgaagaattctgctgctcaccaggacccagctctgggagtgcagctggaatggaacccagcattggagagagccgggagagagccgcagctccgtccacagcaccacggagaggacagcgcctcttgggctgctccctcgtgcacagcgcaggggaggatgggtgccagagggtgggagtgggtgcgcgtgtgtgtatgtgagggcatgttgtccatatccctgtggaatacagaccgtgtaactggacagctgagtgtcataaactctaaaatagtccaggctatagtaatattttctggtatttttttctgttggatttctttggttttggtttgtaagatccatcaaaaattctcagacctctgagagggccttgagggcagagaatactgacctcaccttgggatgtcaccaaaggcagagcagatgggactgtcaaagttgtgctgccctccctcccacaaacaaatgaatccagcgtggaggaaggcgcgccgccccgagctggagggcctggctcccaccatgccccccagtggctgcaggtagctggacttcctgcctgtgacgcacagagagcagcggactccggagcgtcagcctgccttagcccttggttcctcgttttttgggattgtcacactgtgacactcgggaggaacgatgtcctatcctgggctgctcaatgttcccaggccctgtgtgccagaggccaggtctctccaagtgcatctagcctggcctggagggcaaggcagatgcattctcctggctgctgggagagcccatgggaaccttgcttagcgcccaaggtagatgagagacagggcagggaatctgcgtggtgctgggatgtggggactctggcctctccagactaatgttcctgtcacctgctgagctttcccagtgtcacttctgcagtcctcctctgctcacccctccctcactccatgggcaattccctttctctctgtcactgcttcagcagtgaagacccatggcacctagaaatgcatgccagcttcctgcatctaccactctgcagctcaaacaagaagctcagagctgccccttccacttcctccccaaaagggatgaagaaaaccctgtggtagaaccaaaccacccaaggccagcccttaagcctgcctccaccttcctggtgcatgacaaaatatttcttttgtctcagaggactttgatgcttcaatatttaatgatgaatccgccacactccattttccctcctctgaagctcccaacaactctgacagggtcagatctctttaaagcatcttcaggaggcggttgccacggagactggatattggtcccagggacaggctgtgctacctactgggtggtggggagggaagcttctggccatgcttggacattcagaccaaccatcattaatgttaatagaggaaatgcagcaacgtcaaaagcaaggcaggttggttaattagatctggggcccgatgacctccctttcccactgctacagcccttttgacttcccccagcaggaagcgctgtctgtgcggctgagtctgggccacttgcttaattgcatttctggcagggaaggagaggagggatggagaagctctgctcgctgcttccacctcaccatgtgtcctcccctcccctcccttcctctcctccccacaggcggaattgctttcttctgagccgggtgggctctcctgcagggagaatgcaggggtctgtgcttggctcttagcaaagcaggtggcccacagtgacctccaggaggtggctgattttcctttgtgccttcttatttctcagtaggaacttggaagggaagagctctgaaggagccagaggggcagtcaccttacatgagggtgaggaaggagaagcccagccagcctctacccatccctccctcccaattaggctgcactggggccgaacgcttccctgggctcccactgccttctaaggagccaaggagaattccctgcccactttctgttcctccatgcccaaactggcagatgcttctctgggagcaaggccacatgggctgatgcagctttgagtgctcaggttctgttttctggaagttgctggagaagggctgtcagggtgcttctatgaatatgggcttcagctgtagcacttggcagaaacgtgatgtgtcccacaaactgctggtggaggaagaagatgttcgtcagccaattcaacctccagccagcttcttgagcctatttggtttaaaaaaaaaaagtcttctaatcagaagccactgattttataataaataacacttgttttgaa

SEQ ID NO: 276881 - DNA, 4971 bp, Homo sapiens
ccacgcgtccggccgcctcctagcggcccgggccgcgaccacgctgcccgccccgccccgagcccggggccccgcgctccgctgcagtgaagggcgttgcatttcccggggtaccccgagctgccctcttgtgactccttggcggggcggctggtcagacaaagtgtgcctccgggccggagggcgacccagaggagggggaagatgccgccggccacgggcggaggcctggcagagtccgagctgcgtccccggaggggccgctgtggcccccaggctgctagggccgcaggccgggacgtggccgctgaggctgtggcgcgaagccccaaacggcctgcttggggctcacggcgcttcgaggcggtcggctggtgggccctgctggccttggtgacgctgctgtccttcgccacccgcttccaccgcttggacgagccgccgcacatctgttgggatgagactcactttggaaaaatgggaagttactatatcaaccgtacatttttctttgatgtgcacccgcccctgggaaagatgctgataggtcttgctggctacctgagtggatatgatggtacctttttgttccagaagcctggggataaatatgagcatcacagctacatgggaatgagaggattctgtgcattccttggctcctggctggtcccctttgcctacctcactgtactggatctgtccaagtccctctcggcagcactgctcacagctgccctcctcacctttgacacgggatgcctcactctgtcccagtacatcctccttgaccccatcctgatgttcttcatcatggctgccatgctgagcatggtcaagtacaactcttgcgccgacaggcccttctctgccccctggtggttctggctcagcctgactggcgttagtcttgctggtgctttaggggtcaagtttgttggcctctttatcatccttcaagtggggctgaacaccattgcagacctttggtacctgttcggagacctcagtctttcattggtgactgtgggaaaacacctgactgctcgtgtcctgtgcctcatagtgctgcccctggctctctatacagccacctttgctgttcacttcatggtgctgagtaaaagtggccctggtgacggtttcttcagttctgccttccaggcccggctttcagggaacaacctgcacaatgcttccatccctgaacacctggcctacggctctgtgatcactgtgaagaacctccggatggccatcggctatctgcactcccacaggcacctctaccccgagggcattggtgcccgtcagcagcaggtcaccacctatttgcacaaggactacaacaacctgtggattatcaagaaacataacacaaactcagatcccctagacccttccttcccagtggagtttgtaagacatggagacattattcgactagaacacaaagaaacttcccggaacttgcacagtcactatcatgaggcccccatgacccggaagcactatcaggtcaccggctatggcataaatggaacaggggactcaaatgatttctggcggattgaggtcgtaaacagaaaatttggaaaccggatcaaagtgctgagaagtcgaattcgcttcatccatttggtcacaggttgtgtcctgggctcctcgggaaaggttctgcccaagtggggctgggagcagttggaagttacttgcaccccatacctgaaagaaaccctcaactccatctggaatgtggaggaccatatcaatcccaagttgccaaacatcagcctggatgtgctacagcccagttttcctgagatcttgctggaatcccacatggtcatgatccgggggaacagtggcctcaaacccaaggacaatgagttcacgtccaaaccctggcactggcctatcaactatcagggcctacgcttctcaggggtcaatgacacagatttccgagtctatctgcttggcaacccggtggtttggtggctgaatctgttgagcatcgccctctacctcctctcagggagcatcattgctgtagccatgcagagaggggcacggctgccagcggaggttgcagggttgtcccaggtcctgctgcgaggaggcggccaggtcctgctcggctggacactccattacttcccgtttttcctgatgggccgggtcctctacttccaccactacttcccagccatgctcttctcaagcatgttgacaggcattctgtgggacaccctcctgcggctctgtgcctggggcttggcctcatggcccctggcgaggggcatacatgtggcgggaatcctgagcctgctcctgggaactgcctacagcttctacctcttccaccctctggcttacgggatggttggtcccctggcccaggacccccaaagtccaatggcaggactaaggtggctggactcatgggacttttgaggccactgcaaagattccagcctgggtccaggaacttcccaggagagccagctgggaagcagtactggaccatccggccatgaggaagctgcctaaggagcccgaagaattctgctgctcaccaggacccagctctgggagtgcagctggaatggaacccagcattggagagagccgggagagagccgcagctccgtccacagcaccacggagaggacagcgcctcttgggctgctccctcgtgcacagcgcaggggaggatgggtgccagagggtgggagtgggtgcgcgtgtgtgtatgtgagggcatgttgtccatatccctgtggaatacagaccgtgtaactggacagctgagtgtcataaactctaaaatagtccaggctatagtaatattttctggtatttttttctgttggatttctttggttttggtttgtaagatccatcaaaaattctcagacctctgagagggccttgagggcagagaatactgacctcaccttgggatgtcaccaaaggcagagcagatgggactgtcaaagttgtgctgccctccctcccacaaacaaatgaatccagcgtggaggaaggcgcgccgccccgagctggagggcctggctcccaccatgccccccagtggctgcaggtagctggacttcctgcctgtgacgcacagagagcagcggactccggagcgtcagcctgccttagcccttggttcctcgttttttgggattgtcacactgtgacactcgggaggaacgatgtcctatcctgggctgctcaatgttcccaggccctgtgtgccagaggccaggtctctccaagtgcatctagcctggcctggagggcaaggcagatgcattctcctggctgctgggagagcccatgggaaccttgcttagcgcccaaggtagatgagagacagggcagggaatctgcgtggtgctgggatgtggggactctggcctctccagactaatgttcctgtcacctgctgagctttcccagtgtcacttctgcagtcctcctctgctcacccctccctcactccatgggcaattccctttctctctgtcactgcttcagcagtgaagacccatggcacctagaaatgcatgccagcttcctgcatctaccactctgcagctcaaacaagaagctcagagctgccccttccacttcctccccaaaagggatgaagaaaaccctgtggtagaaccaaaccacccaaggccagcccttaagcctgcctccaccttcctggtgcatgacaaaatatttcttttgtctcagaggactttgatgcttcaatatttaatgatgaatccgccacactccattttccctcctctgaagctcccaacaactctgacagggtcagatctctttaaagcatcttcaggaggcggttgccacggagactggatattggtcccagggacaggctgtgctacctactgggtggtggggagggaagcttctggccatgcttggacattcagaccaaccatcattaatgttaatagaggaaatgcagcaacgtcaaaagcaaggcaggttggttaattagatctggggcccgatgacctccctttcccactgctacagcccttttgacttcccccagcaggaagcgctgtctgtgcggctgagtctgggccacttgcttaattgcatttctggcagggaaggagaggagggatggagaagctctgctcgctgcttccacctcaccatgtgtcctcccctcccctcccttcctctcctccccacaggcggaattgctttcttctgagccgggtgggctctcctgcagggagaatgcaggggtctgtgcttggctcttagcaaagcaggtggcccacagtgacctccaggaggtggctgattttcctttgtgccttcttatttctcagtaggaacttggaagggaagagctctgaaggagccagaggggcagtcaccttacatgagggtgaggaaggagaagcccagccagcctctacccatccctccctcccaattaggctgcactggggccgaacgcttccctgggctcccactgccttctaaggagccaaggagaattccctgcccactttctgttcctccatgcccaaactggcagatgcttctctgggagcaaggccacatgggctgatgcagctttgagtgctcaggttctgttttctggaagttgctggagaagggctgtcagggtgcttctatgaatatgggcttcagctgtagcacttggcagaaacgtgatgtgtcccacaaactgctggtggaggaagaagatgttcgtcagccaattcaacctccagccagcttcttgagcctatttggtttaaaaaaaaaaagtcttctaatcagaagccactgattttataataaataacacttgttttgaattttaaaccaaataggctcaagaagctggctggaggtcgaattggctgacgaacatcttcttcctccaccagcttcttgagcctatttggtgtc

SEQ ID NO: 276882 - DNA, 4976 bp, Homo sapiens
  misc_feature (4660)..(4660): n is a, c, g, or t
ccacgcgtccggccgcctcctagcggcccgggccgcgaccacgctgcccgccccgccccgagcccggggccccgcgctccgctgcagtgaagggcgttgcatttcccggggtaccccgagctgccctcttgtgactccttggcggggcggctggtcagacaaagtgtgcctccgggccggagggcgacccagaggagggggaagatgccgccggccacgggcggaggcctggcagagtccgagctgcgtccccggaggggccgctgtggcccccaggctgctagggccgcaggccgggacgtggccgctgaggctgtggcgcgaagccccaaacggcctgcttggggctcacggcgcttcgaggcggtcggctggtgggccctgctggccttggtgacgctgctgtccttcgccacccgcttccaccgcttggacgagccgccgcacatctgttgggatgagactcactttggaaaaatgggaagttactatatcaaccgtacatttttctttgatgtgcacccgcccctgggaaagatgctgataggtcttgctggctacctgagtggatatgatggtacctttttgttccagaagcctggggataaatatgagcatcacagctacatgggaatgagaggattctgtgcattccttggctcctggctggtcccctttgcctacctcactgtactggatctgtccaagtccctctcggcagcactgctcacagctgccctcctcacctttgacacgggatgcctcactctgtcccagtacatcctccttgaccccatcctgatgttcttcatcatggctgccatgctgagcatggtcaagtacaactcttgcgccgacaggcccttctctgccccctggtggttctggctcagcctgactggcgttagtcttgctggtgctttaggggtcaagtttgttggcctctttatcatccttcaagtggggctgaacaccattgcagacctttggtacctgttcggagacctcagtctttcattggtgactgtgggaaaacacctgactgctcgtgtcctgtgcctcatagtgctgcccctggctctctatacagccacctttgctgttcacttcatggtgctgagtaaaagtggccctggtgacggtttcttcagttctgccttccaggcccggctttcagggaacaacctgcacaatgcttccatccctgaacacctggcctacggctctgtgatcactgtgaagaacctccggatggccatcggctatctgcactcccacaggcacctctaccccgagggcattggtgcccgtcagcagcaggtcaccacctatttgcacaaggactacaacaacctgtggattatcaagaaacataacacaaactcagatcccctagacccttccttcccagtggagtttgtaagacatggagacattattcgactagaacacaaagaaacttcccggaacttgcacagtcactatcatgaggcccccatgacccggaagcactatcaggtcaccggctatggcataaatggaacaggggactcaaatgatttctggcggattgaggtcgtaaacagaaaatttggaaaccggatcaaagtgctgagaagtcgaattcgcttcatccatttggtcacaggttgtgtcctgggctcctcgggaaaggttctgcccaagtggggctgggagcagttggaagttacttgcaccccatacctgaaagaaaccctcaactccatctggaatgtggaggaccatatcaatcccaagttgccaaacatcagcctggatgtgctacagcccagttttcctgagatcttgctggaatcccacatggtcatgatccgggggaacagtggcctcaaacccaaggacaatgagttcacgtccaaaccctggcactggcctatcaactatcagggcctacgcttctcaggggtcaatgacacagatttccgagtctatctgcttggcaacccggtggtttggtggctgaatctgttgagcatcgccctctacctcctctcagggagcatcattgctgtagccatgcagagaggggcacggctgccagcggaggttgcagggttgtcccaggtcctgctgcgaggaggcggccaggtcctgctcggctggacactccattacttcccgtttttcctgatgggccgggtcctctacttccaccactacttcccagccatgctcttctcaagcatgttgacaggcattctgtgggacaccctcctgcggctctgtgcctggggcttggcctcatggcccctggcgaggggcatacatgtggcgggaatcctgagcctgctcctgggaactgcctacagcttctacctcttccaccctctggcttacgggatggttggtcccctggcccaggacccccaaagtccaatggcaggactaaggtggctggactcatgggacttttgaggccactgcaaagattccagcctgggtccaggaacttcccaggagagccagctgggaagcagtactggaccatccggccatgaggaagctgcctaaggagcccgaagaattctgctgctcaccaggacccagctctgggagtgcagctggaatggaacccagcattggagagagccgggagagagccgcagctccgtccacagcaccacggagaggacagcgcctcttgggctgctccctcgtgcacagcgcaggggaggatgggtgccagagggtgggagtgggtgcgcgtgtgtgtatgtgagggcatgttgtccatatccctgtggaatacagaccgtgtaactggacagctgagtgtcataaactctaaaatagtccaggctatagtaatattttctggtatttttttctgttggatttctttggttttggtttgtaagatccatcaaaaattctcagacctctgagagggccttgagggcagagaatactgacctcaccttgggatgtcaccaaaggcagagcagatgggactgtcaaagttgtgctgccctccctcccacaaacaaatgaatccagcgtggaggaaggcgcgccgccccgagctggagggcctggctcccaccatgccccccagtggctgcaggtagctggacttcctgcctgtgacgcacagagagcagcggactccggagcgtcagcctgccttagcccttggttcctcgttttttgggattgtcacactgtgacactcgggaggaacgatgtcctatcctgggctgctcaatgttcccaggccctgtgtgccagaggccaggtctctccaagtgcatctagcctggcctggagggcaaggcagatgcattctcctggctgctgggagagcccatgggaaccttgcttagcgcccaaggtagatgagagacagggcagggaatctgcgtggtgctgggatgtggggactctggcctctccagactaatgttcctgtcacctgctgagctttcccagtgtcacttctgcagtcctcctctgctcacccctccctcactccatgggcaattccctttctctctgtcactgcttcagcagtgaagacccatggcacctagaaatgcatgccagcttcctgcatctaccactctgcagctcaaacaagaagctcagagctgccccttccacttcctccccaaaagggatgaagaaaaccctgtggtagaaccaaaccacccaaggccagcccttaagcctgcctccaccttcctggtgcatgacaaaatatttcttttgtctcagaggactttgatgcttcaatatttaatgatgaatccgccacactccattttccctcctctgaagctcccaacaactctgacagggtcagatctctttaaagcatcttcaggaggcggttgccacggagactggatattggtcccagggacaggctgtgctacctactgggtggtggggagggaagcttctggccatgcttggacattcagaccaaccatcattaatgttaatagaggaaatgcagcaacgtcaaaagcaaggcaggttggttaattagatctggggcccgatgacctccctttcccactgctacagcccttttgacttcccccagcaggaagcgctgtctgtgcggctgagtctgggccacttgcttaattgcatttctggcagggaaggagaggagggatggagaagctctgctcgctgcttccacctcaccatgtgtcctcccctcccctcccttcctctcctccccacaggcggaattgctttcttctgagccgggtgggctctcctgcagggagaatgcaggggtctgtgcttggctcttagcaaagcaggtggcccacagtgacctccaggaggtggctgattttcctttgtgccttcttatttctcagtaggaacttggaagggaagagctctgaaggagccagaggggcagtcaccttacatgagggtgaggaaggagaagcccagccagcctctacccatccctccctcccaattaggctgcactggggccgaacgcttccctgggctcccactgccttctaaggagccaaggagaattccctgcccactttctgttcctccatgcccaatgcagaaaaagatgtgggggggggccccttttcttttttttccttttcttcctttgtggggggggggggaaaagggncccaaaaaaaaaggggggggtcccccccaaaaacaaattagggggggggccttgtaattagaccaacgctttgagtgctcaggttctgttttctggaagttgctggagaagggctgtcagggtgcttctatgaatatgggcttcagctgtagcacttggcagaaacgtgatgtgtcccacaaactgctggtggaggaagaagatgttcgtcagccaattcaacctccagccagcttcttgagcctatttggtttaaaaaaaaaaagtcttctaatcagaagccactgattttataataaataacacttgttttgaa

SEQ ID NO: 276883 - DNA, 3711 bp, Homo sapiens
tgaaattggcttaagcaacattggtttgaggttgattgtccttggccagctgtgctgatagtgatggtattctccctcctgcttcctcttccctccgcccccaccccccacccaggtcaccacctatttgcacaaggactacaacaacctgtggattatcaagaaacataacacaaactcagatcccctagacccttccttcccagtggagtttgtaagacatggagacattattcgactagaacacaaagaatgtccacttaaaaaaatctggcgatgggagcagaaagaaacttcccggaacttgcacagtcactatcatgaggcccccatgacccggaagcactatcaggtcaccggctatggcataaatggaacaggggactcaaatgatttctggcggattgaggtcgtaaacagaaaatttggaaaccggatcaaagtgctgagaagtcgaattcgcttcatccatttggtcacaggttgtgtcctgggctcctcgggaaaggttctgcccaagtggggctgggagcagttggaagttacttgcaccccatacctgaaagaaaccctcaactccatctggaatgtggaggaccatatcaatcccaagttgccaaacatcagcctggatgtgctacagcccagttttcctgagatcttgctggaatcccacatggtcatgatccgggggaacagtggcctcaaacccaaggacaatgagttcacgtccaaaccctggcactggcctatcaactatcagggcctacgcttctcaggggtcaatgacacagatttccgagtctatctgcttggcaacccggtggtttggtggctgaatctgttgagcatcgccctctacctcctctcagggagcatcattgctgtagccatgcagagaggggcacggctgccagcggaggttgcagggttgtcccaggtcctgctgcgaggaggcggccaggtcctgctcggctggacactccattacttcccgtttttcctgatgggccgggtcctctacttccaccactacttcccagccatgctcttctcaagcatgttgacaggcattctgtgggacaccctcctgcggctctgtgcctggggcttggcctcatggcccctggcgaggggcatacatgtggcgggaatcctgagcctgctcctgggaactgcctacagcttctacctcttccaccctctggcttacgggatggttggtcccctggcccaggacccccaaagtccaatggcaggactaaggtggctggactcatgggacttttgaggccactgcaaagattccagcctgggtccaggaacttcccaggagagccagctgggaagcagtactggaccatccggccatgaggaagctgcctaaggagcccgaagaattctgctgctcaccaggacccagctctgggagtgcagctggaatggaacccagcattggagagagccgggagagagccgcagctccgtccacagcaccacggagaggacagcgcctcttgggctgctccctcgtgcacagcgcaggggaggatgggtgccagagggtgggagtgggtgcgcgtgtgtgtatgtgagggcatgttgtccatatccctgtggaatacagaccgtgtaactggacagctgagtgtcataaactctaaaatagtccaggctatagtaatattttctggtatttttttctgttggatttctttggttttggtttgtaagatccatcaaaaattctcagacctctgagagggccttgagggcagagaatactgacctcaccttgggatgtcaccaaaggcagagcagatgggactgtcaaagttgtgctgccctccctcccacaaacaaatgaatccagcgtggaggaaggcgcgccgccccgagctggagggcctggctcccaccatgccccccagtggctgcaggtagctggacttcctgcctgtgacgcacagagagcagcggactccggagcgtcagcctgccttagcccttggttcctcgttttttgggattgtcacactgtgacactcgggaggaacgatgtcctatcctgggctgctcaatgttcccaggccctgtgtgccagaggccaggtctctccaagtgcatctagcctggcctggagggcaaggcagatgcattctcctggctgctgggagagcccatgggaaccttgcttagcgcccaaggtagatgagagacagggcagggaatctgcgtggtgctgggatgtggggactctggcctctccagactaatgttcctgtcacctgctgagctttcccagtgtcacttctgcagtcctcctctgctcacccctccctcactccatgggcaattccctttctctctgtcactgcttcagcagtgaagacccatggcacctagaaatgcatgccagcttcctgcatctaccactctgcagctcaaacaagaagctcagagctgccccttccacttcctccccaaaagggatgaagaaaaccctgtggtagaaccaaaccacccaaggccagcccttaagcctgcctccaccttcctggtgcatgacaaaatatttcttttgtctcagaggactttgatgcttcaatatttaatgatgaatccgccacactccattttccctcctctgaagctcccaacaactctgacagggtcagatctctttaaagcatcttcaggaggcggttgccacggagactggatattggtcccagggacaggctgtgctacctactgggtggtggggagggaagcttctggccatgcttggacattcagaccaaccatcattaatgttaatagaggaaatgcagcaacgtcaaaagcaaggcaggttggttaattagatctggggcccgatgacctccctttcccactgctacagcccttttgacttcccccagcaggaagcgctgtctgtgcggctgagtctgggccacttgcttaattgcatttctggcagggaaggagaggagggatggagaagctctgctcgctgcttccacctcaccatgtgtcctcccctcccctcccttcctctcctccccacaggcggaattgctttcttctgagccgggtgggctctcctgcagggagaatgcaggggtctgtgcttggctcttagcaaagcaggtggcccacagtgacctccaggaggtggctgattttcctttgtgccttcttatttctcagtaggaacttggaagggaagagctctgaaggagccagaggggcagtcaccttacatgagggtgaggaaggagaagcccagccagcctctacccatccctccctcccaattaggctgcactggggccgaacgcttccctgggctcccactgccttctaaggagccaaggagaattccctgcccactttctgttcctccatgcccaaactggcagatgcttctctgggagcaaggccacatgggctgatgcagctttgagtgctcaggttctgttttctggaagttgctggagaagggctgtcagggtgcttctatgaatatgggcttcagctgtagcacttggcagaaacgtgatgtgtcccacaaactgctggtggaggaagaagatgttcgtcagccaattcaacctccagccagcttcttgagcctatttggtttaaaaaaaaaaagtcttctaatcagaagccactgattttataataaataacacttgttttgaa

SEQ ID NO: 276884 - DNA, 4683 bp, Homo sapiens
ccacgcgtccggccgcctcctagcggcccgggccgcgaccacgctgcccgccccgccccgagcccggggccccgcgctccgctgcagtgaagggcgttgcatttcccggggtaccccgagctgccctcttgtgactccttggcggggcggctggtcagacaaagtgtgcctccgggccggagggcgacccagaggagggggaagatgccgccggccacgggcggaggcctggcagagtccgagctgcgtccccggaggggccgctgtggcccccaggctgctagggccgcaggccgggacgtggccgctgaggctgtggcgcgaagccccaaacggcctgcttggggctcacggcgcttcgaggcggtcggctggtgggccctgctggccttggtgacgctgctgtccttcgccacccgcttccaccgcttggacgagccgccgcacatctgttgggatgagactcactttggaaaaatgggaagttactatatcaaccgtacatttttctttgatgtgcacccgcccctgggaaagatgctgataggtcttgctggctacctgagtggatatgatggtacctttttgttccagaagcctggggataaatatgagcatcacagctacatgggaatgagaggattctgtgcattccttggctcctggctggtcccctttgcctacctcactgtactggatctgtccaagtccctctcggcagcactgctcacagctgccctcctcacctttgacacgggatgcctcactctgtcccagtacatcctccttgaccccatcctgatgttcttcatcatggctgccatgctgagcatggtcaagtacaactcttgcgccgacaggcccttctctgccccctggtggttctggctcagcctgactggcgttagtcttgctggtgctttaggggtcaagtttgttggcctctttatcatccttcaagtggggctgaacaccattgcagacctttggtacctgttcggagacctcagtctttcattggtgactgtgggaaaacacctgactgctcgtgtcctgtgcctcatagtgctgcccctggctctctatacagccacctttgctgttcacttcatggtgctgagtaaaagtggccctggtgacggtttcttcagttctgccttccaggcccggctttcagggaacaacctgcacaatgcttccatccctgaacacctggcctacggctctgtgatcactgtgaagaacctccggatggccatcggctatctgcactcccacaggcacctctaccccgagggcattggtgcccgtcagcagcaggtcaccacctatttgcacaaggactacaacaacctgtggattatcaagaaacataacacaaactcagatcccctagacccttccttcccagtggagtttgtaagacatggagacattattcgactagaacacaaagaaacttcccggaacttgcacagtcactatcatgaggcccccatgacccggaagcactatcaggtcaccggctatggcataaatggaacaggggactcaaatgatttctggcggattgaggtcgtaaacagaaaatttggaaaccggatcaaagtgctgagaagtcgaattcgcttcatccatttggtcacaggttgtgtcctgggctcctcgggaaaggttctgcccaagtggggctgggagcagttggaagttacttgcaccccatacctgaaagaaaccctcaactccatctggaatgtggaggaccatatcaatcccaagttgccaaacatcagcctggatgtgctacagcccagttttcctgagatcttgctggaatcccacatggtcatgatccgggggaacagtggcctcaaacccaaggacaatgagttcacgtccaaaccctggcactggcctatcaactatcagggcctacgcttctcaggggtcaatgacacagatttccgagtctatctgcttggcaacccggtggtttggtggctgaatctgttgagcatcgccctctacctcctctcagggagcatcattgctgtagccatgcagagaggggcacggctgccagcggaggttgcagggttgtcccaggtcctgctgcgaggaggcggccaggtcctgctcggctggacactccattacttcccgtttttcctgatgggccgggtcctctacttccaccactacttcccagccatgctcttctcaagcatgttgacaggcattctgtgggacaccctcctgcggctctgtgcctggggcttggcctcatggcccctggcgaggggcatacatgtggcgggaatcctgagcctgctcctgggaactgcctacagctgcctaaggagcccgaagaattctgctgctcaccaggacccagctctgggagtgcagctggaatggaacccagcattggagagagccgggagagagccgcagctccgtccacagcaccacggagaggacagcgcctcttgggctgctccctcgtgcacagcgcaggggaggatgggtgccagagggtgggagtgggtgcgcgtgtgtgtatgtgagggcatgttgtccatatccctgtggaatacagaccgtgtaactggacagctgagtgtcataaactctaaaatagtccaggctatagtaatattttctggtatttttttctgttggatttctttggttttggtttgtaagatccatcaaaaattctcagacctctgagagggccttgagggcagagaatactgacctcaccttgggatgtcaccaaaggcagagcagatgggactgtcaaagttgtgctgccctccctcccacaaacaaatgaatccagcgtggaggaaggcgcgccgccccgagctggagggcctggctcccaccatgccccccagtggctgcaggtagctggacttcctgcctgtgacgcacagagagcagcggactccggagcgtcagcctgccttagcccttggttcctcgttttttgggattgtcacactgtgacactcgggaggaacgatgtcctatcctgggctgctcaatgttcccaggccctgtgtgccagaggccaggtctctccaagtgcatctagcctggcctggagggcaaggcagatgcattctcctggctgctgggagagcccatgggaaccttgcttagcgcccaaggtagatgagagacagggcagggaatctgcgtggtgctgggatgtggggactctggcctctccagactaatgttcctgtcacctgctgagctttcccagtgtcacttctgcagtcctcctctgctcacccctccctcactccatgggcaattccctttctctctgtcactgcttcagcagtgaagacccatggcacctagaaatgcatgccagcttcctgcatctaccactctgcagctcaaacaagaagctcagagctgccccttccacttcctccccaaaagggatgaagaaaaccctgtggtagaaccaaaccacccaaggccagcccttaagcctgcctccaccttcctggtgcatgacaaaatatttcttttgtctcagaggactttgatgcttcaatatttaatgatgaatccgccacactccattttccctcctctgaagctcccaacaactctgacagggtcagatctctttaaagcatcttcaggaggcggttgccacggagactggatattggtcccagggacaggctgtgctacctactgggtggtggggagggaagcttctggccatgcttggacattcagaccaaccatcattaatgttaatagaggaaatgcagcaacgtcaaaagcaaggcaggttggttaattagatctggggcccgatgacctccctttcccactgctacagcccttttgacttcccccagcaggaagcgctgtctgtgcggctgagtctgggccacttgcttaattgcatttctggcagggaaggagaggagggatggagaagctctgctcgctgcttccacctcaccatgtgtcctcccctcccctcccttcctctcctccccacaggcggaattgctttcttctgagccgggtgggctctcctgcagggagaatgcaggggtctgtgcttggctcttagcaaagcaggtggcccacagtgacctccaggaggtggctgattttcctttgtgccttcttatttctcagtaggaacttggaagggaagagctctgaaggagccagaggggcagtcaccttacatgagggtgaggaaggagaagcccagccagcctctacccatccctccctcccaattaggctgcactggggccgaacgcttccctgggctcccactgccttctaaggagccaaggagaattccctgcccactttctgttcctccatgcccaaactggcagatgcttctctgggagcaaggccacatgggctgatgcagctttgagtgctcaggttctgttttctggaagttgctggagaagggctgtcagggtgcttctatgaatatgggcttcagctgtagcacttggcagaaacgtgatgtgtcccacaaactgctggtggaggaagaagatgttcgtcagccaattcaacctccagccagcttcttgagcctatttggtttaaaaaaaaaaagtcttctaatcagaagccactgattttataataaataacacttgttttgaa

SEQ ID NO: 276885 - DNA, 2877 bp, Homo sapiens
aaggtcacacagcaaggaaggggcagagctggaccagagcctggaatctctgcccgctccttgtcttctgactgggctgtgctgcttgggcccagggttgtcccaggtcctgctgcgaggaggcggccaggtcctgctcggctggacactccattacttcccgtttttcctgatgggccgggtcctctacttccaccactacttcccagccatgctcttctcaagcatgttgacaggcattctgtgggacaccctcctgcggctctgtgcctggggcttggcctcatggcccctggcgaggggcatacatgtggcgggaatcctgagcctgctcctgggaactgcctacagcttctacctcttccaccctctggcttacgggatggttggtcccctggcccaggacccccaaagtccaatggcaggactaaggtggctggactcatgggacttttgaggccactgcaaagattccagcctgggtccaggaacttcccaggagagccagctgggaagcagtactggaccatccggccatgaggaagctgcctaaggagcccgaagaattctgctgctcaccaggacccagctctgggagtgcagctggaatggaacccagcattggagagagccgggagagagccgcagctccgtccacagcaccacggagaggacagcgcctcttgggctgctccctcgtgcacagcgcaggggaggatgggtgccagagggtgggagtgggtgcgcgtgtgtgtatgtgagggcatgttgtccatatccctgtggaatacagaccgtgtaactggacagctgagtgtcataaactctaaaatagtccaggctatagtaatattttctggtatttttttctgttggatttctttggttttggtttgtaagatccatcaaaaattctcagacctctgagagggccttgagggcagagaatactgacctcaccttgggatgtcaccaaaggcagagcagatgggactgtcaaagttgtgctgccctccctcccacaaacaaatgaatccagcgtggaggaaggcgcgccgccccgagctggagggcctggctcccaccatgccccccagtggctgcaggtagctggacttcctgcctgtgacgcacagagagcagcggactccggagcgtcagcctgccttagcccttggttcctcgttttttgggattgtcacactgtgacactcgggaggaacgatgtcctatcctgggctgctcaatgttcccaggccctgtgtgccagaggccaggtctctccaagtgcatctagcctggcctggagggcaaggcagatgcattctcctggctgctgggagagcccatgggaaccttgcttagcgcccaaggtagatgagagacagggcagggaatctgcgtggtgctgggatgtggggactctggcctctccagactaatgttcctgtcacctgctgagctttcccagtgtcacttctgcagtcctcctctgctcacccctccctcactccatgggcaattccctttctctctgtcactgcttcagcagtgaagacccatggcacctagaaatgcatgccagcttcctgcatctaccactctgcagctcaaacaagaagctcagagctgccccttccacttcctccccaaaagggatgaagaaaaccctgtggtagaaccaaaccacccaaggccagcccttaagcctgcctccaccttcctggtgcatgacaaaatatttcttttgtctcagaggactttgatgcttcaatatttaatgatgaatccgccacactccattttccctcctctgaagctcccaacaactctgacagggtcagatctctttaaagcatcttcaggaggcggttgccacggagactggatattggtcccagggacaggctgtgctacctactgggtggtggggagggaagcttctggccatgcttggacattcagaccaaccatcattaatgttaatagaggaaatgcagcaacgtcaaaagcaaggcaggttggttaattagatctggggcccgatgacctccctttcccactgctacagcccttttgacttcccccagcaggaagcgctgtctgtgcggctgagtctgggccacttgcttaattgcatttctggcagggaaggagaggagggatggagaagctctgctcgctgcttccacctcaccatgtgtcctcccctcccctcccttcctctcctccccacaggcggaattgctttcttctgagccgggtgggctctcctgcagggagaatgcaggggtctgtgcttggctcttagcaaagcaggtggcccacagtgacctccaggaggtggctgattttcctttgtgccttcttatttctcagtaggaacttggaagggaagagctctgaaggagccagaggggcagtcaccttacatgagggtgaggaaggagaagcccagccagcctctacccatccctccctcccaattaggctgcactggggccgaacgcttccctgggctcccactgccttctaaggagccaaggagaattccctgcccactttctgttcctccatgcccaaactggcagatgcttctctgggagcaaggccacatgggctgatgcagctttgagtgctcaggttctgttttctggaagttgctggagaagggctgtcagggtgcttctatgaatatgggcttcagctgtagcacttggcagaaacgtgatgtgtcccacaaactgctggtggaggaagaagatgttcgtcagccaattcaacctccagccagcttcttgagcctatttggtttaaaaaaaaaaagtcttctaatcagaagccactgattttataataaataacacttgttttgaa

SEQ ID NO: 276886 - DNA, 2580 bp, Homo sapiens
ccacgcgtccggccgcctcctagcggcccgggccgcgaccacgctgcccgccccgccccgagcccggggccccgcgctccgctgcagtgaagggcgttgcatttcccggggtaccccgagctgccctcttgtgactccttggcggggcggctggtcagacaaagtgtgcctccgggccggagggcgacccagaggagggggaagatgccgccggccacgggcggaggcctggcagagtccgagctgcgtccccggaggggccgctgtggcccccaggctgctagggccgcaggccgggacgtggccgctgaggctgtggcgcgaagccccaaacggcctgcttggggctcacggcgcttcgaggcggtcggctggtgggccctgctggccttggtgacgctgctgtccttcgccacccgcttccaccgcttggacgagccgccgcacatctgttgggatgagactcactttggaaaaatgggaagttactatatcaaccgtacatttttctttgatgtgcacccgcccctgggaaagatgctgataggtcttgctggctacctgagtggatatgatggtacctttttgttccagaagcctggggataaatatgagcatcacagctacatgggaatgagaggattctgtgcattccttggctcctggctggtcccctttgcctacctcactgtactggatctgtccaagtccctctcggcagcactgctcacagctgccctcctcacctttgacacgggatgcctcactctgtcccagtacatcctccttgaccccatcctgatgttcttcatcatggctgccatgctgagcatggtcaagtacaactcttgcgccgacaggcccttctctgccccctggtggttctggctcagcctgactggcgttagtcttgctggtgctttaggggtcaagtttgttggcctctttatcatccttcaagtggggctgaacaccattgcagacctttggtacctgttcggagacctcagtctttcattggtgactgtgggaaaacacctgactgctcgtgtcctgtgcctcatagtgctgcccctggctctctatacagccacctttgctgttcacttcatggtgctgagtaaaagtggccctggtgacggtttcttcagttctgccttccaggcccggctttcagggaacaacctgcacaatgcttccatccctgaacacctggcctacggctctgtgatcactgtgaagaacctccggatggccatcggctatctgcactcccacaggcacctctaccccgagggcattggtgcccgtcagcagcaggtcaccacctatttgcacaaggactacaacaacctgtggattatcaagaaacataacacaaactcagatcccctagacccttccttcccagtggagtttgtaagacatggagacattattcgactagaacacaaagaaacttcccggaacttgcacagtcactatcatgaggcccccatgacccggaagcactatcaggtcaccggctatggcataaatggaacaggggactcaaatgatttctggcggattgaggtcgtaaacagaaaatttggaaaccggatcaaagtgctgagaagtcgaattcgcttcatccatttggtcacaggttgtgtcctgggctcctcgggaaaggttctgcccaagtggggctgggagcagttggaagttacttgcaccccatacctgaaagaaaccctcaactccatctggaatgtggaggaccatatcaatcccaagttgccaaacatcagcctggatgtgctacagcccagttttcctgagatcttgctggaatcccacatggtcatgatccgggggaacagtggcctcaaacccaaggacaatgagttcacgtccaaaccctggcactggcctatcaactatcagggcctacgcttctcaggggtcaatgacacagatttccgagtctatctgcttggcaacccggtggtttggtggctgaatctgttgagcatcgccctctacctcctctcagggagcatcattgctgtagccatgcagagaggggcacggctgccagcggaggttgcagggttgtcccaggtcctgctgcgaggaggcggccaggtcctgctcggctggacactccattacttcccgtttttcctgatgggccgggtcctctacttccaccactacttcccagccatgctcttctcaagcatgttgacaggcattctgtgggacaccctcctgcggctctgtgcctggggcttggcctcatggcccctggcgaggggcatacatgtggcgggaatcctgagcctgctcctgggaactgcctacagtaaagattctactcttcaccctctggttaaggatggttgggcccctggccaagacccaagtcatggccgactagcggtggcccggacttggagcacatgcagaatcagcgggcaggaactccgggagcagggacatatggcccggagagagagcagagcaaatgggccgacctggaggaggtgcacaagaaggaaggacaaagaaaggcgctccacgagagaaggcccg

SEQ ID NO: 276887 - DNA, 2278 bp, Homo sapiens
ccacgcgtccggccgcctcctagcggcccgggccgcgaccacgctgcccgccccgccccgagcccggggccccgcgctccgctgcagtgaagggcgttgcatttcccggggtaccccgagctgccctcttgtgactccttggcggggcggctggtcagacaaagtgtgcctccgggccggagggcgacccagaggagggggaagatgccgccggccacgggcggaggcctggcagagtccgagctgcgtccccggaggggccgctgtggcccccaggctgctagggccgcaggccgggacgtggccgctgaggctgtggcgcgaagccccaaacggcctgcttggggctcacggcgcttcgaggcggtcggctggtgggccctgctggccttggtgacgctgctgtccttcgccacccgcttccaccgcttggacgagccgccgcacatctgttgggatgagactcactttggaaaaatgggaagttactatatcaaccgtacatttttctttgatgtgcacccgcccctgggaaagatgctgataggtcttgctggctacctgagtggatatgatggtacctttttgttccagaagcctggggataaatatgagcatcacagctacatgggaatgagaggattctgtgcattccttggctcctggctggtcccctttgcctacctcactgtactggatctgtccaagtccctctcggcagcactgctcacagctgccctcctcacctttgacacgggatgcctcactctgtcccagtacatcctccttgaccccatcctgatgttcttcatcatggctgccatgctgagcatggtcaagtacaactcttgcgccgacaggcccttctctgccccctggtggttctggctcagcctgactggcgttagtcttgctggtgctttaggggtcaagtttgttggcctctttatcatccttcaagtggggctgaacaccattgcagacctttggtacctgttcggagacctcagtctttcattggtgactgtgggaaaacacctgactgctcgtgtcctgtgcctcatagtgctgcccctggctctctatacagccacctttgctgttcacttcatggtgctgagtaaaagtggccctggtgacggtttcttcagttctgccttccaggcccggctttcagggaacaacctgcacaatgcttccatccctgaacacctggcctacggctctgtgatcactgtgaagaacctccggatggccatcggctatctgcactcccacaggcacctctaccccgagggcattggtgcccgtcagcagcaggtcaccacctatttgcacaaggactacaacaacctgtggattatcaagaaacataacacaaactcagatcccctagacccttccttcccagtggagtttgtaagacatggagacattattcgactagaacacaaagaaacttcccggaacttgcacagtcactatcatgaggcccccatgacccggaagcactatcaggtcaccggctatggcataaatggaacaggggactcaaatgatttctggcggattgaggtcgtaaacagaaaatttggaaaccggatcaaagtgctgagaagtcgaattcgcttcatccatttggtcacaggttgtgtcctgggctcctcgggaaaggttctgcccaagtggggctgggagcagttggaagttacttgcaccccatacctgaaagaaaccctcaactccatctggaatgtggaggaccatatcaatcccaagttgccaaacatcagcctggatgtgctacagcccagttttcctgagatcttgctggaatcccacatggtcatgatccgggggaacagtggcctcaaacccaaggacaatgagttcacgtccaaaccctggcactggcctatcaactatcagggcctacgcttctcaggggtcaatgacacagatttccgagtctatctgcttggcaacccggtggtttggtggctgaatctgttgagcatcgccctctacctcctctcagggagcatcattgctgtagccatgcagagaggggcacggctgccagcggaggttgcaggtcaggtcctctgggctctccctcccctgacctggcggcagcagggcacctgcgcccctggggagggccggctgcctgctgatgggccatcctttgcgtttacaacccaaacttcccttatccttgcttttgaaaggtaacaaccccagtacccgtgctgggtaacaacactttacttcctcc

SEQ ID NO: 276888 - DNA, 1983 bp, Homo sapiens
ccacgcgtccggccgcctcctagcggcccgggccgcgaccacgctgcccgccccgccccgagcccggggccccgcgctccgctgcagtgaagggcgttgcatttcccggggtaccccgagctgccctcttgtgactccttggcggggcggctggtcagacaaagtgtgcctccgggccggagggcgacccagaggagggggaagatgccgccggccacgggcggaggcctggcagagtccgagctgcgtccccggaggggccgctgtggcccccaggctgctagggccgcaggccgggacgtggccgctgaggctgtggcgcgaagccccaaacggcctgcttggggctcacggcgcttcgaggcggtcggctggtgggccctgctggccttggtgacgctgctgtccttcgccacccgcttccaccgcttggacgagccgccgcacatctgttgggatgagactcactttggaaaaatgggaagttactatatcaaccgtacatttttctttgatgtgcacccgcccctgggaaagatgctgataggtcttgctggctacctgagtggatatgatggtacctttttgttccagaagcctggggataaatatgagcatcacagctacatgggaatgagaggattctgtgcattccttggctcctggctggtcccctttgcctacctcactgtactggatctgtccaagtccctctcggcagcactgctcacagctgccctcctcacctttgacacgggatgcctcactctgtcccagtacatcctccttgaccccatcctgatgttcttcatcatggctgccatgctgagcatggtcaagtacaactcttgcgccgacaggcccttctctgccccctggtggttctggctcagcctgactggcgttagtcttgctggtgctttaggggtcaagtttgttggcctctttatcatccttcaagtggggctgaacaccattgcagacctttggtacctgttcggagacctcagtctttcattggtgactgtgggaaaacacctgactgctcgtgtcctgtgcctcatagtgctgcccctggctctctatacagccacctttgctgttcacttcatggtgctgagtaaaagtggccctggtgacggtttcttcagttctgccttccaggcccggctttcagggaacaacctgcacaatgcttccatccctgaacacctggcctacggctctgtgatcactgtgaagaacctccggatggccatcggctatctgcactcccacaggcacctctaccccgagggcattggtgcccgtcagcagcaggtcaccacctatttgcacaaggactacaacaacctgtggattatcaagaaacataacacaaactcagatcccctagacccttccttcccagtggagtttgtaagacatggagacattattcgactagaacacaaagaaacttcccggaacttgcacagtcactatcatgaggcccccatgacccggaagcactatcaggtcaccggctatggcataaatggaacaggggactcaaatgatttctggcggattgaggtcgtaaacagaaaatttggaaaccggatcaaagtgctgagaagtcgaattcgcttcatccatttggtcacaggttgtgtcctgggctcctcgggaaaggttctgcccaagtggggctgggagcagttggaagttacttgcaccccatacctgaaagaaaccctcaactccatctggaatgtggaggaccatatcaatcccaagttgccaaacatcagcctggatgtgctacagcccagttttcctgagatcttgctggaatcccacatggtcatgatccgggggaacagtggcctcaaacccaaggacaatgagttcacgtccaaaccctggcactggcctatcaactatcaggtaggatccaaggctggggctcctcccaggaaatggagccaagaacaagagcag

SEQ ID NO: 276889 - DNA, 314 bp, Homo sapiens
tgcagaaggaaggagagaatctcactcaccagtgctacatatgagccccattgggaaacatggcccctcaggttggtggctggggattctgaaattggcttaagcaacattggtttgaggttgattgtccttggccagctgtgctgatagtgatggtattctccctcctgcttcctcttccctccgcccccaccccccacccaggtcaccacctatttgcacaaggactacaacaacctgtggattatcaagaaacataacacaaactcaggtaatgtggtcagagactgatgcttcttgtgctgttactccct

SEQ ID NO: 276890 - DNA, 4877 bp, Homo sapiens
ccacgcgtccggccgcctcctagcggcccgggccgcgaccacgctgcccgccccgccccgagcccggggccccgcgctccgctgcagtgaagggcgttgcatttcccggggtaccccgagctgccctcttgtgactccttggcggggcggctggtcagacaaagtgtgcctccgggccggagggcgacccagaggagggggaagatgccgccggccacgggcggaggcctggcagagtccgagctgcgtccccggaggggccgctgtggcccccaggctgctagggccgcaggccgggacgtggccgctgaggctgtggcgcgaagccccaaacggcctgcttggggctcacggcgcttcgaggcggtcggctggtgggccctgctggccttggtgacgctgctgtccttcgccacccgcttccaccgcttggacgagccgccgcacatctgttgggatgagactcactttggaaaaatgggaagttactatatcaaccgtacatttttctttgatgtgcacccgcccctgggaaagatgctgataggtcttgctggctacctgagtggatatgatggtacctttttgttccagaagcctggggataaatatgagcatcacagctacatgggaatgagaggattctgtgcattccttggctcctggctggtcccctttgcctacctcactgtactggatctgtccaagtccctctcggcagcactgctcacagctgccctcctcacctttgacacgggatgcctcactctgtcccagtacatcctccttgaccccatcctgatgttcttcatcatggctgccatgctgagcatggtcaagtacaactcttgcgccgacaggcccttctctgccccctggtggttctggctcagcctgactggcgttagtcttgctggtgctttaggggtcaagtttgttggcctctttatcatccttcaagtggggctgaacaccattgcagacctttggtacctgttcggagacctcagtctttcattggtgactgtgggaaaacacctgactgctcgtgtcctgtgcctcatagtgctgcccctggctctctatacagccacctttgctgttcacttcatggtgctgagtaaaagtggccctggtgacggtttcttcagttctgccttccaggcccggctttcagggaacaacctgcacaatgcttccatccctgaacacctggcctacggctctgtgatcactgtgaagaacctccggatggccatcggctatctgcactcccacaggcacctctaccccgagggcattggtgcccgtcagcagcaggtcaccacctatttgcacaaggactacaacaacctgtggattatcaagaaacataacacaaactcagatcccctagacccttccttcccagtggagtttgtaagacatggagacattattcgactagaacacaaagaaacttcccggaacttgcacagtcactatcatgaggcccccatgacccggaagcactatcaggtcaccggctatggcataaatggaacaggggactcaaatgatttctggcggattgaggtcgtaaacagaaaatttggaaaccggatcaaagtgctgagaagtcgaattcgcttcatccatttggtcacaggttgtgtcctgggctcctcgggaaaggttctgcccaagtggggctgggagcagttggaagttacttgcaccccatacctgaaagaaaccctcaactccatctggaatgtggaggaccatatcaatcccaagttgccaaacatcagcctggatgtgctacagcccagttttcctgagatcttgctggaatcccacatggtcatgatccgggggaacagtggcctcaaacccaaggacaatgagttcacgtccaaaccctggcactggcctatcaactatcagggcctacgcttctcaggggtcaatgacacagatttccgagtctatctgcttggcaacccggtggtttggtggctgaatctgttgagcatcgccctctacctcctctcagggagcatcattgctgtagccatgcagagaggggcacggctgccagcggaggttgcagggttgtcccaggtcctgctgcgaggaggcggccaggtcctgctcggctggacactccattacttcccgtttttcctgatgggccgggtcctctacttccaccactacttcccagccatgctcttctcaagcatgttgacaggcattctgtgggacaccctcctgcggctctgtgcctggggcttggcctcatggcccctggcgaggggcatacatgtggcgggaatcctgagcctgctcctgggaactgcctacagcttctacctcttccaccctctggcttacgggatggttggtcccctggcccaggacccccaaagtccaatggcaggactaaggtggctggactcatgggacttttgaggccactgcaaagattccagcctgggtccaggaacttcccaggagagccagctgggaagcagtactggaccatccggccatgaggaagctgcctaaggagcccgaagaattctgctgctcaccaggacccagctctgggagtgcagctggaatggaacccagcattggagagagccgggagagagccgcagctccgtccacagcaccacggagaggacagcgcctcttgggctgctccctcgtgcacagcgcaggggaggatgggtgccagagggtgggagtgggtgcgcgtgtgtgtatgtgagggcatgttgtccatatccctgtggaatacagaccgtgtaactggacagctgagtgtcataaactctaaaatagtccaggctatagtaatattttctggtatttttttctgttggatttctttggttttggtttgtaagatccatcaaaaattctcagacctctgagagggccttgagggcagagaatactgacctcaccttgggatgtcaccaaaggcagagcagatgggactgtcaaagttgtgctgccctccctcccacaaacaaatgaatccagcgtggaggaaggcgcgccgccccgagctggagggcctggctcccaccatgccccccagtggctgcaggtagctggacttcctgcctgtgacgcacagagagcagcggactccggagcgtcagcctgccttagcccttggttcctcgttttttgggattgtcacactgtgacactcgggaggaacgatgtcctatcctgggctgctcaatgttcccaggccctgtgtgccagaggccaggtctctccaagtgcatctagcctggcctggagggcaaggcagatgcattctcctggctgctgggagagcccatgggaaccttgcttagcgcccaaggtagatgagagacagggcagggaatctgcgtggtgctgggatgtggggactctggcctctccagactaatgttcctgtcacctgctgagctttcccagtgtcacttctgcagtcctcctctgctcacccctccctcactccatgggcaattccctttctctctgtcactgcttcagcagtgaagacccatggcacctagaaatgcatgccagcttcctgcatctaccactctgcagctcaaacaagaagctcagagctgccccttccacttcctccccaaaagggatgaagaaaaccctgtggtagaaccaaaccacccaaggccagcccttaagcctgcctccaccttcctggtgcatgacaaaatatttcttttgtctcagaggactttgatgcttcaatatttaatgatgaatccgccacactccattttccctcctctgaagctcccaacaactctgacagggtcagatctctttaaagcatcttcaggaggcggttgccacggagactggatattggtcccagggacaggctgtgctacctactgggtggtggggagggaagcttctggccatgcttggacattcagaccaaccatcattaatgttaatagaggaaatgcagcaacgtcaaaagcaaggcaggttggttaattagatctggggcccgatgacctccctttcccactgctacagcccttttgacttcccccagcaggaagcgctgtctgtgcggctgagtctgggccacttgcttaattgcatttctggcagggaaggagaggagggatggagaagctctgctcgctgcttccacctcaccatgtgtcctcccctcccctcccttcctctcctccccacaggcggaattgctttcttctgagccgggtgggctctcctgcagggagaatgcaggggtctgtgcttggctcttagcaaagcaggtggcccacagtgacctccaggaggtggctgattttcctttgtgccttcttatttctcagtaggaacttggaagggaagagctctgaaggagccagaggggcagtcaccttacatgagggtgaggaaggagaagcccagccagcctctacccatccctccctcccaattaggctgcactggggccgaacgcttccctgggctcccactgccttctaaggagccaaggagaattccctgcccactttctgttcctccatgcccaaactggcagatgcttctctgggagcaaggccacatgggctgatgcagctttgagtgctcaggttctgttttctggaagttgctggagaagggctgtcagggtgcttctatgaatatgggcttcagctgtagcacttggcagaaacgtgatgtgtcccacaaactgctggtggaggaagaagatgttcgtcagccaattcaacctccagccagcttcttgagcctatttggtttaaaaaaaaaaagtcttctaatcagaagccactgattttataataaataacacttgttttgaa

SEQ ID NO: 276891 - DNA, 6231 bp, Homo sapiens
  misc_feature (2075)..(2075): n is a, c, g, or t
  misc_feature (2166)..(2166): n is a, c, g, or t
ctctattcctggtatgtagctccttggtctcttttctctctcactgtgacttggaatctcactttcctttcaaaaggccaattccccaggaatcagcctctgtccaagagctgccgtgttttattttataccatctgaaggaaagcggaatcagagagccccttactgactctacccttcaaattgtggggctctttttccttcctgagtgtttaggttgtgctgttcctagacctcggccataatacaagagaggatttgtttcaagcaatgctgataggtcttgctggctacctgagtggatatgatggtacctttttgttccagaagcctggggataaatatgagcatcacagctacatgggaatgagaggagtaaggcttcctgacttgaaatggactgactgaaccctggggccacactaaaccagaaatgttatagttagcagccctggcgtggtggcagttctgtgcattccttggctcctggctggtcccctttgcctacctcactgtactggatctgtccaagtccctctcggcagcactgctcacagctgccctcctcacctttgacacgggatgcctcactctgtcccagtacatcctccttgaccccatcctgatgttcttcatcatggctgccatgctgagcatggtcaagtacaactcttgcgccgacaggcccttctctgccccctggtggttctggctcagcctgactggcgttagtcttgctggtgctttaggggtcaagtttgttggcctctttatcatccttcaagtggggctgaacaccattgcagacctttggtacctgttcggagacctcagtctttcattggtgagcacccaagggtttgctgtggaaatgtttttgctccctgatgttgctgagtaggagctggtggccttctctgtctctactgcaggtggcagagtggctgtgttctgggtcccaggtgggctggaccccccaacctccgcagacagcaggacatcagggagtgggcccggctgaggactggatagggttcaagggagaggatagattaacattcttggaagtctctttttgcatttgttttataatgtctgtcttttttttttttttttgagatagagtttcactctgttacccaggctggagtgcagtgggccgatcttggctcactgcaacttccgcctcctgggtacgagtgattcttttgcctcagcctcccaagtagctgggattacaggcacataccaccatgcccagctaatttttgtagttttagtagagatgcggttctaccatgttggccagattgttctcaaacccctgacctcaagtgatccgcccgccttggcctcccaaagtgcggggattacaggcatgagccaccgagcccggtctgaactcacaattttcatttcctgacccacggtctccatatttggaggccagtaagggcctttacagtttattatttattaagggctgattctacgccaggcactatgcgaaacgctttaccttcattatctcatttacccctcataatagtcctatgaggtagggagttattaccctgattttcaaatgaggaaatcaaaacctacagaggtaatgacttccccgaggccatcggggagtgagaggtgtatctaggagtcacaaccaggttaggttggccccaggccatcactctgctgtggtgctgctccatcacctccaaaccagctcctaacaagtttattcattcattcattcatttattcagaaaatgtgtaaagatcatccagccactgtgtgtgaggtgctggaatatacagatgaatataatatggtccccaccctctgtggtcaatggagagagagaaataaggaagcaggcagttacagtcagccaggagtgctgggagagcacagaaaagggcactcggccagtcccaggcaatccaggaaggcctctggaaggaagccgcgaagttaagataaggagccattagccatgtgatgggttgggctgggacagtagaggaagcactgggaaagttcaaggaggttagtgtacctggaacatggagcngactggtgagcaactgtgttgcagatgcaggtgccttgtccttggcacagtaacatcctggggttttgggtgtagagcctggagaggtagnagagggctggcccatgtttatcttgtgtagtgcttgggtggtgggtgttacagaaaggcttagggtttccacatattcttctctctcctcttggccattttttatgattatgactgatatattaaaagctatatataatgcatgcatagtgcctaaggaataatgaggtctcacatgcctagcaccccacgctggcctctgtttgcaggtgactgtgggaaaacacctgactgctcgtgtcctgtgcctcatagtgctgcccctggctctctatacagccacctttgctgttcacttcatggtgctgagtaaaagtggccctggtgacggtttcttcagttctgccttccaggcccggctttcagggaacaacctgcacaatgcttccatccctgaacacctggcctacggctctgtgatcactgtgaagaacctccggatggccatcggctatctgcactcccacaggcacctctaccccgagggcattggtgcccgtcagcagcaggtcaccacctatttgcacaaggactacaacaacctgtggattatcaagaaacataacacaaactcagatcccctagacccttccttcccagtggagtttgtaagacatggagacattattcgactagaacacaaagaaacttcccggaacttgcacagtcactatcatgaggcccccatgacccggaagcactatcaggtcaccggctatggcataaatggaacaggggactcaaatgatttctggcggattgaggtcgtaaacagaaaatttggaaaccggatcaaagtgctgagaagtcgaattcgcttcatccatttggtcacaggttgtgtcctgggctcctcgggaaaggttctgcccaagtggggctgggagcagttggaagttacttgcaccccatacctgaaagaaaccctcaactccatctggaatgtggaggaccatatcaatcccaagttgccaaacatcagcctggatgtgctacagcccagttttcctgagatcttgctggaatcccacatggtcatgatccgggggaacagtggcctcaaacccaaggacaatgagttcacgtccaaaccctggcactggcctatcaactatcagggcctacgcttctcaggggtcaatgacacagatttccgagtctatctgcttggcaacccggtggtttggtggctgaatctgttgagcatcgccctctacctcctctcagggagcatcattgctgtagccatgcagagaggggcacggctgccagcggaggttgcagggttgtcccaggtcctgctgcgaggaggcggccaggtcctgctcggctggacactccattacttcccgtttttcctgatgggccgggtcctctacttccaccactacttcccagccatgctcttctcaagcatgttgacaggcattctgtgggacaccctcctgcggctctgtgcctggggcttggcctcatggcccctggcgaggggcatacatgtggcgggaatcctgagcctgctcctgggaactgcctacagcttctacctcttccaccctctggcttacgggatggttggtcccctggcccaggacccccaaagtccaatggcaggactaaggtggctggactcatgggacttttgaggccactgcaaagattccagcctgggtccaggaacttcccaggagagccagctgggaagcagtactggaccatccggccatgaggaagctgcctaaggagcccgaagaattctgctgctcaccaggacccagctctgggagtgcagctggaatggaacccagcattggagagagccgggagagagccgcagctccgtccacagcaccacggagaggacagcgcctcttgggctgctccctcgtgcacagcgcaggggaggatgggtgccagagggtgggagtgggtgcgcgtgtgtgtatgtgagggcatgttgtccatatccctgtggaatacagaccgtgtaactggacagctgagtgtcataaactctaaaatagtccaggctatagtaatattttctggtatttttttctgttggatttctttggttttggtttgtaagatccatcaaaaattctcagacctctgagagggccttgagggcagagaatactgacctcaccttgggatgtcaccaaaggcagagcagatgggactgtcaaagttgtgctgccctccctcccacaaacaaatgaatccagcgtggaggaaggcgcgccgccccgagctggagggcctggctcccaccatgccccccagtggctgcaggtagctggacttcctgcctgtgacgcacagagagcagcggactccggagcgtcagcctgccttagcccttggttcctcgttttttgggattgtcacactgtgacactcgggaggaacgatgtcctatcctgggctgctcaatgttcccaggccctgtgtgccagaggccaggtctctccaagtgcatctagcctggcctggagggcaaggcagatgcattctcctggctgctgggagagcccatgggaaccttgcttagcgcccaaggtagatgagagacagggcagggaatctgcgtggtgctgggatgtggggactctggcctctccagactaatgttcctgtcacctgctgagctttcccagtgtcacttctgcagtcctcctctgctcacccctccctcactccatgggcaattccctttctctctgtcactgcttcagcagtgaagacccatggcacctagaaatgcatgccagcttcctgcatctaccactctgcagctcaaacaagaagctcagagctgccccttccacttcctccccaaaagggatgaagaaaaccctgtggtagaaccaaaccacccaaggccagcccttaagcctgcctccaccttcctggtgcatgacaaaatatttcttttgtctcagaggactttgatgcttcaatatttaatgatgaatccgccacactccattttccctcctctgaagctcccaacaactctgacagggtcagatctctttaaagcatcttcaggaggcggttgccacggagactggatattggtcccagggacaggctgtgctacctactgggtggtggggagggaagcttctggccatgcttggacattcagaccaaccatcattaatgttaatagaggaaatgcagcaacgtcaaaagcaaggcaggttggttaattagatctggggcccgatgacctccctttcccactgctacagcccttttgacttcccccagcaggaagcgctgtctgtgcggctgagtctgggccacttgcttaattgcatttctggcagggaaggagaggagggatggagaagctctgctcgctgcttccacctcaccatgtgtcctcccctcccctcccttcctctcctccccacaggcggaattgctttcttctgagccgggtgggctctcctgcagggagaatgcaggggtctgtgcttggctcttagcaaagcaggtggcccacagtgacctccaggaggtggctgattttcctttgtgccttcttatttctcagtaggaacttggaagggaagagctctgaaggagccagaggggcagtcaccttacatgagggtgaggaaggagaagcccagccagcctctacccatccctccctcccaattaggctgcactggggccgaacgcttccctgggctcccactgccttctaaggagccaaggagaattccctgcccactttctgttcctccatgcccaaactggcagatgcttctctgggagcaaggccacatgggctgatgcagctttgagtgctcaggttctgttttctggaagttgctggagaagggctgtcagggtgcttctatgaatatgggcttcagctgtagcacttggcagaaacgtgatgtgtcccacaaactgctggtggaggaagaagatgttcgtcagccaattcaacctccagccagcttcttgagcctatttggtttaaaaaaaaaaagtcttctaatcagaagccactgattttataataaataacacttgttttgaa

SEQ ID NO: 276892 - DNA, 4023 bp, Homo sapiens
cgatatttgtggttctggccgaataatgtctccatgtcttacaaactccactgggaaggaagggtctaggggatctgagtttgttggcctctttatcatccttcaagtggggctgaacaccattgcagacctttggtacctgttcggagacctcagtctttcattggtgactgtgggaaaacacctgactgctcgtgtcctgtgcctcatagtgctgcccctggctctctatacagccacctttgctgttcacttcatggtgctgagtaaaagtggccctggtgacggtttcttcagttctgccttccaggcccggctttcagggaacaacctgcacaatgcttccatccctgaacacctggcctacggctctgtgatcactgtgaagaacctccggatggccatcggctatctgcactcccacaggcacctctaccccgagggcattggtgcccgtcagcagcaggtcaccacctatttgcacaaggactacaacaacctgtggattatcaagaaacataacacaaactcagatcccctagacccttccttcccagtggagtttgtaagacatggagacattattcgactagaacacaaagaaacttcccggaacttgcacagtcactatcatgaggcccccatgacccggaagcactatcaggtcaccggctatggcataaatggaacaggggactcaaatgatttctggcggattgaggtcgtaaacagaaaatttggaaaccggatcaaagtgctgagaagtcgaattcgcttcatccatttggtcacaggttgtgtcctgggctcctcgggaaaggttctgcccaagtggggctgggagcagttggaagttacttgcaccccatacctgaaagaaaccctcaactccatctggaatgtggaggaccatatcaatcccaagttgccaaacatcagcctggatgtgctacagcccagttttcctgagatcttgctggaatcccacatggtcatgatccgggggaacagtggcctcaaacccaaggacaatgagttcacgtccaaaccctggcactggcctatcaactatcagggcctacgcttctcaggggtcaatgacacagatttccgagtctatctgcttggcaacccggtggtttggtggctgaatctgttgagcatcgccctctacctcctctcagggagcatcattgctgtagccatgcagagaggggcacggctgccagcggaggttgcagggttgtcccaggtcctgctgcgaggaggcggccaggtcctgctcggctggacactccattacttcccgtttttcctgatgggccgggtcctctacttccaccactacttcccagccatgctcttctcaagcatgttgacaggcattctgtgggacaccctcctgcggctctgtgcctggggcttggcctcatggcccctggcgaggggcatacatgtggcgggaatcctgagcctgctcctgggaactgcctacagcttctacctcttccaccctctggcttacgggatggttggtcccctggcccaggacccccaaagtccaatggcaggactaaggtggctggactcatgggacttttgaggccactgcaaagattccagcctgggtccaggaacttcccaggagagccagctgggaagcagtactggaccatccggccatgaggaagctgcctaaggagcccgaagaattctgctgctcaccaggacccagctctgggagtgcagctggaatggaacccagcattggagagagccgggagagagccgcagctccgtccacagcaccacggagaggacagcgcctcttgggctgctccctcgtgcacagcgcaggggaggatgggtgccagagggtgggagtgggtgcgcgtgtgtgtatgtgagggcatgttgtccatatccctgtggaatacagaccgtgtaactggacagctgagtgtcataaactctaaaatagtccaggctatagtaatattttctggtatttttttctgttggatttctttggttttggtttgtaagatccatcaaaaattctcagacctctgagagggccttgagggcagagaatactgacctcaccttgggatgtcaccaaaggcagagcagatgggactgtcaaagttgtgctgccctccctcccacaaacaaatgaatccagcgtggaggaaggcgcgccgccccgagctggagggcctggctcccaccatgccccccagtggctgcaggtagctggacttcctgcctgtgacgcacagagagcagcggactccggagcgtcagcctgccttagcccttggttcctcgttttttgggattgtcacactgtgacactcgggaggaacgatgtcctatcctgggctgctcaatgttcccaggccctgtgtgccagaggccaggtctctccaagtgcatctagcctggcctggagggcaaggcagatgcattctcctggctgctgggagagcccatgggaaccttgcttagcgcccaaggtagatgagagacagggcagggaatctgcgtggtgctgggatgtggggactctggcctctccagactaatgttcctgtcacctgctgagctttcccagtgtcacttctgcagtcctcctctgctcacccctccctcactccatgggcaattccctttctctctgtcactgcttcagcagtgaagacccatggcacctagaaatgcatgccagcttcctgcatctaccactctgcagctcaaacaagaagctcagagctgccccttccacttcctccccaaaagggatgaagaaaaccctgtggtagaaccaaaccacccaaggccagcccttaagcctgcctccaccttcctggtgcatgacaaaatatttcttttgtctcagaggactttgatgcttcaatatttaatgatgaatccgccacactccattttccctcctctgaagctcccaacaactctgacagggtcagatctctttaaagcatcttcaggaggcggttgccacggagactggatattggtcccagggacaggctgtgctacctactgggtggtggggagggaagcttctggccatgcttggacattcagaccaaccatcattaatgttaatagaggaaatgcagcaacgtcaaaagcaaggcaggttggttaattagatctggggcccgatgacctccctttcccactgctacagcccttttgacttcccccagcaggaagcgctgtctgtgcggctgagtctgggccacttgcttaattgcatttctggcagggaaggagaggagggatggagaagctctgctcgctgcttccacctcaccatgtgtcctcccctcccctcccttcctctcctccccacaggcggaattgctttcttctgagccgggtgggctctcctgcagggagaatgcaggggtctgtgcttggctcttagcaaagcaggtggcccacagtgacctccaggaggtggctgattttcctttgtgccttcttatttctcagtaggaacttggaagggaagagctctgaaggagccagaggggcagtcaccttacatgagggtgaggaaggagaagcccagccagcctctacccatccctccctcccaattaggctgcactggggccgaacgcttccctgggctcccactgccttctaaggagccaaggagaattccctgcccactttctgttcctccatgcccaaactggcagatgcttctctgggagcaaggccacatgggctgatgcagctttgagtgctcaggttctgttttctggaagttgctggagaagggctgtcagggtgcttctatgaatatgggcttcagctgtagcacttggcagaaacgtgatgtgtcccacaaactgctggtggaggaagaagatgttcgtcagccaattcaacctccagccagcttcttgagcctatttggtttaaaaaaaaaaagtcttctaatcagaagccactgattttataataaataacacttgttttgaa

SEQ ID NO: 276893 - DNA, 3154 bp, Homo sapiens
acagactgaggaaagaatgtatgacaaaggcttttctcctgcatttttttcccctagtgccaaacatcagcctggatgtgctacagcccagttttcctgagatcttgctggaatcccacatggtcatgatccgggggaacagtggcctcaaacccaaggacaatgagttcacgtccaaaccctggcactggcctatcaactatcagggcctacgcttctcaggggtcaatgacacagatttccgagtctatctgcttggcaacccggtggtttggtggctgaatctgttgagcatcgccctctacctcctctcagggagcatcattgctgtagccatgcagagaggggcacggctgccagcggaggttgcagggttgtcccaggtcctgctgcgaggaggcggccaggtcctgctcggctggacactccattacttcccgtttttcctgatgggccgggtcctctacttccaccactacttcccagccatgctcttctcaagcatgttgacaggcattctgtgggacaccctcctgcggctctgtgcctggggcttggcctcatggcccctggcgaggggcatacatgtggcgggaatcctgagcctgctcctgggaactgcctacagcttctacctcttccaccctctggcttacgggatggttggtcccctggcccaggacccccaaagtccaatggcaggactaaggtggctggactcatgggacttttgaggccactgcaaagattccagcctgggtccaggaacttcccaggagagccagctgggaagcagtactggaccatccggccatgaggaagctgcctaaggagcccgaagaattctgctgctcaccaggacccagctctgggagtgcagctggaatggaacccagcattggagagagccgggagagagccgcagctccgtccacagcaccacggagaggacagcgcctcttgggctgctccctcgtgcacagcgcaggggaggatgggtgccagagggtgggagtgggtgcgcgtgtgtgtatgtgagggcatgttgtccatatccctgtggaatacagaccgtgtaactggacagctgagtgtcataaactctaaaatagtccaggctatagtaatattttctggtatttttttctgttggatttctttggttttggtttgtaagatccatcaaaaattctcagacctctgagagggccttgagggcagagaatactgacctcaccttgggatgtcaccaaaggcagagcagatgggactgtcaaagttgtgctgccctccctcccacaaacaaatgaatccagcgtggaggaaggcgcgccgccccgagctggagggcctggctcccaccatgccccccagtggctgcaggtagctggacttcctgcctgtgacgcacagagagcagcggactccggagcgtcagcctgccttagcccttggttcctcgttttttgggattgtcacactgtgacactcgggaggaacgatgtcctatcctgggctgctcaatgttcccaggccctgtgtgccagaggccaggtctctccaagtgcatctagcctggcctggagggcaaggcagatgcattctcctggctgctgggagagcccatgggaaccttgcttagcgcccaaggtagatgagagacagggcagggaatctgcgtggtgctgggatgtggggactctggcctctccagactaatgttcctgtcacctgctgagctttcccagtgtcacttctgcagtcctcctctgctcacccctccctcactccatgggcaattccctttctctctgtcactgcttcagcagtgaagacccatggcacctagaaatgcatgccagcttcctgcatctaccactctgcagctcaaacaagaagctcagagctgccccttccacttcctccccaaaagggatgaagaaaaccctgtggtagaaccaaaccacccaaggccagcccttaagcctgcctccaccttcctggtgcatgacaaaatatttcttttgtctcagaggactttgatgcttcaatatttaatgatgaatccgccacactccattttccctcctctgaagctcccaacaactctgacagggtcagatctctttaaagcatcttcaggaggcggttgccacggagactggatattggtcccagggacaggctgtgctacctactgggtggtggggagggaagcttctggccatgcttggacattcagaccaaccatcattaatgttaatagaggaaatgcagcaacgtcaaaagcaaggcaggttggttaattagatctggggcccgatgacctccctttcccactgctacagcccttttgacttcccccagcaggaagcgctgtctgtgcggctgagtctgggccacttgcttaattgcatttctggcagggaaggagaggagggatggagaagctctgctcgctgcttccacctcaccatgtgtcctcccctcccctcccttcctctcctccccacaggcggaattgctttcttctgagccgggtgggctctcctgcagggagaatgcaggggtctgtgcttggctcttagcaaagcaggtggcccacagtgacctccaggaggtggctgattttcctttgtgccttcttatttctcagtaggaacttggaagggaagagctctgaaggagccagaggggcagtcaccttacatgagggtgaggaaggagaagcccagccagcctctacccatccctccctcccaattaggctgcactggggccgaacgcttccctgggctcccactgccttctaaggagccaaggagaattccctgcccactttctgttcctccatgcccaaactggcagatgcttctctgggagcaaggccacatgggctgatgcagctttgagtgctcaggttctgttttctggaagttgctggagaagggctgtcagggtgcttctatgaatatgggcttcagctgtagcacttggcagaaacgtgatgtgtcccacaaactgctggtggaggaagaagatgttcgtcagccaattcaacctccagccagcttcttgagcctatttggtttaaaaaaaaaaagtcttctaatcagaagccactgattttataataaataacacttgttttgaa

SEQ ID NO: 276894 - DNA, 2870 bp, Homo sapiens
agagcgttggctattatgacccccattttatggattaggaaaccaaggaaccatgagattaagaaacttgccccaggacatacagctaggttgtcccaggtcctgctgcgaggaggcggccaggtcctgctcggctggacactccattacttcccgtttttcctgatgggccgggtcctctacttccaccactacttcccagccatgctcttctcaagcatgttgacaggcattctgtgggacaccctcctgcggctctgtgcctggggcttggcctcatggcccctggcgaggggcatacatgtggcgggaatcctgagcctgctcctgggaactgcctacagcttctacctcttccaccctctggcttacgggatggttggtcccctggcccaggacccccaaagtccaatggcaggactaaggtggctggactcatgggacttttgaggccactgcaaagattccagcctgggtccaggaacttcccaggagagccagctgggaagcagtactggaccatccggccatgaggaagctgcctaaggagcccgaagaattctgctgctcaccaggacccagctctgggagtgcagctggaatggaacccagcattggagagagccgggagagagccgcagctccgtccacagcaccacggagaggacagcgcctcttgggctgctccctcgtgcacagcgcaggggaggatgggtgccagagggtgggagtgggtgcgcgtgtgtgtatgtgagggcatgttgtccatatccctgtggaatacagaccgtgtaactggacagctgagtgtcataaactctaaaatagtccaggctatagtaatattttctggtatttttttctgttggatttctttggttttggtttgtaagatccatcaaaaattctcagacctctgagagggccttgagggcagagaatactgacctcaccttgggatgtcaccaaaggcagagcagatgggactgtcaaagttgtgctgccctccctcccacaaacaaatgaatccagcgtggaggaaggcgcgccgccccgagctggagggcctggctcccaccatgccccccagtggctgcaggtagctggacttcctgcctgtgacgcacagagagcagcggactccggagcgtcagcctgccttagcccttggttcctcgttttttgggattgtcacactgtgacactcgggaggaacgatgtcctatcctgggctgctcaatgttcccaggccctgtgtgccagaggccaggtctctccaagtgcatctagcctggcctggagggcaaggcagatgcattctcctggctgctgggagagcccatgggaaccttgcttagcgcccaaggtagatgagagacagggcagggaatctgcgtggtgctgggatgtggggactctggcctctccagactaatgttcctgtcacctgctgagctttcccagtgtcacttctgcagtcctcctctgctcacccctccctcactccatgggcaattccctttctctctgtcactgcttcagcagtgaagacccatggcacctagaaatgcatgccagcttcctgcatctaccactctgcagctcaaacaagaagctcagagctgccccttccacttcctccccaaaagggatgaagaaaaccctgtggtagaaccaaaccacccaaggccagcccttaagcctgcctccaccttcctggtgcatgacaaaatatttcttttgtctcagaggactttgatgcttcaatatttaatgatgaatccgccacactccattttccctcctctgaagctcccaacaactctgacagggtcagatctctttaaagcatcttcaggaggcggttgccacggagactggatattggtcccagggacaggctgtgctacctactgggtggtggggagggaagcttctggccatgcttggacattcagaccaaccatcattaatgttaatagaggaaatgcagcaacgtcaaaagcaaggcaggttggttaattagatctggggcccgatgacctccctttcccactgctacagcccttttgacttcccccagcaggaagcgctgtctgtgcggctgagtctgggccacttgcttaattgcatttctggcagggaaggagaggagggatggagaagctctgctcgctgcttccacctcaccatgtgtcctcccctcccctcccttcctctcctccccacaggcggaattgctttcttctgagccgggtgggctctcctgcagggagaatgcaggggtctgtgcttggctcttagcaaagcaggtggcccacagtgacctccaggaggtggctgattttcctttgtgccttcttatttctcagtaggaacttggaagggaagagctctgaaggagccagaggggcagtcaccttacatgagggtgaggaaggagaagcccagccagcctctacccatccctccctcccaattaggctgcactggggccgaacgcttccctgggctcccactgccttctaaggagccaaggagaattccctgcccactttctgttcctccatgcccaaactggcagatgcttctctgggagcaaggccacatgggctgatgcagctttgagtgctcaggttctgttttctggaagttgctggagaagggctgtcagggtgcttctatgaatatgggcttcagctgtagcacttggcagaaacgtgatgtgtcccacaaactgctggtggaggaagaagatgttcgtcagccaattcaacctccagccagcttcttgagcctatttggtttaaaaaaaaaaagtcttctaatcagaagccactgattttataataaataacacttgttttgaa

SEQ ID NO: 276895 - DNA, 2806 bp, Homo sapiens
ccacgcgtccggccgcctcctagcggcccgggccgcgaccacgctgcccgccccgccccgagcccggggccccgcgctccgctgcagtgaagggcgttgcatttcccggggtaccccgagctgccctcttgtgactccttggcggggcggctggtcagacaaagtgtgcctccgggccggagggcgacccagaggagggggaagatgccgccggccacgggcggaggcctggcagagtccgagctgcgtccccggaggggccgctgtggcccccaggctgctagggccgcaggccgggacgtggccgctgaggctgtggcgcgaagccccaaacggcctgcttggggctcacggcgcttcgaggcggtcggctggtgggccctgctggccttggtgacgctgctgtccttcgccacccgcttccaccgcttggacgagccgccgcacatctgttgggatgagactcactttggaaaaatgggaagttactatatcaaccgtacatttttctttgatgtgcacccgcccctgggaaagatgctgataggtcttgctggctacctgagtggatatgatggtacctttttgttccagaagcctggggataaatatgagcatcacagctacatgggaatgagaggattctgtgcattccttggctcctggctggtcccctttgcctacctcactgtactggatctgtccaagtccctctcggcagcactgctcacagctgccctcctcacctttgacacgggatgcctcactctgtcccagtacatcctccttgaccccatcctgatgttcttcatcatggctgccatgctgagcatggtcaagtacaactcttgcgccgacaggcccttctctgccccctggtggttctggctcagcctgactggcgttagtcttgctggtgctttaggggtcaagtttgttggcctctttatcatccttcaagtggggctgaacaccattgcagacctttggtacctgttcggagacctcagtctttcattggtgactgtgggaaaacacctgactgctcgtgtcctgtgcctcatagtgctgcccctggctctctatacagccacctttgctgttcacttcatggtgctgagtaaaagtggccctggtgacggtttcttcagttctgccttccaggcccggctttcagggaacaacctgcacaatgcttccatccctgaacacctggcctacggctctgtgatcactgtgaagaacctccggatggccatcggctatctgcactcccacaggcacctctaccccgagggcattggtgcccgtcagcagcaggtcaccacctatttgcacaaggactacaacaacctgtggattatcaagaaacataacacaaactcagatcccctagacccttccttcccagtggagtttgtaagacatggagacattattcgactagaacacaaagaaacttcccggaacttgcacagtcactatcatgaggcccccatgacccggaagcactatcaggtcaccggctatggcataaatggaacaggggactcaaatgatttctggcggattgaggtcgtaaacagaaaatttggaaaccggatcaaagtgctgagaagtcgaattcgcttcatccatttggtcacaggttgtgtcctgggctcctcgggaaaggttctgcccaagtggggctgggagcagttggaagttacttgcaccccatacctgaaagaaaccctcaactccatctggaatgtggaggaccatatcaatcccaagttgccaaacatcagcctggatgtgctacagcccagttttcctgagatcttgctggaatcccacatggtcatgatccgggggaacagtggcctcaaacccaaggacaatgagttcacgtccaaaccctggcactggcctatcaactatcagggcctacgcttctcaggggtcaatgacacagatttccgagtctatctgcttggcaacccggtggtttggtggctgaatctgttgagcatcgccctctacctcctctcagggagcatcattgctgtagccatgcagagaggggcacggctgccagcggaggttgcagggttgtcccaggtcctgctgcgaggaggcggccaggtcctgctcggctggacactccattacttcccgtttttcctgatgggccgggtcctctacttccaccactacttcccagccatgctcttctcaagcatgttgacaggcattctgtgggacaccctcctgcggctctgtgcctggggcttggcctcatggcccctggcgaggggcatacatgtggcgggaatcctgagcctgctcctgggaactgcctacagcttctacctcttccaccctctggcttacgggatggttggtcccctggcccaggacccccaaagtccaatggcaggactaaggtggctggactcatgggacttttgaggccactgcaaagattccagcctgggtccaggaacttcccaggagagccagctgggaagcagtactggaccatccggccatgaggaagctgcctaaggagcccgaagaattctgctgctcaccaggacccagctctgggagtgcagctggaatggaacccagcattggagagagccgggagagagccgcagctccgtccacagcaccacggagaggacagcgcctcttgggctgctccctcgtgcacagcgcaggggaggatgggtgccagagggtgggagtgggtgcgcgtgtgtgtatgtgagggcatgttgtccatatccctgtggaatacagaccgtgtaactgg

SEQ ID NO: 276896 - DNA, 2317 bp, Homo sapiens
ccacgcgtccggccgcctcctagcggcccgggccgcgaccacgctgcccgccccgccccgagcccggggccccgcgctccgctgcagtgaagggcgttgcatttcccggggtaccccgagctgccctcttgtgactccttggcggggcggctggtcagacaaagtgtgcctccgggccggagggcgacccagaggagggggaagatgccgccggccacgggcggaggcctggcagagtccgagctgcgtccccggaggggccgctgtggcccccaggctgctagggccgcaggccgggacgtggccgctgaggctgtggcgcgaagccccaaacggcctgcttggggctcacggcgcttcgaggcggtcggctggtgggccctgctggccttggtgacgctgctgtccttcgccacccgcttccaccgcttggacgagccgccgcacatctgttgggatgagactcactttggaaaaatgggaagttactatatcaaccgtacatttttctttgatgtgcacccgcccctgggaaagatgctgataggtcttgctggctacctgagtggatatgatggtacctttttgttccagaagcctggggataaatatgagcatcacagctacatgggaatgagaggattctgtgcattccttggctcctggctggtcccctttgcctacctcactgtactggatctgtccaagtccctctcggcagcactgctcacagctgccctcctcacctttgacacgggatgcctcactctgtcccagtacatcctccttgaccccatcctgatgttcttcatcatggctgccatgctgagcatggtcaagtacaactcttgcgccgacaggcccttctctgccccctggtggttctggctcagcctgactggcgttagtcttgctggtgctttaggggtcaagtttgttggcctctttatcatccttcaagtggggctgaacaccattgcagacctttggtacctgttcggagacctcagtctttcattggtgactgtgggaaaacacctgactgctcgtgtcctgtgcctcatagtgctgcccctggctctctatacagccacctttgctgttcacttcatggtgctgagtaaaagtggccctggtgacggtttcttcagttctgccttccaggcccggctttcagggaacaacctgcacaatgcttccatccctgaacacctggcctacggctctgtgatcactgtgaagaacctccggatggccatcggctatctgcactcccacaggcacctctaccccgagggcattggtgcccgtcagcagcaggtcaccacctatttgcacaaggactacaacaacctgtggattatcaagaaacataacacaaactcagatcccctagacccttccttcccagtggagtttgtaagacatggagacattattcgactagaacacaaagaatgtccacttaaaaaaatctggcgatgggagcagaaagaaacttcccggaacttgcacagtcactatcatgaggcccccatgacccggaagcactatcaggtcaccggctatggcataaatggaacaggggactcaaatgatttctggcggattgaggtcgtaaacagaaaatttggaaaccggatcaaagtgctgagaagtcgaattcgcttcatccatttggtcacaggttgtgtcctgggctcctcgggaaaggttctgcccaagtggggctgggagcagttggaagttacttgcaccccatacctgaaagaaaccctcaactccatctggaatgtggaggaccatatcaatcccaagttgccaaacatcagcctggatgtgctacagcccagttttcctgagatcttgctggaatcccacatggtcatgatccgggggaacagtggcctcaaacccaaggacaatgagttcacgtccaaaccctggcactggcctatcaactatcagggcctacgcttctcaggggtcaatgacacagatttccgagtctatctgcttggcaacccggtggtttggtggctgaatctgttgagcatcgccctctacctcctctcagggagcatcattgctgtagccatgcagagaggggcacggctgccagcggaggttgcaggtcaggtcctctgggctctccctcccctgacctggcggcagcagggcacctgcgcccctggggagggccggctgcctgctgatgggccatcctttgcgtttacaacccaaacttcccttatccttgcttttgaaaggtaacaaccccagtacccgtgctgggtaacaacactttacttcctcc

SEQ ID NO: 276897 - DNA, 479 bp, Homo sapiens
cactcatgaccaccttgctcccaccttgctcccaccttgctccccagttctcagatggtgccttcctgggtgtaaccacgctgaaacacgtccatttggagaacaaccgcttgaaccagctaccctccaacttccccttcgacagcctggagaccctcgcccttaccaataacccctggaagtgtacctgccagctccggggccttcggcggtaagaacacttccatgtcactcccagagcccaccctcatgtgatagaggcacattagccctgcactaagacatgttggacatgcatcctagatctgctacctaataagcatgggaccctgggagcctcagtttccccatttgtaaaatgaagatgacagcttcagactatcctgtggccaagtcaatcctggccccatagttcactgcccttccccccagcactcccaccttcttccccagccccagcaagtttctgtctctccagg

SEQ ID NO: 276898 - DNA, 612 bp, Homo sapiens
cttaccaataacccctggaagtgtacctgccagctccggggccttcggcggtaagaacacttccatgtcactcccagagcccaccctcatgtgatagaggcacattagccctgcactaagacatgttggacatgcatcctagatctgctacctaataagcatgggaccctgggagcctcagtttccccatttgtaaaatgaagatgacagcttcagactatcctgtggccaagtcaatcctggccccatagttcactgcccttccccccagcactcccaccttcttccccagccccagcaagtttctgtctctccaggtggctggaagccaaggcctcccgcccagatgccacctgtgcctcacctgccaagttcaagggccagcacatccgtgacacggacgccttccgcagctgcaagttccccaccaagaggtccaagaaagctggccgccattaaacaggtgggggccaggtaaacaggtcccctatgtccctctttggtgattccagcaagtgagctggtatcttccaggataccccctggccctggagggtcaggcagaccctccatttttacagagagaggaggggacgactgggtcccctgttg

SEQ ID NO: 276899 - DNA, 1806 bp, Homo sapiens
tcgatgctccacgtaggagctggctcggctgccggctgcggtcagggccaccgtataaagagggcggcagacccgagcgcctaggactcgccgctgcccgcgccccgccgccgctgctgcccccagccccggccccaggcgtcccagccatggtccgcccaatgctcttgctcagcctcggcctcctggctggtctgctgccggcgctggccgcctgcccccagaactgccactgccacagcgacctgcagcacgtcatctgcgacaaggtggggctgcagaagatccccaaggtgtcagagaagaccaagctgctcaacctacagcgcaacaacttcccggtgctggctgccaattcgttccgggccatgccgaacctcgtgtcattgcacctgcagcactgccagatccgcgaggtggccgccggtgccttccgcggcctcaagcaacttatctacttgtacctgtcccataacgacatccgcgtgctgcgcgcaggtgccttcgacgacctgaccgagctgacctacctctacctggaccacaacaaggtcactgagctgccccgggggttgctctccccgctggtcaacctcttcatcttgcagctcaacaacaacaagatccgtgagctgcgcgcaggcgccttccagggagccaaggacctgcgctggctctacctgtcggaaaacgcgttgagctccctgcagcccggggccctggacgacgtggagaacctcgccaaattccacgtggacaggaaccagctgtccagctacccctcagctgccctgagcaagctacgggtggtggaggagctgaagctgtcccacaaccccctgaaaagcatcccggacaatgccttccagtcctttggcagatacctggagaccctctggctggacaacaccaacctggagaagttctcagatggtgccttcctgggtgtaaccacgctgaaacacgtccatttggagaacaaccgcttgaaccagctaccctccaacttccccttcgacagcctggagaccctcgcccttaccaataacccctggaagtgtacctgccagctccggggccttcggcggtggctggaagccaaggcctcccgcccagatgccacctgtgcctcacctgccaagttcaagggccagcacatccgtgacacggacgccttccgcagctgcaagttccccaccaagaggtccaagaaagctggccgccattaaacaggtgggggccaggttctgacccagccagtcctggtgactggcctctgccttccaccggagagactactgaccttctcacctccacccataccttctccccacagcctctgctgatgcacagagctgcctacacctagacacgtcctggcagggggcctcgggcactccactaccaacccagctccacccagcagtgtcctggggagaaggaaggctgagcctctccccagccttcatgccttccccaccctccagctcctcttggagaagctgttgctgagacacccccccccaagtcaatcagaaccacaacaggttggtcatcaggatggccaccctcccaggatcatccttcctctgttcctctttccctgccacgtggaaacaatcatcagatccttgccccaccccttgcttccagaaagggttttaaagcccatgccccaactctgccagcccccacctgccaggacgttctagcaggacatcggtgctttgctgtccatcttcccatgctgcaatttcttcctgagatttctataaatataaatgtatgtatgtattaaatttactc

SEQ ID NO: 276900 - DNA, 690 bp, Homo sapiens
tgagtgtgaagtgttgaacagcggctcagggaggccaaccagggtccagcaaaccccgtccctgctgcctccattggtccagagctggtacccgcagccagcatgacactcacccagtcccagacattgtgggtcaacagagagaaattcagatagctaagagaatggaagcggacaaaggaggcacaggaggattccatgccagagtctgaattggtcacccccattcaggctctgcctgaggaaaggagaatggggtccgggcacagtcagctggatggagcgtctgaagacggcttgcaccagagccctccgtggctgaagggagaagctagggggtgagtcagccccagggcttgatggaacagacaggaactagatgatctaggaagggagaaatgaggctgagcaggagacagcccaggctccctggctgccactacctaatctgtcccccttcacacacatcccacacacagtgtttagacagagcagcagagaagaaacagacatcctggatcccacagggagcaggctggggctgggaacaggaggtctgtttattcctggaagtcacatatcagaagggtcccacacccacttctgtccaggccccaggctgaactctcccagagcctgtgacttctgcccgaccagatcccgtggttctgaggaccggccctggaaccc

SEQ ID NO: 276901 - DNA, 692 bp, Homo sapiens
tatacaaaaaccttttattgactgtatttcttctccccataacctggaacccagccagcatctatggcttcctgctgtctgattcttgaaagtggggccttgggaacatgtttggaggctatggaaggtggggttttctgagtctactgggtagactcagacaatcaatccaaaaactttagaaagggctaagctccacagcactgatctcaaccctgggtgctcattagaatcaactggggagcttttaatagctactgatgcctgggacccaccctagacaattaaattgaatctctggggcagagactcaggcatcactgtggtttaaagcatcccagactggaagccggaacctttacggaagagcctgaagcagtcagggcttggactagcatccattttagcgactgtccttgtaacagtgggtactgcgcttctctcagcagtagcaatgtcttactctctccaatccatcctcattatgacacaaaaaagcacaggcaaaaactagccaacattagcaggtcattaacctatcacagagaggtaactagtcctgtgccaggatctaaagcaggctctgcaggagagcacacagaattagagggcaacttagtgtcagtcagagaagacgaagctgaactggctgcttaacagtcacacatgcaccagctgggcaaccaaggggg

SEQ ID NO: 276902 - DNA, 406 bp, Homo sapiens
tatacaaaaaccttttattgactgtatttcttctccccataacctggaacccagccagcatctatggcttcctgctgtctgattcttgaaagtggggccttgggaacatgtttggaggctatggaaggtgggaatctcctcacccaccggctatgcaggttgaaggaagctttcttgcctggctgaagctacggcagcttcccagggtagcccctcaagtctagaggacccatcccccactaaatgggtgtgaggaagagatgatgcatctttcagaggctttgtcactcactgctcctatcccactccagactgaggccctagagctgaaccagtctctcctgtggagatggggcccagcagcgaggggagggggttagaggtgagtgtgtgcagcagctctggg

SEQ ID NO: 276903 - DNA, 2596 bp, Homo sapiens
gtaatccgagctactcaggagctgaggcagaagaaccccttgaacccgggaggcggaggtttcagtgagccgagatcgcgccactgcactcctgcctgggacacaatgcgtgactccgtctcaaaataaaaataatcgttagatcaatgagtgcgggaattctaaaaggggtctggaactctcgcaaggttgtggatcactacacctgaagcttaaggggaatgaaatcggtgagaaatgagggtcctacagcccgggccgaagtgacaggtccacccctagtgactccaacaggtgaggagcacccccgacccgcctccctcggcactaaagcgggacgatagggcgcagggctccacccggaagcctcgccataatgtccgcgggcgggccggggcgaggagaaggtgggaagccgtggccgcaggttccgggaggggtcagccgtcctgggcaaggtcaggcccgacttccccggctgaggccgctgcgacccggccctgcaggctccaggcggcagagcaaggggagcgccctagcggggccccagggtccgggccgcctcacctgcaggtgaacttgagggcgaggagcagcgcgcagccgagcgccacggccccgcagagcagctcgggccgctggcgcgccatgaggaaggcgccacgcagcccgcgacggagccggcctgccgaggacgctgtggccagggtcgggctcgagctgaggcagtctgagcccgcggagccgccgccgccccctccctcgtcctcggcgtcctcgctgctgctgctgccgccgccgcggcctccgcattccgacattacatgctcccagtcgccggctttataccgccgccgccgcctcgggcccgaaggcccggcccggcccgttgctccccaatcccgcagctcgccgcacccgctaacccggacgctccacgtcagccgcgccgccgccgcggggtccgccccacctcactccccagagcacgcagctccgcccaccgctcacggagtccgggcgggcaccgacaccgcccaaatccccgcccccaacgggccacgccctgcaccctacgtaaatgcacggaagccttccccgcccgcagcccagtcttggccccaccggtcacgaccccgctcacggagtctgcgcaggcgccgtcgcggggcgtggagaagctgctcccttgggataaggcccgcggggaatacttggaaccttgacaccgctgtagtctgctctcgccgcgctgggttttaggagccgtaacgacaataatcgtgtccaccattctcactacaggccccgaagcacgtaggtgccgttttttatcccaacttaactgaagaaaaaaaacacggccgggcgcggtggctcaagcctgtaatcccagcacgttgggaggccaaggcgggcagattacatgagaccaggcgttcaagaccagcctggccaacatggtgaaacctcgtctctactaaaaatacaaatatattagccgggcgtggtggcgggcgcctgtaatcctagctgcttgggaggctgaggcagagaattgcttgaaccctggaggcggaggttgcagtgagtggagatggcgccactgcactcccgtctgggggagagagagagagagactcttgtctcaaaaaaaaaaaaaaggacttgtcctccaatgtcaataacaacaaactagacaaataaaacttcgagggcattaaggcaatatggtgttatgccacaaacagaaggcacagctaacggccagtagctgagacgccacctctgccacaggtcagctatgtgacccacgtgcaaatctcatcacttcctgtctggttctgcttctgtggatgtagaatggggcaatcaatggctgtcttgctcaattggccagacatttaatgtgtcagccacccaggcccaacatgttgtgagttcgtgtacaccgaccattttgctatttcttttctatatgtcacttttttttttttggttgttttttgatacagggtcttgtgtcacccaggctggagtgcaatggcgcaatcatagcacactgaagccttgacaaccccagctcaagcgatccacccccctcagcctcccaagtagtaggcaacacagatgtgtgcgactacgcccagctaatttttttttttttgtggagacaaggtctctccatgttgcctaggctggtcttgaactcctgggctcaagcgatcttcccccttcgacctcccaaagcgttaggattatgtaaaagcatgagtcactgcgcccacctgtcacatctttttgtttcttctatactgccttattttgtagaaagtagctattttctcgtataacattaattcctttatttttaacttgtccctcatctctgttttgtgttattattacccttattatctatgttacaaacccaaccatacagtgctaatcttgttttaaaaagctgagaaaaaatatatagttacagagtttttttaaccttctaatttgccacttatacttctgattgattcctttgtgtagattagagttacacaatttattgctaaagaaaataaatatgatcaaaagtcat

SEQ ID NO: 276904 - DNA, 6022 bp, Homo sapiens
atccatggcacggagcggcggcggcggcggcagcaggagcccggcgcgatccgctaggtcccagcccagcgcccagcgagcaggcgacgcggaggggccgggcctccagtgtcccgagggccgggcgctgagactccggccgcgcagctgggagctgcccgcgctgcgctgacagccgcgccgacgtcctccccgccggggcgctcgcaggacatgcccccggggcgcggcggcggggaccccggggctcgcctccgcccagggcccccctccacgccctcgggagccccgggcccccgctgagcactcctcccgcacgcctgggtccctccggccggcgcgcagcccggccccagcgctgtgggtccccgcggggcgatgggttgatgggcgccgggggacgcaggatgcggggggcgcccgcgcgcctgctgctgccgctgctgccgtggctcctgctgctcctggcgcccgaggctcggggcgcgcccggctgcccgctatccatccgcagctgcaagtgctcgggggagcggcccaaggggctgagcggcggcgtccctggcccggctcggcggagggtggtgtgcagcggcggggacctcccggagcctcccgagcccggccttctgcctaacggcaccgttaccctgctcttgagcaataacaagatcacggggctccgcaatggctccttcctgggactgtcactgctggagaagctggacctgaggaacaacatcatcagcacagtgcagccgggcgccttcctgggcctgggggagctgaagcgtttagatctctccaacaaccggattggctgtctcacctccgagaccttccagggcctccccaggcttctccgactaaacatatctggaaacatcttctccagtctgcaacctggggtctttgatgagctgccagcccttaaggttgtggacttgggcaccgagttcctgacctgtgactgccacctgcgctggctgctgccctgggcccagaatcgctccctgcagctgtcggaacacacgctctgtgcttaccccagtgccctgcatgctcaggccctgggcagcctccaggaggcccagctctgctgcgagggggccctggagctgcacacacaccacctcatcccgtccctacgccaagtggtgttccagggggatcggctgcccttccagtgctctgccagctacctgggcaacgacacccgcatccgctggtaccacaaccgagcccctgtggagggtgatgagcaggcgggcatcctcctggccgagagcctcatccacgactgcaccttcatcaccagtgagctgacgctgtctcacatcggcgtgtgggcctcaggcgagtgggagtgcaccgtgtccatggcccaaggcaacgccagcaagaaggtggagatcgtggtgctggagacctctgcctcctactgccccgccgagcgtgttgccaacaaccgcggggacttcaggtggccccgaactctggctggcatcacagcctaccagtcctgcctgcagtatcccttcacctcagtgcccctgggcgggggtgccccgggcacccgagcctcccgccggtgtgaccgtgccggccgctgggagccaggggactactcccactgtctctacaccaacgacatcaccagggtgctgtacaccttcgtgctgatgcccatcaatgcctccaatgcgctgaccctggctcaccagctgcgcgtgtacacagccgaggccgctagcttttcagacatgatggatgtagtctatgtggctcagatgatccagaaatttttgggttatgtcgaccagatcaaagagctggtagaggtgatggtggacatggccagcaacctgatgctggtggacgagcacctgctgtggctggcccagcgcgaggacaaggcctgcagccgcatcgtgggtgccctggagcgcattgggggggccgccctcagcccccatgcccagcacatctcagtgaatgcgaggaacgtggcattggaggcctacctcatcaagccgcacagctacgtgggcctgacctgcacagccttccagaggagggagggaggggtgccgggcacacggccaggaagccctggccagaaccccccacctgagcccgagcccccagctgaccagcagctccgcttccgctgcaccaccgggaggcccaatgtttctctgtcgtccttccacatcaagaacagcgtggccctggcctccatccagctgcccccgagtctattctcatcccttccggctgccctggctcccccggtgcccccagactgcaccctgcaactgctcgtcttccgaaatggccgcctcttccacagccacagcaacacctcccgccctggagctgctgggcctggcaagaggcgtggcgtggccacccccgtcatcttcgcaggaaccagtggctgtggcgtgggaaacctgacagagccagtggccgtttcgctgcggcactgggctgagggagccgaacctgtggccgcttggtggagccaggaggggcccggggaggctgggggctggacctcggagggctgccagctccgctccagccagcccaatgtcagcgccctgcactgccagcacttgggcaatgtggccgtgctcatggagctgagcgcctttcccagggaggtggggggcgccggggcagggctgcaccccgtggtatacccctgcacggccttgctgctgctctgcctcttcgccaccatcatcacctacatcctcaaccacagctccatccgtgtgtcccggaaaggctggcacatgctgctgaacttgtgcttccacatagccatgacctctgctgtctttgcggggggcatcacactcaccaactaccagatggtctgccaggcggtgggcatcaccctgcactactcctccctatccacgctgctctggatgggcgtgaaggcgcgagtgctccataaggagctcacctggagggcaccccctccgcaagaaggggaccccgctctgcctactcccagtcctatgctccggttctatttgatcgctggagggattccactcattatctgtggcatcacagctgcagtcaacatccacaactaccgggaccacagcccctactgctggctggtgtggcgtccaagccttggcgccttctacatccctgtggctttgattctgctcatcacctggatctatttcctgtgcgccgggctacgcttacggggtcctctggcacagaaccccaaggcgggcaacagcagggcctccctggaggcaggggaggagctgaggggttccaccaggctcaggggcagcggccccctcctgagtgactcaggttcccttcttgctactgggagcgcgcgagtggggacgcccgggcccccggaggatggtgacagcctctattctccgggagtccagctaggggcgctggtgaccacgcacttcctgtacttggccatgtgggcctgcggggctctggcagtgtcccagcgctggctgccccgggtggtgtgcagctgcttgtacggggtggcagcctccgccctgggcctcttcgtcttcactcaccactgtgccaggcggagggacgtgagagcctcgtggcgcgcctgctgcccccctgcctctcccgcggccccccatgccccgccccgggccctgcccgccgccgcagaggacggttccccggtgttcggggaggggcccccctccctcaagtcctccccaagcggcagcagcggccatccgctggctctgggcccctgcaagctcaccaacctgcagctggcccagagtcaggtgtgcgaggcgggggcggcggccggcggggaaggagagccggagccggcgggcacccggggaaacctcgcccaccgccaccccaacaacgtgcaccacgggcgtcgggcgcacaagagccgggccaagggacaccgcgcgggggaggcctgcggcaagaaccggctcaaggccctgcgcgggggcgcggcgggggcgctggagctgctgtccagcgagagcggtagtctgcacaacagccccaccgacagctacctgggcagcagccgcaacagcccgggcgccggcctgcagctggaaggcgagcccatgctcacgccgtccgagggcagcgacaccagcgccgcgccgctttctgaggcgggccgggcaggccagcgccgcagcgccagccgcgacagtctcaagggcggcggcgcgctggagaaggagagccatcgccgctcgtacccgctcaacgccgccagcctaaacggcgcccccaaggggggcaagtacgacgacgtcaccctgatgggcgcggaggtagccagcggcggctgcatgaagaccggactctggaagagcgaaactaccgtctaaggtggggcgggcgacgcggtagacgggctggccacgcggctcgttcccccgctcctcggggccctccaaggtgtctccgtagtcagcaggttggaggcagaggagccgatggctggaggaagcccacaggcggatgttccccacttgcctagagggcatccctctggggtagcgacagacaatcccagaaacacgcataatacatttccgtccagcccggggcagtctgactgtcggtgccctcccaggaacggggaaggcctccgtctgtgtgaaagggcacagcacatcccaggtgcaccctccccaagtactcccaccccgcctactgtccatgcggcctcactgggggccatcagcctcaccagcaaagcagagatgagagcgtgggaactgtgttctttcctccctgccctctactgatttcagcccagcccctgcctagatcctaggtcccttttcctcccgagtttggctggcacgagagctagcccagcacatgaagcaggtgatgttaagtcacaaggtgctgcttttcagatccactatgcaagaggggagggtggggccacgtgaaaggcagctctagacatcaaccagtcctgggggaggggagtgggaaccgggcacaactaggaacaatgccaccattcccacaggagtggtacttaaaccagacagcagggttcagaggtggcacaccgggacaaagctgaggccctgcacctcaacagctgactgccaggtgcctgtgggtgaactgaggggagtagagggagagggcaggtggaactggggcagaatctagtcatgccctaaagctagtcctgtaaacaatggtgccccagaaagctgcaggtggtgtttggagaagcagttacttttcagttacaagacccatctccctagtctcagccttacaacaccacgggactaaggaagagcacttccttgcctccgtaaggccagaggaagaaccatcccaatcatttgatctccagctccacagtagagagaaacctacaaaatgtcaaaccagcttcccgactcccaggagctcaagccaagcccagaggcagtggctggggtccctgcaggtcatgaggggcctatgcctttactccttttaaacaccagcacccgtcttttccccaacctaaaaccaaccaccagcatttcactacaggaccaaatggaaaccgagggaaccctgggtcttgggaagaacaacaggaaaccaaggtctgacctagggttccctcccagtcttcacatcactctggcctcatcaccaaggtgacagaggacacaggggagggggaaaacccacacacactccttggaatgggtcctgttatttatgcttgctgcacagacatattagaagaaaaaaaaaagctttgtattattcttccacatatgctggctgctgtttacacaccctgccaatgccttagcactggagagctttttgcaatatgctggggaaaggggagggagggaatgaaagtgccaaagaaaacatgtttttaagaactcgggttttatacaatagaatgttttctagcagatgcctcttgttttaatatattaaaattttgcaaagccctttgagctac

SEQ ID NO: 276905 - DNA, 2062 bp, Homo sapiens
atccatggcacggagcggcggcggcggcggcagcaggagcccggcgcgatccgctaggtcccagcccagcgcccagcgagcaggcgacgcggaggggccgggcctccagtgtcccgagggccgggcgctgagactccggccgcgcagctgggagctgcccgcgctgcgctgacagccgcgccgacgtcctccccgccggggcgctcgcaggacatgcccccggggcgcggcggcggggaccccggggctcgcctccgcccagggcccccctccacgccctcgggagccccgggcccccgctgagcactcctcccgcacgcctgggtccctccggccggcgcgcagcccggccccagcgctgtgggtccccgcggggcgatgggttgatgggcgccgggggacgcaggatgcggggggcgcccgcgcgcctgctgctgccgctgctgccgtggctcctgctgctcctggcgcccgaggctcggggcgcgcccggctgcccgctatccatccgcagctgcaagtgctcgggggagcggcccaaggggctgagcggcggcgtccctggcccggctcggcggagggtggtgtgcagcggcggggacctcccggagcctcccgagcccggccttctgcctaacggcaccgttaccctgctcttgagcaataacaagatcacggggctccgcaatggctccttcctgggactgtcactgctggagaagctggacctgaggaacaacatcatcagcacagtgcagccgggcgccttcctgggcctgggggagctgaagcgtttagatctctccaacaaccggattggctgtctcacctccgagaccttccagggcctccccaggcttctccgactaaacatatctggaaacatcttctccagtctgcaacctggggtctttgatgagctgccagcccttaaggttgtgtgagtatctcttcctagctcaaggacccagacccctgtccctttctctgcccaggagagatgtataagtatcatgaccaccaggactggtctcacgagtggccacagcagacagtgcctgaaatgcccccatgatcaccttcccgcgatggcccggggcagagatggtacttaaaccagacagcagggttcagaggtggcacaccgggacaaagctgaggccctgcacctcaacagctgactgccaggtgcctgtgggtgaactgaggggagtagagggagagggcaggtggaactggggcagaatctagtcatgccctaaagctagtcctgtaaacaatggtgccccagaaagctgcaggtggtgtttggagaagcagttacttttcagttacaagacccatctccctagtctcagccttacaacaccacgggactaaggaagagcacttccttgcctccgtaaggccagaggaagaaccatcccaatcatttgatctccagctccacagtagagagaaacctacaaaatgtcaaaccagcttcccgactcccaggagctcaagccaagcccagaggcagtggctggggtccctgcaggtcatgaggggcctatgcctttactccttttaaacaccagcacccgtcttttccccaacctaaaaccaaccaccagcatttcactacaggaccaaatggaaaccgagggaaccctgggtcttgggaagaacaacaggaaaccaaggtctgacctagggttccctcccagtcttcacatcactctggcctcatcaccaaggtgacagaggacacaggggagggggaaaacccacacacactccttggaatgggtcctgttatttatgcttgctgcacagacatattagaagaaaaaaaaaagctttgtattattcttccacatatgctggctgctgtttacacaccctgccaatgccttagcactggagagctttttgcaatatgctggggaaaggggagggagggaatgaaagtgccaaagaaaacatgtttttaagaactcgggttttatacaatagaatgttttctagcagatgcctcttgttttaatatattaaaattttgcaaagccctttgagctac

SEQ ID NO: 276906 - DNA, 7062 bp, Homo sapiens
atccatggcacggagcggcggcggcggcggcagcaggagcccggcgcgatccgctaggtcccagcccagcgcccagcgagcaggcgacgcggaggggccgggcctccagtgtcccgagggccgggcgctgagactccggccgcgcagctgggagctgcccgcgctgcgctgacagccgcgccgacgtcctccccgccggggcgctcgcaggacatgcccccggggcgcggcggcggggaccccggggctcgcctccgcccagggcccccctccacgccctcgggagccccgggcccccgctgagcactcctcccgcacgcctgggtccctccggccggcgcgcagcccggccccagcgctgtgggtccccgcggggcgatgggttgatgggcgccgggggacgcaggatgcggggggcgcccgcgcgcctgctgctgccgctgctgccgtggctcctgctgctcctggcgcccgaggctcggggcgcgcccggctgcccgctatccatccgcagctgcaagtgctcgggggagcggcccaaggggctgagcggcggcgtccctggcccggctcggcggagggtggtgtgcagcggcggggacctcccggagcctcccgagcccggccttctgcctaacggcaccgttaccctgctcttgagcaataacaagatcacggggctccgcaatggctccttcctgggactgtcactgctggagaagctggacctgaggaacaacatcatcagcacagtgcagccgggcgccttcctgggcctgggggagctgaagcgtttagatctctccaacaaccggattggctgtctcacctccgagaccttccagggcctccccaggcttctccgactaaacatatctggaaacatcttctccagtctgcaacctggggtctttgatgagctgccagcccttaaggttgtggacttgggcaccgagttcctgacctgtgactgccacctgcgctggctgctgccctgggcccagaatcgctccctgcagctgtcggaacacacgctctgtgcttaccccagtgccctgcatgctcaggccctgggcagcctccaggaggcccagctctgctgcgagggggccctggagctgcacacacaccacctcatcccgtccctacgccaagtggtgttccagggggatcggctgcccttccagtgctctgccagctacctgggcaacgacacccgcatccgctggtaccacaaccgagcccctgtggagggtgatgagcaggcgggcatcctcctggccgagagcctcatccacgactgcaccttcatcaccagtgagctgacgctgtctcacatcggcgtgtgggcctcaggcgagtgggagtgcaccgtgtccatggcccaaggcaacgccagcaagaaggtggagatcgtggtgctggagacctctgcctcctactgccccgccgagcgtgttgccaacaaccgcggggacttcaggtggccccgaactctggctggcatcacagcctaccagtcctgcctgcagtatcccttcacctcagtgcccctgggcgggggtgccccgggcacccgagcctcccgccggtgtgaccgtgccggccgctgggagccaggggactactcccactgtctctacaccaacgacatcaccagggtgctgtacaccttcgtgctgatgcccatcaatgcctccaatgcgctgaccctggctcaccagctgcgcgtgtacacagccgaggccgctagcttttcagacatgatggatgtagtctatgtggctcagatgatccagaaatttttgggttatgtcgaccagatcaaagagctggtagaggtgatggtggacatggccagcaacctgatgctggtggacgagcacctgctgtggctggcccagcgcgaggacaaggcctgcagccgcatcgtgggtgccctggagcgcattgggggggccgccctcagcccccatgcccagcacatctcagtgaatgcgaggaacgtggcattggaggcctacctcatcaagccgcacagctacgtgggcctgacctgcacagccttccagaggagggagggaggggtgccgggcacacggccaggaagccctggccagaaccccccacctgagcccgagcccccagctgaccagcagctccgcttccgctgcaccaccgggaggcccaatgtttctctgtcgtccttccacatcaagaacagcgtggccctggcctccatccagctgcccccgagtctattctcatcccttccggctgccctggctcccccggtgcccccagactgcaccctgcaactgctcgtcttccgaaatggccgcctcttccacagccacagcaacacctcccgccctggagctgctgggcctggcaagaggcgtggcgtggccacccccgtcatcttcgcaggaaccagtggctgtggcgtgggaaacctgacagagccagtggccgtttcgctgcggcactgggctgagggagccgaacctgtggccgcttggtggagccaggaggggcccggggaggctgggggctggacctcggagggctgccagctccgctccagccagcccaatgtcagcgccctgcactgccagcacttgggcaatgtggccgtgctcatggagctgagcgcctttcccagggaggtggggggcgccggggcagggctgcaccccgtggtatacccctgcacggccttgctgctgctctgcctcttcgccaccatcatcacctacatcctcaaccacagctccatccgtgtgtcccggaaaggctggcacatgctgctgaacttgtgcttccacatagccatgacctctgctgtctttgcggggggcatcacactcaccaactaccagatggtctgccaggcggtgggcatcaccctgcactactcctccctatccacgctgctctggatgggcgtgaaggcgcgagtgctccataaggagctcacctggagggcaccccctccgcaagaaggggaccccgctctgcctactcccagtcctatgctccggttctatttgatcgctggagggattccactcattatctgtggcatcacagctgcagtcaacatccacaactaccgggaccacagcccctactgctggctggtgtggcgtccaagccttggcgccttctacatccctgtggctttgattctgctcatcacctggatctatttcctgtgcgccgggctacgcttacggggtcctctggcacagaaccccaaggcgggcaacagcagggcctccctggaggcaggggaggagctgaggggttccaccaggctcaggggcagcggccccctcctgagtgactcaggttcccttcttgctactgggagcgcgcgagtggggacgcccgggcccccggaggatggtgacagcctctattctccgggagtccagctaggggcgctggtgaccacgcacttcctgtacttggccatgtgggcctgcggggctctggcagtgtcccagcgctggctgccccgggtggtgtgcagctgcttgtacggggtggcagcctccgccctgggcctcttcgtcttcactcaccactgtgccaggcggagggacgtgagagcctcgtggcgcgcctgctgcccccctgcctctcccgcggccccccatgccccgccccgggccctgcccgccgccgcagaggacggttccccggtgttcggggaggggcccccctccctcaagtcctccccaagcggcagcagcggccatccgctggctctgggcccctgcaagctcaccaacctgcagctggcccagagtcaggtgtgcgaggcgggggcggcggccggcggggaaggagagccggagccggcgggcacccggggaaacctcgcccaccgccaccccaacaacgtgcaccacgggcgtcgggcgcacaagagccgggccaagggacaccgcgcgggggaggcctgcggcaagaaccggctcaaggccctgcgcgggggcgcggcgggggcgctggagctgctgtccagcgagagcggtagtctgcacaacagccccaccgacagctacctgggcagcagccgcaacagcccgggcgccggcctgcagctggaaggcgagcccatgctcacgccgtccgagggcagcgacaccagcgccgcgccgctttctgaggcgggccgggcaggccagcgccgcagcgccagccgcgacagtctcaagggcggcggcgcgctggagaaggagagccatcgccgctcgtacccgctcaacgccgccagcctaaacggcgcccccaaggggggcaagtacgacgacgtcaccctgatgggcgcggaggtagccagcggcggctgcatgaagaccggactctggaagagcgaaactaccgtctaaggtggggcgggcgacgcggtagacgggctggccacgcggctcgttcccccgctcctcggggccctccaaggtgtctccgtagtcagcaggttggaggcagaggagccgatggctggaggaagcccacaggcggatgttccccacttgcctagagggcatccctctggggtagcgacagacaatcccagaaacacgcataatacatttccgtccagcccggggcagtctgactgtcggtgccctcccaggaacggggaaggcctccgtctgtgtgaaagggcacagcacatcccaggtgcaccctccccaagtactcccaccccgcctactgtccatgcggcctcactgggggccatcagcctcaccagcaaagcagagatgagagcgtgggaactgtgttctttcctccctgccctctactgatttcagcccagcccctgcctagatcctaggtcccttttcctcccgagtttggctggcacgagagctagcccagcacatgaagcaggtgatgttaagtcacaaggtgctgcttttcagatccactatgcaagaggggagggtggggccacgtgaaaggcagctctagacatcaaccagtcctgggggaggggagtgggaaccgggcacaactaggaacaatgccaccattcccacaggagtggtacttaaaccagacagcagggttcagaggtggcacaccgggacaaagctgaggccctgcacctcaacagctgactgccaggtgcctgtgggtgaactgaggggagtagagggagagggcaggtggaactggggcagaatctagtcatgccctaaagctagtcctgtaaacaatggtgccccagaaagctgcaggtggtgtttggagaagcagttacttttcagttacaagacccatctccctagtctcagccttacaacaccacgggactaaggaagagcacttccttgcctccgtaaggccagaggaagaaccatcccaatcatttgatctccagctccacagtagagagaaacctacaaaatgtcaaaccagcttcccgactcccaggagctcaagccaagcccagaggcagtggctggggtccctgcaggtcatgaggggcctatgcctttactccttttaaacaccagcacccgtcttttccccaacctaaaaccaaccaccagcatttcactacaggaccaaatggaaaccgagggaaccctgggtcttgggaagaacaacaggaaaccaaggtctgacctagggttccctcccagtcttcacatcactctggcctcatcaccaaggtgacagaggacacaggggagggggaaaacccacacacactccttggaatgggtcctgttatttatgcttgctgcacagacatattagaagaaaaaaaaaagctttgtattattcttccacatatgctggctgctgtttacacaccctgccaatgccttagcactggagagctttttgcaatatgctggggaaaggggagggagggaatgaaagtgccaaagaaaacatgtttttaagaactcgggttttatacaatagaatgttttctagcagatgcctcttgttttaatatattaaaattttgcaaagccctttgagctactgccttagtctacccactgtccttttgttatgaggtagaggatctcatgacaccatacacacaaacccatcattgcctgtgaatgcacgtagggccagaattccccagttcccgctcctctgagggttgatactgctgggaatgccaaccactccacaagcagagggaagccccctcaggcctgcaggaggagccgcagcagtgtgtccaattcaaaccagcagcaaagagcctgacattttcccatccatctatgaggaaagccatctcacagaacatggacataggcaacttgctctcccacaccaagggatgggaatctctcctacctatagtcatccctgcactcctgactttactccaggacccagggtccaactaatggcagagcccctcttggttccttcaaacaagaaaagcaatacctacggactggtgtacacttccatccttggttataacaggaatgttatcaagctgtcagaacaggatgaagtgctcccagtggatatccatcagggagggttagggacactcgtggcagcctgtctagcagcctgggctctctgaaagtccctaacttcctgaggggtacgcaaatactgttctatttcactatcagaaatgttctcatctccagtgacagtggagacagggggtacagggcagatccgcttcggggacttcaacatgcagggtggcaagagaagggcaggactggccggccgcttcccctggggtaaacctaaggaattatttcccacctccccttctccttgcccctgtccccaccccggtggctccttctctcgggtctccacttctgctgtcccatcccgaaaggcagagcggaccagtgactggcggtgctggagaaggtcaccgatgtgcttcaccacagaccgtttgtcaagtctcagaactcgtaaccaggccagctgctcagccatccgcagcagcacagccagcagctcctgcaggcgggaggacgccgggtagggcaggtccacatttgccaatttacaaaatcgggcaaggga

SEQ ID NO: 276907 - DNA, 6772 bp, Homo sapiens
atccatggcacggagcggcggcggcggcggcagcaggagcccggcgcgatccgctaggtcccagcccagcgcccagcgagcaggcgacgcggaggggccgggcctccagtgtcccgagggccgggcgctgagactccggccgcgcagctgggagctgcccgcgctgcgctgacagccgcgccgacgtcctccccgccggggcgctcgcaggacatgcccccggggcgcggcggcggggaccccggggctcgcctccgcccagggcccccctccacgccctcgggagccccgggcccccgctgagcactcctcccgcacgcctgggtccctccggccggcgcgcagcccggccccagcgctgtgggtccccgcggggcgatgggttgatgggcgccgggggacgcaggatgcggggggcgcccgcgcgcctgctgctgccgctgctgccgtggctcctgctgctcctggcgcccgaggctcggggcgcgcccggctgcccgctatccatccgcagctgcaagtgctcgggggagcggcccaaggggctgagcggcggcgtccctggcccggctcggcggagggtggtgtgcagcggcggggacctcccggagcctcccgagcccggccttctgcctaacggcaccgttaccctgctcttgagcaataacaagatcacggggctccgcaatggctccttcctgggactgtcactgctggagaagctggacctgaggaacaacatcatcagcacagtgcagccgggcgccttcctgggcctgggggagctgaagcgtttagatctctccaacaaccggattggctgtctcacctccgagaccttccagggcctccccaggcttctccgactaaacatatctggaaacatcttctccagtctgcaacctggggtctttgatgagctgccagcccttaaggttgtggacttgggcaccgagttcctgacctgtgactgccacctgcgctggctgctgccctgggcccagaatcgctccctgcagctgtcggaacacacgctctgtgcttaccccagtgccctgcatgctcaggccctgggcagcctccaggaggcccagctctgctgcgagggggccctggagctgcacacacaccacctcatcccgtccctacgccaagtggtgttccagggggatcggctgcccttccagtgctctgccagctacctgggcaacgacacccgcatccgctggtaccacaaccgagcccctgtggagggtgatgagcaggcgggcatcctcctggccgagagcctcatccacgactgcaccttcatcaccagtgagctgacgctgtctcacatcggcgtgtgggcctcaggcgagtgggagtgcaccgtgtccatggcccaaggcaacgccagcaagaaggtggagatcgtggtgctggagacctctgcctcctactgccccgccgagcgtgttgccaacaaccgcggggacttcaggtggccccgaactctggctggcatcacagcctaccagtcctgcctgcagtatcccttcacctcagtgcccctgggcgggggtgccccgggcacccgagcctcccgccggtgtgaccgtgccggccgctgggagccaggggactactcccactgtctctacaccaacgacatcaccagggtgctgtacaccttcgtgctgatgcccatcaatgcctccaatgcgctgaccctggctcaccagctgcgcgtgtacacagccgaggccgctagcttttcagacatgatggatgtagtctatgtggctcagatgatccagaaatttttgggttatgtcgaccagatcaaagagctggtagaggtgatggtggacatggccagcaacctgatgctggtggacgagcacctgctgtggctggcccagcgcgaggacaaggcctgcagccgcatcgtgggtgccctggagcgcattgggggggccgccctcagcccccatgcccagcacatctcagtgaatgcgaggaacgtggcattggaggcctacctcatcaagccgcacagctacgtgggcctgacctgcacagccttccagaggagggagggaggggtgccgggcacacggccaggaagccctggccagaaccccccacctgagcccgagcccccagctgaccagcagctccgcttccgctgcaccaccgggaggcccaatgtttctctgtcgtccttccacatcaagaacagcgtggccctggcctccatccagctgcccccgagtctattctcatcccttccggctgccctggctcccccggtgcccccagactgcaccctgcaactgctcgtcttccgaaatggccgcctcttccacagccacagcaacacctcccgccctggagctgctgggcctggcaagaggcgtggcgtggccacccccgtcatcttcgcaggaaccagtggctgtggcgtgggaaacctgacagagccagtggccgtttcgctgcggcactgggctgagggagccgaacctgtggccgcttggtggagccaggaggggcccggggaggctgggggctggacctcggagggctgccagctccgctccagccagcccaatgtcagcgccctgcactgccagcacttgggcaatgtggccgtgctcatggagctgagcgcctttcccagggaggtggggggcgccggggcagggctgcaccccgtggtatacccctgcacggccttgctgctgctctgcctcttcgccaccatcatcacctacatcctcaaccacagctccatccgtgtgtcccggaaaggctggcacatgctgctgaacttgtgcttccacatagccatgacctctgctgtctttgcggggggcatcacactcaccaactaccagatggtctgccaggcggtgggcatcaccctgcactactcctccctatccacgctgctctggatgggcgtgaaggcgcgagtgctccataaggagctcacctggagggcaccccctccgcaagaaggggaccccgctctgcctactcccagtcctatgctccggttctatttgatcgctggagggattccactcattatctgtggcatcacagctgcagtcaacatccacaactaccgggaccacagcccctactgctggctggtgtggcgtccaagccttggcgccttctacatccctgtggctttgattctgctcatcacctggatctatttcctgtgcgccgggctacgcttacggggtcctctggcacagaaccccaaggcgggcaacagcagggcctccctggaggcaggggaggagctgaggggttccaccaggctcaggggcagcggccccctcctgagtgactcaggttcccttcttgctactgggagcgcgcgagtggggacgcccgggcccccggaggatggtgacagcctctattctccgggagtccagctaggggcgctggtgaccacgcacttcctgtacttggccatgtgggcctgcggggctctggcagtgtcccagcgctggctgccccgggtggtgtgcagctgcttgtacggggtggcagcctccgccctgggcctcttcgtcttcactcaccactgtgccaggcggagggacgtgagagcctcgtggcgcgcctgctgcccccctgcctctcccgcggccccccatgccccgccccgggccctgcccgccgccgcagaggacggttccccggtgttcggggaggggcccccctccctcaagtcctccccaagcggcagcagcggccatccgctggctctgggcccctgcaagctcaccaacctgcagctggcccagagtcaggtgtgcgaggcgggggcggcggccggcggggaaggagagccggagccggcgggcacccggggaaacctcgcccaccgccaccccaacaacgtgcaccacgggcgtcgggcgcacaagagccgggccaagggacaccgcgcgggggaggcctgcggcaagaaccggctcaaggccctgcgcgggggcgcggcgggggcgctggagctgctgtccagcgagagcggtagtctgcacaacagccccaccgacagctacctgggcagcagccgcaacagcccgggcgccggcctgcagctggaaggcgagcccatgctcacgccgtccgagggcagcgacaccagcgccgcgccgctttctgaggcgggccgggcaggccagcgccgcagcgccagccgcgacagtctcaagggcggcggcgcgctggagaaggagagccatcgccgctcgtacccgctcaacgccgccagcctaaacggcgcccccaaggggggcaagtacgacgacgtcaccctgatgggcgcggaggtagccagcggcggctgcatgaagaccggactctggaagagcgaaactaccgtctaaggtggggcgggcgacgcggtagacgggctggccacgcggctcgttcccccgctcctcggggccctccaaggtgtctccgtagtcagcaggttggaggcagaggagccgatggctggaggaagcccacaggcggatgttccccacttgcctagagggcatccctctggggtagcgacagacaatcccagaaacacgcataatacatttccgtccagcccggggcagtctgactgtcggtgccctcccaggaacggggaaggcctccgtctgtgtgaaagggcacagcacatcccaggtgcaccctccccaagtactcccaccccgcctactgtccatgcggcctcactgggggccatcagcctcaccagcaaagcagagatgagagcgtgggaactgtgttctttcctccctgccctctactgatttcagcccagcccctgcctagatcctaggtcccttttcctcccgagtttggctggcacgagagctagcccagcacatgaagcaggtgatgttaagtcacaaggtgctgcttttcagatccactatgcaagaggggagggtggggccacgtgaaaggcagctctagacatcaaccagtcctgggggaggggagtgggaaccgggcacaactaggaacaatgccaccattcccacaggagtggtacttaaaccagacagcagggttcagaggtggcacaccgggacaaagctgaggccctgcacctcaacagctgactgccaggtgcctgtgggtgaactgaggggagtagagggagagggcaggtggaactggggcagaatctagtcatgccctaaagctagtcctgtaaacaatggtgccccagaaagctgcaggtggtgtttggagaagcagttacttttcagttacaagacccatctccctagtctcagccttacaacaccacgggactaaggaagagcacttccttgcctccgtaaggccagaggaagaaccatcccaatcatttgatctccagctccacagtagagagaaacctacaaaatgtcaaaccagcttcccgactcccaggagctcaagccaagcccagaggcagtggctggggtccctgcaggtcatgaggggcctatgcctttactccttttaaacaccagcacccgtcttttccccaacctaaaaccaaccaccagcatttcactacaggaccaaatggaaaccgagggaaccctgggtcttgggaagaacaacaggaaaccaaggtctgacctagggttccctcccagtcttcacatcactctggcctcatcaccaaggtgacagaggacacaggggagggggaaaacccacacacactccttggaatgggtcctgttatttatgcttgctgcacagacatattagaagaaaaaaaaaagctttgtattattcttccacatatgctggctgctgtttacacaccctgccaatgccttagcactggagagctttttgcaatatgctggggaaaggggagggagggaatgaaagtgccaaagaaaacatgtttttaagaactcgggttttatacaatagaatgttttctagcagatgcctcttgttttaatatattaaaattttgcaaagccctttgagctactgccttagtctacccactgtccttttgttatgaggtagaggatctcatgacaccatacacacaaacccatcattgcctgtgaatgcacgtagggccagaattccccagttcccgctcctctgagggttgatactgctgggaatgccaaccactccacaagcagagggaagccccctcaggcctgcaggaggagccgcagcagtgtgtccaattcaaaccagcagcaaagagcctgacattttcccatccatctatgaggaaagccatctcacagaacatggacataggcaacttgctctcccacaccaagggatgggaatctctcctacctatagtcatccctgcactcctgactttactccaggacccagggtccaactaatggcagagcccctcttggttccttcaaacaagaaaagcaatacctacggactggtgtacacttccatccttggttataacaggaatgttatcaagctgtcagaacaggatgaagtgctcccagtggatatccatcagggagggttagggacactcgtggcagcctgtctagcagcctgggctctctgaaagtccctaacttcctgaggggtacgcaaatactgttctatttcactatcagaaatgttctcatctccagtgacagtggagacagggggtacaggcatctcacaaccggccccaaagccgcggaagccttcagagactcctgggtctgcaacagcaaccgtgaggcagcaagaagtagga

SEQ ID NO: 276908 - DNA, 6954 bp, Homo sapiens
atccatggcacggagcggcggcggcggcggcagcaggagcccggcgcgatccgctaggtcccagcccagcgcccagcgagcaggcgacgcggaggggccgggcctccagtgtcccgagggccgggcgctgagactccggccgcgcagctgggagctgcccgcgctgcgctgacagccgcgccgacgtcctccccgccggggcgctcgcaggacatgcccccggggcgcggcggcggggaccccggggctcgcctccgcccagggcccccctccacgccctcgggagccccgggcccccgctgagcactcctcccgcacgcctgggtccctccggccggcgcgcagcccggccccagcgctgtgggtccccgcggggcgatgggttgatgggcgccgggggacgcaggatgcggggggcgcccgcgcgcctgctgctgccgctgctgccgtggctcctgctgctcctggcgcccgaggctcggggcgcgcccggctgcccgctatccatccgcagctgcaagtgctcgggggagcggcccaaggggctgagcggcggcgtccctggcccggctcggcggagggtggtgtgcagcggcggggacctcccggagcctcccgagcccggccttctgcctaacggcaccgttaccctgctcttgagcaataacaagatcacggggctccgcaatggctccttcctgggactgtcactgctggagaagctggacctgaggaacaacatcatcagcacagtgcagccgggcgccttcctgggcctgggggagctgaagcgtttagatctctccaacaaccggattggctgtctcacctccgagaccttccagggcctccccaggcttctccgactaaacatatctggaaacatcttctccagtctgcaacctggggtctttgatgagctgccagcccttaaggttgtggacttgggcaccgagttcctgacctgtgactgccacctgcgctggctgctgccctgggcccagaatcgctccctgcagctgtcggaacacacgctctgtgcttaccccagtgccctgcatgctcaggccctgggcagcctccaggaggcccagctctgctgcgagggggccctggagctgcacacacaccacctcatcccgtccctacgccaagtggtgttccagggggatcggctgcccttccagtgctctgccagctacctgggcaacgacacccgcatccgctggtaccacaaccgagcccctgtggagggtgatgagcaggcgggcatcctcctggccgagagcctcatccacgactgcaccttcatcaccagtgagctgacgctgtctcacatcggcgtgtgggcctcaggcgagtgggagtgcaccgtgtccatggcccaaggcaacgccagcaagaaggtggagatcgtggtgctggagacctctgcctcctactgccccgccgagcgtgttgccaacaaccgcggggacttcaggtggccccgaactctggctggcatcacagcctaccagtcctgcctgcagtatcccttcacctcagtgcccctgggcgggggtgccccgggcacccgagcctcccgccggtgtgaccgtgccggccgctgggagccaggggactactcccactgtctctacaccaacgacatcaccagggtgctgtacaccttcgtgctgatgcccatcaatgcctccaatgcgctgaccctggctcaccagctgcgcgtgtacacagccgaggccgctagcttttcagacatgatggatgtagtctatgtggctcagatgatccagaaatttttgggttatgtcgaccagatcaaagagctggtagaggtgatggtggacatggccagcaacctgatgctggtggacgagcacctgctgtggctggcccagcgcgaggacaaggcctgcagccgcatcgtgggtgccctggagcgcattgggggggccgccctcagcccccatgcccagcacatctcagtgaatgcgaggaacgtggcattggaggcctacctcatcaagccgcacagctacgtgggcctgacctgcacagccttccagaggagggagggaggggtgccgggcacacggccaggaagccctggccagaaccccccacctgagcccgagcccccagctgaccagcagctccgcttccgctgcaccaccgggaggcccaatgtttctctgtcgtccttccacatcaagaacagcgtggccctggcctccatccagctgcccccgagtctattctcatcccttccggctgccctggctcccccggtgcccccagactgcaccctgcaactgctcgtcttccgaaatggccgcctcttccacagccacagcaacacctcccgccctggagctgctgggcctggcaagaggcgtggcgtggccacccccgtcatcttcgcaggaaccagtggctgtggcgtgggaaacctgacagagccagtggccgtttcgctgcggcactgggctgagggagccgaacctgtggccgcttggtggagccaggaggggcccggggaggctgggggctggacctcggagggctgccagctccgctccagccagcccaatgtcagcgccctgcactgccagcacttgggcaatgtggccgtgctcatggagctgagcgcctttcccagggaggtggggggcgccggggcagggctgcaccccgtggtatacccctgcacggccttgctgctgctctgcctcttcgccaccatcatcacctacatcctcaaccacagctccatccgtgtgtcccggaaaggctggcacatgctgctgaacttgtgcttccacatagccatgacctctgctgtctttgcggggggcatcacactcaccaactaccagatggtctgccaggcggtgggcatcaccctgcactactcctccctatccacgctgctctggatgggcgtgaaggcgcgagtgctccataaggagctcacctggagggcaccccctccgcaagaaggggaccccgctctgcctactcccagtcctatgctccggttctatttgatcgctggagggattccactcattatctgtggcatcacagctgcagtcaacatccacaactaccgggaccacagcccctactgctggctggtgtggcgtccaagccttggcgccttctacatccctgtggctttgattctgctcatcacctggatctatttcctgtgcgccgggctacgcttacggggtcctctggcacagaaccccaaggcgggcaacagcagggcctccctggaggcaggggaggagctgaggggttccaccaggctcaggggcagcggccccctcctgagtgactcaggttcccttcttgctactgggagcgcgcgagtggggacgcccgggcccccggaggatggtgacagcctctattctccgggagtccagctaggggcgctggtgaccacgcacttcctgtacttggccatgtgggcctgcggggctctggcagtgtcccagcgctggctgccccgggtggtgtgcagctgcttgtacggggtggcagcctccgccctgggcctcttcgtcttcactcaccactgtgccaggcggagggacgtgagagcctcgtggcgcgcctgctgcccccctgcctctcccgcggccccccatgccccgccccgggccctgcccgccgccgcagaggacggttccccggtgttcggggaggggcccccctccctcaagtcctccccaagcggcagcagcggccatccgctggctctgggcccctgcaagctcaccaacctgcagctggcccagagtcaggtgtgcgaggcgggggcggcggccggcggggaaggagagccggagccggcgggcacccggggaaacctcgcccaccgccaccccaacaacgtgcaccacgggcgtcgggcgcacaagagccgggccaagggacaccgcgcgggggaggcctgcggcaagaaccggctcaaggccctgcgcgggggcgcggcgggggcgctggagctgctgtccagcgagagcggtagtctgcacaacagccccaccgacagctacctgggcagcagccgcaacagcccgggcgccggcctgcagctggaaggcgagcccatgctcacgccgtccgagggcagcgacaccagcgccgcgccgctttctgaggcgggccgggcaggccagcgccgcagcgccagccgcgacagtctcaagggcggcggcgcgctggagaaggagagccatcgccgctcgtacccgctcaacgccgccagcctaaacggcgcccccaaggggggcaagtacgacgacgtcaccctgatgggcgcggaggtagccagcggcggctgcatgaagaccggactctggaagagcgaaactaccgtctaaggtggggcgggcgacgcggtagacgggctggccacgcggctcgttcccccgctcctcggggccctccaaggtgtctccgtagtcagcaggttggaggcagaggagccgatggctggaggaagcccacaggcggatgttccccacttgcctagagggcatccctctggggtagcgacagacaatcccagaaacacgcataatacatttccgtccagcccggggcagtctgactgtcggtgccctcccaggaacggggaaggcctccgtctgtgtgaaagggcacagcacatcccaggtgcaccctccccaagtactcccaccccgcctactgtccatgcggcctcactgggggccatcagcctcaccagcaaagcagagatgagagcgtgggaactgtgttctttcctccctgccctctactgatttcagcccagcccctgcctagatcctaggtcccttttcctcccgagtttggctggcacgagagctagcccagcacatgaagcaggtgatgttaagtcacaaggtgctgcttttcagatccactatgcaagaggggagggtggggccacgtgaaaggcagctctagacatcaaccagtcctgggggaggggagtgggaaccgggcacaactaggaacaatgccaccattcccacaggagtggtacttaaaccagacagcagggttcagaggtggcacaccgggacaaagctgaggccctgcacctcaacagctgactgccaggtgcctgtgggtgaactgaggggagtagagggagagggcaggtggaactggggcagaatctagtcatgccctaaagctagtcctgtaaacaatggtgccccagaaagctgcaggtggtgtttggagaagcagttacttttcagttacaagacccatctccctagtctcagccttacaacaccacgggactaaggaagagcacttccttgcctccgtaaggccagaggaagaaccatcccaatcatttgatctccagctccacagtagagagaaacctacaaaatgtcaaaccagcttcccgactcccaggagctcaagccaagcccagaggcagtggctggggtccctgcaggtcatgaggggcctatgcctttactccttttaaacaccagcacccgtcttttccctcccagtcttcacatcactctggcctcatcaccaaggtgacagaggacacaggggagggggaaaacccacacacactccttggaatgggtcctgttatttatgcttgctgcacagacatattagaagaaaaaaaaaagctttgtattattcttccacatatgctggctgctgtttacacaccctgccaatgccttagcactggagagctttttgcaatatgctggggaaaggggagggagggaatgaaagtgccaaagaaaacatgtttttaagaactcgggttttatacaatagaatgttttctagcagatgcctcttgttttaatatattaaaattttgcaaagccctttgagctactgccttagtctacccactgtccttttgttatgaggtagaggatctcatgacaccatacacacaaacccatcattgcctgtgaatgcacgtagggccagaattccccagttcccgctcctctgagggttgatactgctgggaatgccaaccactccacaagcagagggaagccccctcaggcctgcaggaggagccgcagcagtgtgtccaattcaaaccagcagcaaagagcctgacattttcccatccatctatgaggaaagccatctcacagaacatggacataggcaacttgctctcccacaccaagggatgggaatctctcctacctatagtcatccctgcactcctgactttactccaggacccagggtccaactaatggcagagcccctcttggttccttcaaacaagaaaagcaatacctacggactggtgtacacttccatccttggttataacaggaatgttatcaagctgtcagaacaggatgaagtgctcccagtggatatccatcagggagggttagggacactcgtggcagcctgtctagcagcctgggctctctgaaagtccctaacttcctgaggggtacgcaaatactgttctatttcactatcagaaatgttctcatctccagtgacagtggagacagggggtacagggcagatccgcttcggggacttcaacatgcagggtggcaagagaagggcaggactggccggccgcttcccctggggtaaacctaaggaattatttcccacctccccttctccttgcccctgtccccaccccggtggctccttctctcgggtctccacttctgctgtcccatcccgaaaggcagagcggaccagtgactggcggtgctggagaaggtcaccgatgtgcttcaccacagaccgtttgtcaagtctcagaactcgtaaccaggccagctgctcagccatccgcagcagcacagccagcagctcctgcaggcgggaggacgccgggtagggcaggtccacatttgccaatttacaaaatcgggcaaggga

SEQ ID NO: 276909 - DNA, 6683 bp, Homo sapiens
atccatggcacggagcggcggcggcggcggcagcaggagcccggcgcgatccgctaggtcccagcccagcgcccagcgagcaggcgacgcggaggggccgggcctccagtgtcccgagggccgggcgctgagactccggccgcgcagctgggagctgcccgcgctgcgctgacagccgcgccgacgtcctccccgccggggcgctcgcaggacatgcccccggggcgcggcggcggggaccccggggctcgcctccgcccagggcccccctccacgccctcgggagccccgggcccccgctgagcactcctcccgcacgcctgggtccctccggccggcgcgcagcccggccccagcgctgtgggtccccgcggggcgatgggttgatgggcgccgggggacgcaggatgcggggggcgcccgcgcgcctgctgctgccgctgctgccgtggctcctgctgctcctggcgcccgaggctcggggcgcgcccggctgcccgctatccatccgcagctgcaagtgctcgggggagcggcccaaggggctgagcggcggcgtccctggcccggctcggcggagggtggtgtgcagcggcggggacctcccggagcctcccgagcccggccttctgcctaacggcaccgttaccctgctcttgagcaataacaagatcacggggctccgcaatggctccttcctgggactgtcactgctggagaagctggacctgaggaacaacatcatcagcacagtgcagccgggcgccttcctgggcctgggggagctgaagcgtttagatctctccaacaaccggattggctgtctcacctccgagaccttccagggcctccccaggcttctccgactaaacatatctggaaacatcttctccagtctgcaacctggggtctttgatgagctgccagcccttaaggttgtggacttgggcaccgagttcctgacctgtgactgccacctgcgctggctgctgccctgggcccagaatcgctccctgcagctgtcggaacacacgctctgtgcttaccccagtgccctgcatgctcaggccctgggcagcctccaggaggcccagctctgctgcgagggggccctggagctgcacacacaccacctcatcccgtccctacgccaagtggtgttccagggggatcggctgcccttccagtgctctgccagctacctgggcaacgacacccgcatccgctggtaccacaaccgagcccctgtggagggtgatgagcaggcgggcatcctcctggccgagagcctcatccacgactgcaccttcatcaccagtgagctgacgctgtctcacatcggcgtgtgggcctcaggcgagtgggagtgcaccgtgtccatggcccaaggcaacgccagcaagaaggtggagatcgtggtgctggagacctctgcctcctactgccccgccgagcgtgttgccaacaaccgcggggacttcaggtggccccgaactctggctggcatcacagcctaccagtcctgcctgcagtatcccttcacctcagtgcccctgggcgggggtgccccgggcacccgagcctcccgccggtgtgaccgtgccggccgctgggagccaggggactactcccactgtctctacaccaacgacatcaccagggtgctgtacaccttcgtgctgatgcccatcaatgcctccaatgcgctgaccctggctcaccagctgcgcgtgtacacagccgaggccgctagcttttcagacatgatggatgtagtctatgtggctcagatgatccagaaatttttgggttatgtcgaccagatcaaagagctggtagaggtgatggtggacatggccagcaacctgatgctggtggacgagcacctgctgtggctggcccagcgcgaggacaaggcctgcagccgcatcgtgggtgccctggagcgcattgggggggccgccctcagcccccatgcccagcacatctcagtgaatgcgaggaacgtggcattggaggcctacctcatcaagccgcacagctacgtgggcctgacctgcacagccttccagaggagggagggaggggtgccgggcacacggccaggaagccctggccagaaccccccacctgagcccgagcccccagctgaccagcagctccgcttccgctgcaccaccgggaggcccaatgtttctctgtcgtccttccacatcaagaacagcgtggccctggcctccatccagctgcccccgagtctattctcatcccttccggctgccctggctcccccggtgcccccagactgcaccctgcaactgctcgtcttccgaaatggccgcctcttccacagccacagcaacacctcccgccctggagctgctgggcctggcaagaggcgtggcgtggccacccccgtcatcttcgcaggaaccagtggctgtggcgtgggaaacctgacagagccagtggccgtttcgctgcggcactgggctgagggagccgaacctgtggccgcttggtggagccaggaggggcccggggaggctgggggctggacctcggagggctgccagctccgctccagccagcccaatgtcagcgccctgcactgccagcacttgggcaatgtggccgtgctcatggagctgagcgcctttcccagggaggtggggggcgccggggcagggctgcaccccgtggtatacccctgcacggccttgctgctgctctgcctcttcgccaccatcatcacctacatcctcaaccacagctccatccgtgtgtcccggaaaggctggcacatgctgctgaacttgtgcttccacatagccatgacctctgctgtctttgcggggggcatcacactcaccaactaccagatggtctgccaggcggtgggcatcaccctgcactactcctccctatccacgctgctctggatgggcgtgaaggcgcgagtgctccataaggagctcacctggagggcaccccctccgcaagaaggggaccccgctctgcctactcccagtcctatgctccggttctatttgatcgctggagggattccactcattatctgtggcatcacagctgcagtcaacatccacaactaccgggaccacagcccctactgctggctggtgtggcgtccaagccttggcgccttctacatccctgtggctttgattctgctcatcacctggatctatttcctgtgcgccgggctacgcttacggggtcctctggcacagaaccccaaggcgggcaacagcagggcctccctggaggcaggggaggagctgaggggttccaccaggctcaggggcagcggccccctcctgagtgactcaggttcccttcttgctactgggagcgcgcgagtggggacgcccgggcccccggaggatggtgacagcctctattctccgggagtccagctaggggcgctggtgaccacgcacttcctgtacttggccatgtgggcctgcggggctctggcagtgtcccagcgctggctgccccgggtggtgtgcagctgcttgtacggggtggcagcctccgccctgggcctcttcgtcttcactcaccactgtgccaggcggagggacgtgagagcctcgtggcgcgcctgctgcccccctgcctctcccgcggccccccatgccccgccccgggccctgcccgccgccgcagaggacggttccccggtgttcggggaggggcccccctccctcaagtcctccccaagcggcagcagcggccatccgctggctctgggcccctgcaagctcaccaacctgcagctggcccagagtcaggtgtgcgaggcgggggcggcggccggcggggaaggagagccggagccggcgggcacccggggaaacctcgcccaccgccaccccaacaacgtgcaccacgggcgtcgggcgcacaagagccgggccaagggacaccgcgcgggggaggcctgcggcaagaaccggctcaaggccctgcgcgggggcgcggcgggggcgctggagctgctgtccagcgagagcggtagtctgcacaacagccccaccgacagctacctgggcagcagccgcaacagcccgggcgccggcctgcagctggaaggcgagcccatgctcacgccgtccgagggcagcgacaccagcgccgcgccgctttctgaggcgggccgggcaggccagcgccgcagcgccagccgcgacagtctcaagggcggcggcgcgctggagaaggagagccatcgccgctcgtacccgctcaacgccgccagcctaaacggcgcccccaaggggggcaagtacgacgacgtcaccctgatgggcgcggaggtagccagcggcggctgcatgaagaccggactctggaagagcgaaactaccgtctaaggtggggcgggcgacgcggtagacgggctggccacgcggctcgttcccccgctcctcggggccctccaaggtgtctccgtagtcagcaggttggaggcagaggagccgatggctggaggaagcccacaggcggatgttccccacttgcctagagggcatccctctggggtagcgacagacaatcccagaaacacgcataatacatttccgtccagcccggggcagtctgactgtcggtgccctcccaggaacggggaaggcctccgtctgtgtgaaagggcacagcacatcccaggtgcaccctccccaagtactcccaccccgcctactgtccatgcggcctcactgggggccatcagcctcaccagcaaagcagagatgagagcgtgggaactgtgttctttcctccctgccctctactgatttcagcccagcccctgcctagatcctaggtcccttttcctcccgagtttggctggcacgagagctagcccagcacatgaagcaggtgatgttaagtcacaaggtgctgcttttcagatccactatgcaagaggggagggtggggccacgtgaaaggcagctctagacatcaaccagtcctgggggaggggagtgggaaccgggcacaactaggaacaatgccaccattcccacaggagtggtacttaaaccagacagcagggttcagaggtggcacaccgggacaaagctgaggccctgcacctcaacagctgactgccaggtgcctgtgggtgaactgaggggagtagagggagagggcaggtggaactggggcagaatctagtcatgccctaaagctagtcctgtaaacaatggtgccccagaaagctgcaggtggtgtttggagaagcagttacttttcagttacaagacccatctccctagtctcagccttacaacaccacgggactaaggaagagcacttccttgcctccgtaaggccagaggaagaaccatcccaatcatttgatctccagctccacagtagagagaaacctacaaaatgtcaaaccagcttcccgactcccaggagctcaagccaagcccagaggcagtggctggggtccctgcaggtcatgaggggcctatgcctttactccttttaaacaccagcacccgtcttttccccaacctaaaaccaaccaccagcatttcactacaggaccaaatggaaaccgagggaaccctgggtcttgggaagaacaacaggaaaccaaggtctgacctagggttccctcccagtcttcacatcactctggcctcatcaccaaggtgacagaggacacaggggagggggaaaacccacacacactccttggaatgggtcctgttatttatgcttgctgcacagacatattagaagaaaaaaaaaagctttgtattattcttccacatatgctggctgctgtttacacaccctgccaatgccttagcactggagagctttttgcaatatgctggggaaaggggagggagggaatgaaagtgccaaagaaaacatgtttttaagaactcgggttttatacaatagaatgttttctagcagatgcctcttgttttaatatattaaaattttgcaaagccctttgagctactgccttagtctacccactgtccttttgttatgaggtagaggatctcatgacaccatacacacaaacccatcattgcctgtgaatgcacgtagggccagaattccccagttcccgctcctctgagggttgatactgctgggaatgccaaccactccacaagcagagggaagccccccatctcacagaacatggacataggcaacttgctctcccacaccaagggatgggaatctctcctacctatagtcatccctgcactcctgactttactccaggacccagggtccaactaatggcagagcccctcttggttccttcaaacaagaaaagcaatacctacggactggtgtacacttccatccttggttataacaggaatgttatcaagctgtcagaacaggatgaagtgctcccagtggatatccatcagggagggttagggacactcgtggcagcctgtctagcagcctgggctctctgaaagtccctaacttcctgaggggtacgcaaatactgttctatttcactatcagaaatgttctcatctccagtgacagtggagacagggggtacaggcatctcacaaccggccccaaagccgcggaagccttcagagactcctgggtctgcaacagcaaccgtgaggcagcaagaagtagga

SEQ ID NO: 276910 - DNA, 5914 bp, Homo sapiens
atccatggcacggagcggcggcggcggcggcagcaggagcccggcgcgatccgctaggtcccagcccagcgcccagcgagcaggcgacgcggaggggccgggcctccagtgtcccgagggccgggcgctgagactccggccgcgcagctgggagctgcccgcgctgcgctgacagccgcgccgacgtcctccccgccggggcgctcgcaggacatgcccccggggcgcggcggcggggaccccggggctcgcctccgcccagggcccccctccacgccctcgggagccccgggcccccgctgagcactcctcccgcacgcctgggtccctccggccggcgcgcagcccggccccagcgctgtgggtccccgcggggcgatgggttgatgggcgccgggggacgcaggatgcggggggcgcccgcgcgcctgctgctgccgctgctgccgtggctcctgctgctcctggcgcccgaggctcggggcgcgcccggctgcccgctatccatccgcagctgcaagtgctcgggggagcggcccaaggggctgagcggcggcgtccctggcccggctcggcggagggtggtgtgcagcggcggggacctcccggagcctcccgagcccggccttctgcctaacggcaccgttaccctgctcttgagcaataacaagatcacggggctccgcaatggctccttcctgggactgtcactgctggagaagctggacctgaggaacaacatcatcagcacagtgcagccgggcgccttcctgggcctgggggagctgaagcgtttagatctctccaacaaccggattggctgtctcacctccgagaccttccagggcctccccaggcttctccgactaaacatatctggaaacatcttctccagtctgcaacctggggtctttgatgagctgccagcccttaaggttgtggacttgggcaccgagttcctgacctgtgactgccacctgcgctggctgctgccctgggcccagaatcgctccctgcagctgtcggaacacacgctctgtgcttaccccagtgccctgcatgctcaggccctgggcagcctccaggaggcccagctctgctgcgagggggccctggagctgcacacacaccacctcatcccgtccctacgccaagtggtgttccagggggatcggctgcccttccagtgctctgccagctacctgggcaacgacacccgcatccgctggtaccacaaccgagcccctgtggagggtgatgagcaggcgggcatcctcctggccgagagcctcatccacgactgcaccttcatcaccagtgagctgacgctgtctcacatcggcgtgtgggcctcaggcgagtgggagtgcaccgtgtccatggcccaaggcaacgccagcaagaaggtggagatcgtggtgctggagacctctgcctcctactgccccgccgagcgtgttgccaacaaccgcggggacttcaggtggccccgaactctggctggcatcacagcctaccagtcctgcctgcagtatcccttcacctcagtgcccctgggcgggggtgccccgggcacccgagcctcccgccggtgtgaccgtgccggccgctgggagccaggggactactcccactgtctctacaccaacgacatcaccagggtgctgtacaccttcgtgctgatgcccatcaatgcctccaatgcgctgaccctggctcaccagctgcgcgtgtacacagccgaggccgctagcttttcagacatgatggatgtagtctatgtggctcagatgatccagaaatttttgggttatgtcgaccagatcaaagagctggtagaggtgatggtggacatggccagcaacctgatgctggtggacgagcacctgctgtggctggcccagcgcgaggacaaggcctgcagccgcatcgtgggtgccctggagcgcattgggggggccgccctcagcccccatgcccagcacatctcagtgaatgcgaggaacgtggcattggaggcctacctcatcaagccgcacagctacgtgggcctgacctgcacagccttccagaggagggagggaggggtgccgggcacacggccaggaagccctggccagaaccccccacctgagcccgagcccccagctgaccagcagctccgcttccgctgcaccaccgggaggcccaatgtttctctgtcgtccttccacatcaagaacagcgtggccctggcctccatccagctgcccccgagtctattctcatcccttccggctgccctggctcccccggtgcccccagactgcaccctgcaactgctcgtcttccgaaatggccgcctcttccacagccacagcaacacctcccgccctggagctgctgggcctggcaagaggcgtggcgtggccacccccgtcatcttcgcaggaaccagtggctgtggcgtgggaaacctgacagagccagtggccgtttcgctgcggcactgggctgagggagccgaacctgtggccgcttggtggagccaggaggggcccggggaggctgggggctggacctcggagggctgccagctccgctccagccagcccaatgtcagcgccctgcactgccagcacttgggcaatgtggccgtgctcatggagctgagcgcctttcccagggaggtggggggcgccggggcagggctgcaccccgtggtatacccctgcacggccttgctgctgctctgcctcttcgccaccatcatcacctacatcctcaaccacagctccatccgtgtgtcccggaaaggctggcacatgctgctgaacttgtgcttccacatagccatgacctctgctgtctttgcggggggcatcacactcaccaactaccagatggtctgccaggcggtgggcatcaccctgcactactcctccctatccacgctgctctggatgggcgtgaaggcgcgagtgctccataaggagctcacctggagggcaccccctccgcaagaaggggaccccgctctgcctactcccagtcctatgctccggttctatttgatcgctggagggattccactcattatctgtggcatcacagctgcagtcaacatccacaactaccgggaccacagcccctactgctggctggtgtggcgtccaagccttggcgccttctacatccctgtggctttgattctgctcatcacctggatctatttcctgtgcgccgggctacgcttacggggtcctctggcacagaaccccaaggcgggcaacagcagggcctccctggaggcaggggaggagctgaggggttccaccaggctcaggggcagcggccccctcctgagtgactcaggttcccttcttgctactgggagcgcgcgagtggggacgcccgggcccccggaggatggtgacagcctctattctccgggagtccagctaggggcgctggtgaccacgcacttcctgtacttggccatgtgggcctgcggggctctggcagtgtcccagcgctggctgccccgggtggtgtgcagctgcttgtacggggtggcagcctccgccctgggcctcttcgtcttcactcaccactgtgccaggcggagggacgtgagagcctcgtggcgcgcctgctgcccccctgcctctcccgcggccccccatgccccgccccgggccctgcccgccgccgcagaggacggttccccggtgttcggggaggggcccccctccctcaagtcctccccaagcggcagcagcggccatccgctggctctgggcccctgcaagctcaccaacctgcagctggcccagagtcaggtgtgcgaggcgggggcggcggccggcggggaaggagagccggagccggcgggcacccggggaaacctcgcccaccgccaccccaacaacgtgcaccacgggcgtcgggcgcacaagagccgggccaagggacaccgcgcgggggaggcctgcggcaagaaccggctcaaggccctgcgcgggggcgcggcgggggcgctggagctgctgtccagcgagagcggtagtctgcacaacagccccaccgacagctacctgggcagcagccgcaacagcccgggcgccggcctgcagctggaaggcgagcccatgctcacgccgtccgagggcagcgacaccagcgccgcgccgctttctgaggcgggccgggcaggccagcgccgcagcgccagccgcgacagtctcaagggcggcggcgcgctggagaaggagagccatcgccgctcgtacccgctcaacgccgccagcctaaacggcgcccccaaggggggcaagtacgacgacgtcaccctgatgggcgcggaggtagccagcggcggctgcatgaagaccggactctggaagagcgaaactaccgtctaaggtggggcgggcgacgcggtagacgggctggccacgcggctcgttcccccgctcctcggggccctccaaggtgtctccgtagtcagcaggttggaggcagaggagccgatggctggaggaagcccacaggcggatgttccccacttgcctagagggcatccctctggggtagcgacagacaatcccagaaacacgcataatacatttccgtccagcccggggcagtctgactgtcggtgccctcccaggaacggggaaggcctccgtctgtgtgaaagggcacagcacatcccaggtgcaccctccccaagtactcccaccccgcctactgtccatgcggcctcactgggggccatcagcctcaccagcaaagcagagatgagagcgtgggaactgtgttctttcctccctgccctctactgatttcagcccagcccctgcctagatcctaggtcccttttcctcccgagtttggctggcacgagagctagcccagcacatgaagcaggtgatgttaagtcacaaggtgctgcttttcagatccactatgcaagaggggagggtggggccacgtgaaaggcagctctagacatcaaccagtcctgggggaggggagtgggaaccgggcacaactaggaacaatgccaccattcccacaggagtggtacttaaaccagacagcagggttcagaggtggcacaccgggacaaagctgaggccctgcacctcaacagctgactgccaggtgcctgtgggtgaactgaggggagtagagggagagggcaggtggaactggggcagaatctagtcatgccctaaagctagtcctgtaaacaatggtgccccagaaagctgcaggtggtgtttggagaagcagttacttttcagttacaagacccatctccctagtctcagccttacaacaccacgggactaaggaagagcacttccttgcctccgtaaggccagaggaagaaccatcccaatcatttgatctccagctccacagtagagagaaacctacaaaatgtcaaaccagcttcccgactcccaggagctcaagccaagcccagaggcagtggctggggtccctgcaggtcatgaggggcctatgcctttactccttttaaacaccagcacccgtcttttccctcccagtcttcacatcactctggcctcatcaccaaggtgacagaggacacaggggagggggaaaacccacacacactccttggaatgggtcctgttatttatgcttgctgcacagacatattagaagaaaaaaaaaagctttgtattattcttccacatatgctggctgctgtttacacaccctgccaatgccttagcactggagagctttttgcaatatgctggggaaaggggagggagggaatgaaagtgccaaagaaaacatgtttttaagaactcgggttttatacaatagaatgttttctagcagatgcctcttgttttaatatattaaaattttgcaaagccctttgagctac

SEQ ID NO: 276911 - DNA, 5640 bp, Homo sapiens
atccatggcacggagcggcggcggcggcggcagcaggagcccggcgcgatccgctaggtcccagcccagcgcccagcgagcaggcgacgcggaggggccgggcctccagtgtcccgagggccgggcgctgagactccggccgcgcagctgggagctgcccgcgctgcgctgacagccgcgccgacgtcctccccgccggggcgctcgcaggacatgcccccggggcgcggcggcggggaccccggggctcgcctccgcccagggcccccctccacgccctcgggagccccgggcccccgctgagcactcctcccgcacgcctgggtccctccggccggcgcgcagcccggccccagcgctgtgggtccccgcggggcgatgggttgatgggcgccgggggacgcaggatgcggggggcgcccgcgcgcctgctgctgccgctgctgccgtggctcctgctgctcctggcgcccgaggctcggggcgcgcccggctgcccgctatccatccgcagctgcaagtgctcgggggagcggcccaaggggctgagcggcggcgtccctggcccggctcggcggagggtggtgtgcagcggcggggacctcccggagcctcccgagcccggccttctgcctaacggcaccgttaccctgctcttgagcaataacaagatcacggggctccgcaatggctccttcctgggactgtcactgctggagaagctggacctgaggaacaacatcatcagcacagtgcagccgggcgccttcctgggcctgggggagctgaagcgtttagatctctccaacaaccggattggctgtctcacctccgagaccttccagggcctccccaggcttctccgactaaacatatctggaaacatcttctccagtctgcaacctggggtctttgatgagctgccagcccttaaggttgtggacttgggcaccgagttcctgacctgtgactgccacctgcgctggctgctgccctgggcccagaatcgctccctgcagctgtcggaacacacgctctgtgcttaccccagtgccctgcatgctcaggccctgggcagcctccaggaggcccagctctgctgcgagggggccctggagctgcacacacaccacctcatcccgtccctacgccaagtggtgttccagggggatcggctgcccttccagtgctctgccagctacctgggcaacgacacccgcatccgctggtaccacaaccgagcccctgtggagggtgatgagcaggcgggcatcctcctggccgagagcctcatccacgactgcaccttcatcaccagtgagctgacgctgtctcacatcggcgtgtgggcctcaggcgagtgggagtgcaccgtgtccatggcccaaggcaacgccagcaagaaggtggagatcgtggtgctggagacctctgcctcctactgccccgccgagcgtgttgccaacaaccgcggggacttcaggtggccccgaactctggctggcatcacagcctaccagtcctgcctgcagtatcccttcacctcagtgcccctgggcgggggtgccccgggcacccgagcctcccgccggtgtgaccgtgccggccgctgggagccaggggactactcccactgtctctacaccaacgacatcaccagggtgctgtacaccttcgtgctgatgcccatcaatgcctccaatgcgctgaccctggctcaccagctgcgcgtgtacacagccgaggccgctagcttttcagacatgatggatgtagtctatgtggctcagatgatccagaaatttttgggttatgtcgaccagatcaaagagctggtagaggtgatggtggacatggccagcaacctgatgctggtggacgagcacctgctgtggctggcccagcgcgaggacaaggcctgcagccgcatcgtgggtgccctggagcgcattgggggggccgccctcagcccccatgcccagcacatctcagtgaatgcgaggaacgtggcattggaggcctacctcatcaagccgcacagctacgtgggcctgacctgcacagccttccagaggagggagggaggggtgccgggcacacggccaggaagccctggccagaaccccccacctgagcccgagcccccagctgaccagcagctccgcttccgctgcaccaccgggaggcccaatgtttctctgtcgtccttccacatcaagaacagcgtggccctggcctccatccagctgcccccgagtctattctcatcccttccggctgccctggctcccccggtgcccccagactgcaccctgcaactgctcgtcttccgaaatggccgcctcttccacagccacagcaacacctcccgccctggagctgctgggcctggcaagaggcgtggcgtggccacccccgtcatcttcgcaggaaccagtggctgtggcgtgggaaacctgacagagccagtggccgtttcgctgcggcactgggctgagggagccgaacctgtggccgcttggtggagccaggaggggcccggggaggctgggggctggacctcggagggctgccagctccgctccagccagcccaatgtcagcgccctgcactgccagcacttgggcaatgtggccgtgctcatggagctgagcgcctttcccagggaggtggggggcgccggggcagggctgcaccccgtggtatacccctgcacggccttgctgctgctctgcctcttcgccaccatcatcacctacatcctcaaccacagctccatccgtgtgtcccggaaaggctggcacatgctgctgaacttgtgcttccacatagccatgacctctgctgtctttgcggggggcatcacactcaccaactaccagatggtctgccaggcggtgggcatcaccctgcactactcctccctatccacgctgctctggatgggcgtgaaggcgcgagtgctccataaggagctcacctggagggcaccccctccgcaagaaggggaccccgctctgcctactcccagtcctatgctccggttctatttgatcgctggagggattccactcattatctgtggcatcacagctgcagtcaacatccacaactaccgggaccacagcccctactgctggctggtgtggcgtccaagccttggcgccttctacatccctgtggctttgattctgctcatcacctggatctatttcctgtgcgccgggctacgcttacggggtcctctggcacagaaccccaaggcgggcaacagcagggcctccctggaggcaggggaggagctgaggggttccaccaggctcaggggcagcggccccctcctgagtgactcaggttcccttcttgctactgggagcgcgcgagtggggacgcccgggcccccggaggatggtgacagcctctattctccgggagtccagctaggggcgctggtgaccacgcacttcctgtacttggccatgtgggcctgcggggctctggcagtgtcccagcgctggctgccccgggtggtgtgcagctgcttgtacggggtggcagcctccgccctgggcctcttcgtcttcactcaccactgtgccaggcggagggacgtgagagcctcgtggcgcgcctgctgcccccctgcctctcccgcggccccccatgccccgccccgggccctgcccgccgccgcagaggacggttccccggtgttcggggaggggcccccctccctcaagtcctccccaagcggcagcagcggccatccgctggctctgggcccctgcaagctcaccaacctgcagctggcccagagtcaggtgtgcgaggcgggggcggcggccggcggggaaggagagccggagccggcgggcacccggggaaacctcgcccaccgccaccccaacaacgtgcaccacgggcgtcgggcgcacaagagccgggccaagggacaccgcgcgggggaggcctgcggcaagaaccggctcaaggccctgcgcgggggcgcggcgggggcgctggagctgctgtccagcgagagcggtagtctgcacaacagccccaccgacagctacctgggcagcagccgcaacagcccgggcgccggcctgcagctggaaggcgagcccatgctcacgccgtccgagggcagcgacaccagcgccgcgccgctttctgaggcgggccgggcaggccagcgccgcagcgccagccgcgacagtctcaagggcggcggcgcgctggagaaggagagccatcgccgctcgtacccgctcaacgccgccagcctaaacggcgcccccaaggggggcaagtacgacgacgtcaccctgatgggcgcggaggtagccagcggcggctgcatgaagaccggactctggaagagcgaaactaccgtctaaggtggggcgggcgacgcggtagacgggctggccacgcggctcgttcccccgctcctcggggccctccaaggtgtctccgtagtcagcaggttggaggcagaggagccgatggctggaggaagcccacaggcggatgttccccacttgcctagagggcatccctctggggtagcgacagacaatcccagaaacacgcataatacatttccgtccagcccggggcagtctgactgtcggtgccctcccaggaacggggaaggcctccgtctgtgtgaaagggcacagcacatcccaggtgcaccctccccaagtactcccaccccgcctactgtccatgcggcctcactgggggccatcagcctcaccagcaaagcagagatgagagcgtgggaactgtgttctttcctccctgccctctactgatttcagcccagcccctgcctagatcctaggtcccttttcctcccgagtttggctggcacgagagctagcccagcacatgaagcaggtgatgttaagtcacaaggtgctgcttttcagatccactatgcaagaggggagggtggggccacgtgaaaggcagctctagacatcaaccagtcctgggggaggggagtgggaaccgggcacaactaggaacaatgccaccattcccacaggagtggtacttaaaccagacagcagggttcagaggtggcacaccgggacaaagctgaggccctgcacctcaacagctgactgccaggtgcctgtgggtgaactgaggggagtagagggagagggcaggtggaactggggcagaatctagtcatgccctaaagctagtcctgtaaacaatggtgccccagaaagctgcaggtggtgtttggagaagcagttacttttcagttacaagacccatctccctagtctcagccttacaacaccacgggactaaggaagagcacttccttgcctccgtaaggccagaggaagaaccatcccaatcatttgatctccagctccacagtagagagaaacctacaaaatgtcaaaccagcttcccgactcccaggagctcaagccaatgccttagcactggagagctttttgcaatatgctggggaaaggggagggagggaatgaaagtgccaaagaaaacatgtttttaagaactcgggttttatacaatagaatgttttctagcagatgcctcttgttttaatatattaaaattttgcaaagccctttgagctac

SEQ ID NO: 276912 - DNA, 3184 bp, Homo sapiens
atccatggcacggagcggcggcggcggcggcagcaggagcccggcgcgatccgctaggtcccagcccagcgcccagcgagcaggcgacgcggaggggccgggcctccagtgtcccgagggccgggcgctgagactccggccgcgcagctgggagctgcccgcgctgcgctgacagccgcgccgacgtcctccccgccggggcgctcgcaggacatgcccccggggcgcggcggcggggaccccggggctcgcctccgcccagggcccccctccacgccctcgggagccccgggcccccgctgagcactcctcccgcacgcctgggtccctccggccggcgcgcagcccggccccagcgctgtgggtccccgcggggcgatgggttgatgggcgccgggggacgcaggatgcggggggcgcccgcgcgcctgctgctgccgctgctgccgtggctcctgctgctcctggcgcccgaggctcggggcgcgcccggctgcccgctatccatccgcagctgcaagtgctcgggggagcggcccaaggggctgagcggcggcgtccctggcccggctcggcggagggtggtgtgcagcggcggggacctcccggagcctcccgagcccggccttctgcctaacggcaccgttaccctgctcttgagcaataacaagatcacggggctccgcaatggctccttcctgggactgtcactgctggagaagctggacctgaggaacaacatcatcagcacagtgcagccgggcgccttcctgggcctgggggagctgaagcgtttagatctctccaacaaccggattggctgtctcacctccgagaccttccagggcctccccaggcttctccgactaaacatatctggaaacatcttctccagtctgcaacctggggtctttgatgagctgccagcccttaaggttgtggacttgggcaccgagttcctgacctgtgactgccacctgcgctggctgctgccctgggcccagaatcgctccctgcagctgtcggaacacacgctctgtgcttaccccagtgccctgcatgctcaggccctgggcagcctccaggaggcccagctctgctgcgagggggccctggagctgcacacacaccacctcatcccgtccctacgccaagtggtgttccagggggatcggctgcccttccagtgctctgccagctacctgggcaacgacacccgcatccgctggtaccacaaccgagcccctgtggagggtgatgagcaggcgggcatcctcctggccgagagcctcatccacgactgcaccttcatcaccagtgagctgacgctgtctcacatcggcgtgtgggcctcaggcgagtgggagtgcaccgtgtccatggcccaaggcaacgccagcaagaaggtggagatcgtggtgctggagacctctgcctcctactgccccgccgagcgtgttgccaacaaccgcggggacttcaggtggccccgaactctggctggcatcacagcctaccagtcctgcctgcagtatcccttcacctcagtgcccctgggcgggggtgccccgggcacccgagcctcccgccggtgtgaccgtgccggccgctgggagccaggggactactcccactgtctctacaccaacgacatcaccagggtgctgtacaccttcgtgctgatgcccatcaatgcctccaatgcgctgaccctggctcaccagctgcgcgtgtacacagccgaggccgctagcttttcagacatgatggatgtagtctatgtggctcagatgatccagaaatttttgggttatgtcgaccagatcaaagagctggtagaggtgatggtggacatggccagcaacctgatgctggtggacgagcacctgctgtggctggcccagcgcgaggacaaggcctgcagccgcatcgtgggtgccctggagcgcattgggggggccgccctcagcccccatgcccagcacatctcagtgaatgcgaggaacgtggcattggaggcctacctcatcaagccgcacagctacgtgggcctgacctgcacagccttccagaggagggagggaggggtgccgggcacacggccaggaagccctggccagaaccccccacctgagcccgagcccccagctgaccagcagctccgcttccgctgcaccaccgggaggcccaatgtttctctgtcgtccttccacatcaagaacagcgtggccctggcctccatccagctgcccccgagtctattctcatcccttccggctgccctggctcccccggtgcccccagactgcaccctgcaactgctcgtcttccgaaatggccgcctcttccacagccacagcaacacctcccgccctggagctgctgggcctggcaagaggcgtggcgtggccacccccgtcatcttcgcaggaaccagtggctgtggcgtgggaaacctgacagagccagtggccgtttcgctgcggcactgggctgagggagccgaacctgtggccgcttggtggagccaggaggggcccggggaggctgggggctggacctcggagggctgccagctccgctccagccagcccaatgtcagcgccctgcactgccagcacttgggcaatgtggccgtgctcatggagctgagcgcctttcccagggaggtggggggcgccggggcagggctgcaccccgtggtatacccctgcacggccttgctgctgctctgcctcttcgccaccatcatcacctacatcctcaaccacagctccatccgtgtgtcccggaaaggctggcacatgctgctgaacttgtgcttccacatagccatgacctctgctgtctttgcggggggcatcacactcaccaactaccagatggtctgccaggcggtaagcaggagaaggggctctgggggtggtgctccgagatgagtgctggcacctaggcatagagtggggtgatgcgctggaagaaaaaggctggtgctcataggccgtggctccatggcttcctctgtggcagccttggaaggcagggatggtgggtcgtggagagtcgtcagagttggggaggtgttcagggaggtttccagagtgcagggaggtttccagaagtgcagggataggggtcctagaggccggaggggatgcagtcattagtgtcagtgagtttgaat

SEQ ID NO: 276913 - DNA, 1433 bp, Homo sapiens
atccatggcacggagcggcggcggcggcggcagcaggagcccggcgcgatccgctaggtcccagcccagcgcccagcgagcaggcgacgcggaggggccgggcctccagtgtcccgagggccgggcgctgagactccggccgcgcagctgggagctgcccgcgctgcgctgacagccgcgccgacgtcctccccgccggggcgctcgcaggacatgcccccggggcgcggcggcggggaccccggggctcgcctccgcccagggcccccctccacgccctcgggagccccgggcccccgctgagcactcctcccgcacgcctgggtccctccggccggcgcgcagcccggccccagcgctgtgggtccccgcggggcgatgggttgatgggcgccgggggacgcaggatgcggggggcgcccgcgcgcctgctgctgccgctgctgccgtggctcctgctgctcctggcgcccgaggctcggggcgcgcccggctgcccgctatccatccgcagctgcaagtgctcgggggagcggcccaaggggctgagcggcggcgtccctggcccggctcggcggagggtggtgtgcagcggcggggacctcccggagcctcccgagcccggccttctgcctaacggcaccgttaccctgctcttgagcaataacaagatcacggggctccgcaatggctccttcctgggactgtcactgctggagaagctggacctgaggaacaacatcatcagcacagtgcagccgggcgccttcctgggcctgggggagctgaagcgtttagatctctccaacaaccggattggctgtctcacctccgagaccttccagggcctccccaggcttctccgactaaacatatctggaaacatcttctccagtctgcaacctggggtctttgatgagctgccagcccttaaggttgtggacttgggcaccgagttcctgacctgtgactgccacctgcgctggctgctgccctgggcccagaatcgctccctgcagctgtcggaacacacgctctgtgcttaccccagtgccctgcatgctcaggccctgggcagcctccaggaggcccagctctgctgcggtgagcaagtccccccagctacacatctcccagggaccctgcctctccaccaacccagggcccagacacgagcctcccctcagacccacaggtttttacctttgtattgcaatttgcaaaagaccacgacactgagtcctgctcttgcatttagggagaccttatctttatgtataaatcaccatctgagaagtgctgcccagcacaaaaaggcttttctgtgctgtctttcattacaggtttgcaacagctctcccacaaaaagaatcacatttactatcccagcgaccctcctgcgggccagtgttatcctccctcctagcctctat

SEQ ID NO: 276914 - DNA, 5932 bp, Homo sapiens
atccatggcacggagcggcggcggcggcggcagcaggagcccggcgcgatccgctaggtcccagcccagcgcccagcgagcaggcgacgcggaggggccgggcctccagtgtcccgagggccgggcgctgagactccggccgcgcagctgggagctgcccgcgctgcgctgacagccgcgccgacgtcctccccgccggggcgctcgcaggacatgcccccggggcgcggcggcggggaccccggggctcgcctccgcccagggcccccctccacgccctcgggagccccgggcccccgctgagcactcctcccgcacgcctgggtccctccggccggcgcgcagcccggccccagcgctgtgggtccccgcggggcgatgggttgatgggcgccgggggacgcaggatgcggggggcgcccgcgcgcctgctgctgccgctgctgccgtggctcctgctgctcctggcgcccgaggctcggggcgcgcccggctgcccgctatccatccgcagctgcaagtgctcgggggagcggcccaaggggctgagcggcggcgtccctggcccggctcggcggagggtggtgtgcagcggcggggacctcccggagcctcccgagcccggccttctgcctaacggcaccgttaccctgctcttgagcaataacaagatcacggggctccgcaatggctccttcctgggactgtcactgctggagaagctggacctgaggaacaacatcatcagcacagtgcagccgggcgccttcctgggcctgggggagctgaagcgtttagatctctccaacaaccggattggctgtctcacctccgagaccttccagggcctccccaggcttctccgactaaacatatctggaaacatcttctccagtctgcaacctggggtctttgatgagctgccagcccttaaggttgtggacttgggcaccgagttcctgacctgtgactgccacctgcgctggctgctgccctgggcccagaatcgctccctgcagctgtcggaacacacgctctgtgcttaccccagtgccctgcatgctcaggccctgggcagcctccaggaggcccagctctgctgcgagggggccctggagctgcacacacaccacctcatcccgtccctacgccaagtggtgttccagggggatcggctgcccttccagtgctctgccagctacctgggcaacgacacccgcatccgctggtaccacaaccgagcccctgtggagggtgatgagcaggcgggcatcctcctggccgagagcctcatccacgactgcaccttcatcaccagtgagctgacgctgtctcacatcggcgtgtgggcctcaggcgagtgggagtgcaccgtgtccatggcccaaggcaacgccagcaagaaggtggagatcgtggtgctggagacctctgcctcctactgccccgccgagcgtgttgccaacaaccgcggggacttcaggtggccccgaactctggctggcatcacagcctaccagtcctgcctgcagtatcccttcacctcagtgcccctgggcgggggtgccccgggcacccgagcctcccgccggtgtgaccgtgccggccgctgggagccaggggactactcccactgtctctacaccaacgacatcaccagggtgctgtacaccttcgtgctgatgcccatcaatgcctccaatgcgctgaccctggctcaccagctgcgcgtgtacacagccgaggccgctagcttttcagacatgatggatgtagtctatgtggctcagatgatccagaaatttttgggttatgtcgaccagatcaaagagctggtagaggtgatggtggacatggccagcaacctgatgctggtggacgagcacctgctgtggctggcccagcgcgaggacaaggcctgcagccgcatcgtgggtgccctggagcgcattgggggggccgccctcagcccccatgcccagcacatctcagtgaatgcgaggaacgtggcattggaggcctacctcatcaagccgcacagctacgtgggcctgacctgcacagccttccagaggagggagggaggggtgccgggcacacggccaggaagccctggccagaaccccccacctgagcccgagcccccagctgaccagcagctccgcttccgctgcaccaccgggaggcccaatgtttctctgtcgtccttccacatcaagaacagcgtggccctggcctccatccagctgcccccgagtctattctcatcccttccggctgccctggctcccccggtgcccccagactgcaccctgcaactgctcgtcttccgaaatggccgcctcttccacagccacagcaacacctcccgccctggagctgctgggcctggcaagaggcgtggcgtggccacccccgtcatcttcgcaggaaccagtggctgtggcgtgggaaacctgacagagccagtggccgtttcgctgcggcactgggctgagggagccgaacctgtggccgcttggtggagccaggaggggcccggggaggctgggggctggacctcggagggctgccagctccgctccagccagcccaatgtcagcgccctgcactgccagcacttgggcaatgtggccgtgctcatggagctgagcgcctttcccagggaggtggggggcgccggggcagggctgcaccccgtggtatacccctgcacggccttgctgctgctctgcctcttcgccaccatcatcacctacatcctcaaccacagctccatccgtgtgtcccggaaaggctggcacatgctgctgaacttgtgcttccacatagccatgacctctgctgtctttgcggggggcatcacactcaccaactaccagatggtctgccaggcggtgggcatcaccctgcactactcctccctatccacgctgctctggatgggcgtgaaggcgcgagtgctccataaggagctcacctggagggcaccccctccgcaagaaggggaccccgctctgcctactcccagtcctatgctccgctgctggctggtgtggcgtccaagccttggcgccttctacatccctgtggctttgattctgctcatcacctggatctatttcctgtgcgccgggctacgcttacggggtcctctggcacagaaccccaaggcgggcaacagcagggcctccctggaggcaggggaggagctgaggggttccaccaggctcaggggcagcggccccctcctgagtgactcaggttcccttcttgctactgggagcgcgcgagtggggacgcccgggcccccggaggatggtgacagcctctattctccgggagtccagctaggggcgctggtgaccacgcacttcctgtacttggccatgtgggcctgcggggctctggcagtgtcccagcgctggctgccccgggtggtgtgcagctgcttgtacggggtggcagcctccgccctgggcctcttcgtcttcactcaccactgtgccaggcggagggacgtgagagcctcgtggcgcgcctgctgcccccctgcctctcccgcggccccccatgccccgccccgggccctgcccgccgccgcagaggacggttccccggtgttcggggaggggcccccctccctcaagtcctccccaagcggcagcagcggccatccgctggctctgggcccctgcaagctcaccaacctgcagctggcccagagtcaggtgtgcgaggcgggggcggcggccggcggggaaggagagccggagccggcgggcacccggggaaacctcgcccaccgccaccccaacaacgtgcaccacgggcgtcgggcgcacaagagccgggccaagggacaccgcgcgggggaggcctgcggcaagaaccggctcaaggccctgcgcgggggcgcggcgggggcgctggagctgctgtccagcgagagcggtagtctgcacaacagccccaccgacagctacctgggcagcagccgcaacagcccgggcgccggcctgcagctggaaggcgagcccatgctcacgccgtccgagggcagcgacaccagcgccgcgccgctttctgaggcgggccgggcaggccagcgccgcagcgccagccgcgacagtctcaagggcggcggcgcgctggagaaggagagccatcgccgctcgtacccgctcaacgccgccagcctaaacggcgcccccaaggggggcaagtacgacgacgtcaccctgatgggcgcggaggtagccagcggcggctgcatgaagaccggactctggaagagcgaaactaccgtctaaggtggggcgggcgacgcggtagacgggctggccacgcggctcgttcccccgctcctcggggccctccaaggtgtctccgtagtcagcaggttggaggcagaggagccgatggctggaggaagcccacaggcggatgttccccacttgcctagagggcatccctctggggtagcgacagacaatcccagaaacacgcataatacatttccgtccagcccggggcagtctgactgtcggtgccctcccaggaacggggaaggcctccgtctgtgtgaaagggcacagcacatcccaggtgcaccctccccaagtactcccaccccgcctactgtccatgcggcctcactgggggccatcagcctcaccagcaaagcagagatgagagcgtgggaactgtgttctttcctccctgccctctactgatttcagcccagcccctgcctagatcctaggtcccttttcctcccgagtttggctggcacgagagctagcccagcacatgaagcaggtgatgttaagtcacaaggtgctgcttttcagatccactatgcaagaggggagggtggggccacgtgaaaggcagctctagacatcaaccagtcctgggggaggggagtgggaaccgggcacaactaggaacaatgccaccattcccacaggagtggtacttaaaccagacagcagggttcagaggtggcacaccgggacaaagctgaggccctgcacctcaacagctgactgccaggtgcctgtgggtgaactgaggggagtagagggagagggcaggtggaactggggcagaatctagtcatgccctaaagctagtcctgtaaacaatggtgccccagaaagctgcaggtggtgtttggagaagcagttacttttcagttacaagacccatctccctagtctcagccttacaacaccacgggactaaggaagagcacttccttgcctccgtaaggccagaggaagaaccatcccaatcatttgatctccagctccacagtagagagaaacctacaaaatgtcaaaccagcttcccgactcccaggagctcaagccaagcccagaggcagtggctggggtccctgcaggtcatgaggggcctatgcctttactccttttaaacaccagcacccgtcttttccccaacctaaaaccaaccaccagcatttcactacaggaccaaatggaaaccgagggaaccctgggtcttgggaagaacaacaggaaaccaaggtctgacctagggttccctcccagtcttcacatcactctggcctcatcaccaaggtgacagaggacacaggggagggggaaaacccacacacactccttggaatgggtcctgttatttatgcttgctgcacagacatattagaagaaaaaaaaaagctttgtattattcttccacatatgctggctgctgtttacacaccctgccaatgccttagcactggagagctttttgcaatatgctggggaaaggggagggagggaatgaaagtgccaaagaaaacatgtttttaagaactcgggttttatacaatagaatgttttctagcagatgcctcttgttttaatatattaaaattttgcaaagccctttgagctac

SEQ ID NO: 276915 - DNA, 7075 bp, Homo sapiens
atccatggcacggagcggcggcggcggcggcagcaggagcccggcgcgatccgctaggtcccagcccagcgcccagcgagcaggcgacgcggaggggccgggcctccagtgtcccgagggccgggcgctgagactccggccgcgcagctgggagctgcccgcgctgcgctgacagccgcgccgacgtcctccccgccggggcgctcgcaggacatgcccccggggcgcggcggcggggaccccggggctcgcctccgcccagggcccccctccacgccctcgggagccccgggcccccgctgagcactcctcccgcacgcctgggtccctccggccggcgcgcagcccggccccagcgctgtgggtccccgcggggcgatgggttgatgggcgccgggggacgcaggatgcggggggcgcccgcgcgcctgctgctgccgctgctgccgtggctcctgctgctcctggcgcccgaggctcggggcgcgcccggctgcccgctatccatccgcagctgcaagtgctcgggggagcggcccaaggggctgagcggcggcgtccctggcccggctcggcggagggtggtgtgcagcggcggggacctcccggagcctcccgagcccggccttctgcctaacggcaccgttaccctgctcttgagcaataacaagatcacggggctccgcaatggctccttcctgggactgtcactgctggagaagctggacctgaggaacaacatcatcagcacagtgcagccgggcgccttcctgggcctgggggagctgaagcgtttagatctctccaacaaccggattggctgtctcacctccgagaccttccagggcctccccaggcttctccgactaaacatatctggaaacatcttctccagtctgcaacctggggtctttgatgagctgccagcccttaaggttgtggacttgggcaccgagttcctgacctgtgactgccacctgcgctggctgctgccctgggcccagaatcgctccctgcagctgtcggaacacacgctctgtgcttaccccagtgccctgcatgctcaggccctgggcagcctccaggaggcccagctctgctgcgagggggccctggagctgcacacacaccacctcatcccgtccctacgccaagtggtgttccagggggatcggctgcccttccagtgctctgccagctacctgggcaacgacacccgcatccgctggtaccacaaccgagcccctgtggagggtgatgagcaggcgggcatcctcctggccgagagcctcatccacgactgcaccttcatcaccagtgagctgacgctgtctcacatcggcgtgtgggcctcaggcgagtgggagtgcaccgtgtccatggcccaaggcaacgccagcaagaaggtggagatcgtggtgctggagacctctgcctcctactgccccgccgagcgtgttgccaacaaccgcggggacttcaggtggccccgaactctggctggcatcacagcctaccagtcctgcctgcagtatcccttcacctcagtgcccctgggcgggggtgccccgggcacccgagcctcccgccggtgtgaccgtgccggccgctgggagccaggggactactcccactgtctctacaccaacgacatcaccagggtgctgtacaccttcgtgctgatgcccatcaatgcctccaatgcgctgaccctggctcaccagctgcgcgtgtacacagccgaggccgctagcttttcagacatgatggatgtagtctatgtggctcagatgatccagaaatttttgggttatgtcgaccagatcaaagagctggtagaggtgatggtggacatggccagcaacctgatgctggtggacgagcacctgctgtggctggcccagcgcgaggacaaggcctgcagccgcatcgtgggtgccctggagcgcattgggggggccgccctcagcccccatgcccagcacatctcagtgaatgcgaggaacgtggcattggaggcctacctcatcaagccgcacagctacgtgggcctgacctgcacagccttccagaggagggagggaggggtgccgggcacacggccaggaagccctggccagaaccccccacctgagcccgagcccccagctgaccagcagctccgcttccgctgcaccaccgggaggcccaatgtttctctgtcgtccttccacatcaagaacagcgtggccctggcctccatccagctgcccccgagtctattctcatcccttccggctgccctggctcccccggtgcccccagactgcaccctgcaactgctcgtcttccgaaatggccgcctcttccacagccacagcaacacctcccgccctggagctgctgggcctggcaagaggcgtggcgtggccacccccgtcatcttcgcaggaaccagtggctgtggcgtgggaaacctgacagagccagtggccgtttcgctgcggcactgggctgagggagccgaacctgtggccgcttggtggagccaggaggggcccggggaggctgggggctggacctcggagggctgccagctccgctccagccagcccaatgtcagcgccctgcactgccagcacttgggcaatgtggccgtgctcatggagctgagcgcctttcccagggaggtggggggcgccggggcagggctgcaccccgtggtatacccctgcacggccttgctgctgctctgcctcttcgccaccatcatcacctacatcctcaaccacagctccatccgtgtgtcccggaaaggctggcacatgctgctgaacttgtgcttccacatagccatgacctctgctgtctttgcggggggcatcacactcaccaactaccagatggtctgccaggcggtgggcatcaccctgcactactcctccctatccacgctgctctggatgggcgtgaaggcgcgagtgctccataaggagctcacctggagggcaccccctccgcaagaaggggaccccgctctgcctactcccagtcctatgctccggttctatttgatcgctggagggattccactcattatctgtggcatcacagctgcagtcaacatccacaactaccgggaccacagcccctactgctggctggtgtggcgtccaagccttggcgccttctacatccctgtggctttgattctgctcatcacctggatctatttcctgtgcgccgggctacgcttacggggtcctctggcacagaaccccaaggcgggcaacagcagggcctccctggaggcaggggaggagctgaggggttccaccaggctcaggggcagcggccccctcctgagtgactcaggttcccttcttgctactgggagcgcgcgagtggggacgcccgggcccccggaggatggtgacagcctctattctccgggagtccagctaggggcgctggtgaccacgcacttcctgtacttggccatgtgggcctgcggggctctggcagtgtcccagcgctggctgccccgggtggtgtgcagctgcttgtacggggtggcagcctccgccctgggcctcttcgtcttcactcaccactgtgccaggcggagggacgtgagagcctcgtggcgcgcctgctgcccccctgcctctcccgcggccccccatgccccgccccgggccctgcccgccgccgcagaggacggttccccggtgttcggggaggggcccccctccctcaagtcctccccaagcggcagcagcggccatccgctggctctgggcccctgcaagctcaccaacctgcagctggcccagagtcaggtgtgcgaggcgggggcggcggccggcggggaaggagagccggagccggcgggcacccggggaaacctcgcccaccgccaccccaacaacgtgcaccacgggcgtcgggcgcacaagagccgggccaagggacaccgcgcgggggaggcctgcggcaagaaccggctcaaggccctgcgcgggggcgcggcgggggcgctggagctgctgtccagcgagagcggtagtctgcacaacagccccaccgacagctacctgggcagcagccgcaacagcccgggcgccggcctgcagctggaaggcgagcccatgctcacgccgtccgagggcagcgacaccagcgccgcgccgctttctgaggcgggccgggcaggccagcgccgcagcgccagccgcgacagtctcaagggcggcggcgcgctggagaaggagagccatcgccgctcgtacccgctcaacgccgccagcctaaacggcgcccccaaggggggcaagtacgacgacgtcaccctgatgggcgcggaggtagccagcggcggctgcatgaagaccggactctggaagagcgaaactaccgtctaaggtggggcgggcgacgcggtagacgggctggccacgcggctcgttcccccgctcctcggggccctccaaggtgtctccgtagtcagcaggttggaggcagaggagccgatggctggaggaagcccacaggcggatgttccccacttgcctagagggcatccctctggggtagcgacagacaatcccagaaacacgcataatacatttccgtccagcccggggcagtctgactgtcggtgccctcccaggaacggggaaggcctccgtctgtgtgaaagggcacagcacatcccaggtgcaccctccccaagtactcccaccccgcctactgtccatgcggcctcactgggggccatcagcctcaccagcaaagcagagatgagagcgtgggaactgtgttctttcctccctgccctctactgatttcagcccagcccctgcctagatcctaggtcccttttcctcccgagtttggctggcacgagagctagcccagcacatgaagcaggtgatgttaagtcacaaggtgctgcttttcagatccactatgcaagaggggagggtggggccacgtgaaaggcagctctagacatcaaccagtcctgggggaggggagtgggaaccgggcacaactaggaacaatgccaccattcccacaggagtggtacttaaaccagacagcagggttcagaggtggcacaccgggacaaagctgaggccctgcacctcaacagctgactgccaggtgcctgtgggtgaactgaggggagtagagggagagggcaggtggaactggggcagaatctagtcatgccctaaagctagtcctgtaaacaatggtgccccagaaagctgcaggtggtgtttggagaagcagttacttttcagttacaagacccatctccctagtctcagccttacaacaccacgggactaaggaagagcacttccttgcctccgtaaggccagaggaagaaccatcccaatcatttgatctccagctccacagtagagagaaacctacaaaatgtcaaaccagcttcccgactcccaggagctcaagccaagcccagaggcagtggctggggtccctgcaggtcatgaggggcctatgcctttactccttttaaacaccagcacccgtcttttccccaacctaaaaccaaccaccagcatttcactacaggaccaaatggaaaccgagggaaccctgggtcttgggaagaacaacaggaaaccaaggtctgacctagggttccctcccagtcttcacatcactctggcctcatcaccaaggtgacagaggacacaggggagggggaaaacccacacacactccttggaatgggtcctgttatttatgcttgctgcacagacatattagaagaaaaaaaaaagctttgtattattcttcccccaggtgcaccctccccaagtactcccaccccgcctactgtccatgcggcctcactggggccatcagcctcaccagcaaagcagagatgggagggagggaatgaaagtgccaaagaaaacatgtttttaagaactcgggttttatacaatagaatgttttctagcagatgcctcttgttttaatatattaaaattttgcaaagccctttgagctactgccttagtctacccactgtccttttgttatgaggtagaggatctcatgacaccatacacacaaacccatcattgcctgtgaatgcacgtagggccagaattccccagttcccgctcctctgagggttgatactgctgggaatgccaaccactccacaagcagagggaagccccctcaggcctgcaggaggagccgcagcagtgtgtccaattcaaaccagcagcaaagagcctgacattttcccatccatctatgaggaaagccatctcacagaacatggacataggcaacttgctctcccacaccaagggatgggaatctctcctacctatagtcatccctgcactcctgactttactccaggacccagggtccaactaatggcagagcccctcttggttccttcaaacaagaaaagcaatacctacggactggtgtacacttccatccttggttataacaggaatgttatcaagctgtcagaacaggatgaagtgctcccagtggatatccatcagggagggttagggacactcgtggcagcctgtctagcagcctgggctctctgaaagtccctaacttcctgaggggtacgcaaatactgttctatttcactatcagaaatgttctcatctccagtgacagtggagacagggggtacagggcagatccgcttcggggacttcaacatgcagggtggcaagagaagggcaggactggccggccgcttcccctggggtaaacctaaggaattatttcccacctccccttctccttgcccctgtccccaccccggtggctccttctctcgggtctccacttctgctgtcccatcccgaaaggcagagcggaccagtgactggcggtgctggagaaggtcaccgatgtgcttcaccacagaccgtttgtcaagtctcagaactcgtaaccaggccagctgctcagccatccgcagcagcacagccagcagctcctgcaggcgggaggacgccgggtagggcaggtccacatttgccaatttacaaaatcgggcaaggga

SEQ ID NO: 276916 - DNA, 5974 bp, Homo sapiens
atccatggcacggagcggcggcggcggcggcagcaggagcccggcgcgatccgctaggtcccagcccagcgcccagcgagcaggcgacgcggaggggccgggcctccagtgtcccgagggccgggcgctgagactccggccgcgcagctgggagctgcccgcgctgcgctgacagccgcgccgacgtcctccccgccggggcgctcgcaggacatgcccccggggcgcggcggcggggaccccggggctcgcctccgcccagggcccccctccacgccctcgggagccccgggcccccgctgagcactcctcccgcacgcctgggtccctccggccggcgcgcagcccggccccagcgctgtgggtccccgcggggcgatgggttgatgggcgccgggggacgcaggatgcggggggcgcccgcgcgcctgctgctgccgctgctgccgtggctcctgctgctcctggcgcccgaggctcggggcgcgcccggctgcccgctatccatccgcagctgcaagtgctcgggggagcggcccaaggggctgagcggcggcgtccctggcccggctcggcggagggtggtgtgcagcggcggggacctcccggagcctcccgagcccggccttctgcctaacggcaccgttaccctgctcttgagcaataacaagatcacggggctccgcaatggctccttcctgggactgtcactgctggagaagctggacctgaggaacaacatcatcagcacagtgcagccgggcgccttcctgggcctgggggagctgaagcgtttagatctctccaacaaccggattggctgtctcacctccgagaccttccagggcctccccaggcttctccgactaaacatatctggaaacatcttctccagtctgcaacctggggtctttgatgagctgccagcccttaaggttgtggacttgggcaccgagttcctgacctgtgactgccacctgcgctggctgctgccctgggcccagaatcgctccctgcagctgtcggaacacacgctctgtgcttaccccagtgccctgcatgctcaggccctgggcagcctccaggaggcccagctctgctgcgagggggccctggagctgcacacacaccacctcatcccgtccctacgccaagtggtgttccagggggatcggctgcccttccagtgctctgccagctacctgggcaacgacacccgcatccgctggtaccacaaccgagcccctgtggagggtgatgagcaggcgggcatcctcctggccgagagcctcatccacgactgcaccttcatcaccagtgagctgacgctgtctcacatcggcgtgtgggcctcaggcgagtgggagtgcaccgtgtccatggcccaaggcaacgccagcaagaaggtggagatcgtggtgctggagacctctgcctcctactgccccgccgagcgtgttgccaacaaccgcggggacttcaggtggccccgaactctggctggcatcacagcctaccagtcctgcctgcagtatcccttcacctcagtgcccctgggcgggggtgccccgggcacccgagcctcccgccggtgtgaccgtgccggccgctgggagccaggggactactcccactgtctctacaccaacgacatcaccagggtgctgtacaccttcgtgctgatgcccatcaatgcctccaatgcgctgaccctggctcaccagctgcgcgtgtacacagccgaggccgctagcttttcagacatgatggatgtagtctatgtggctcagatgatccagaaatttttgggttatgtcgaccagatcaaagagctggtagaggtgatggtggacatggccagcaacctgatgctggtggacgagcacctgctgtggctggcccagcgcgaggacaaggcctgcagccgcatcgtgggtgccctggagcgcattgggggggccgccctcagcccccatgcccagcacatctcagtgaatgcgaggaacgtggcattggaggcctacctcatcaagccgcacagctacgtgggcctgacctgcacagccttccagaggagggagggaggggtgccgggcacacggccaggaagccctggccagaaccccccacctgagcccgagcccccagctgaccagcagctccgcttccgctgcaccaccgggaggcccaatgtttctctgtcgtccttccacatcaagaacagcgtggccctggcctccatccagctgcccccgagtctattctcatcccttccggctgccctggctcccccggtgcccccagactgcaccctgcaactgctcgtcttccgaaatggccgcctcttccacagccacagcaacacctcccgccctggagctgctgggcctggcaagaggcgtggcgtggccacccccgtcatcttcgcaggaaccagtggctgtggcgtgggaaacctgacagagccagtggccgtttcgctgcggcactgggctgagggagccgaacctgtggccgcttggtggagccaggaggggcccggggaggctgggggctggacctcggagggctgccagctccgctccagccagcccaatgtcagcgccctgcactgccagcacttgggcaatgtggccgtgctcatggagctgagcgcctttcccagggaggtggggggcgccggggcagggctgcaccccgtggtatacccctgcacggccttgctgctgctctgcctcttcgccaccatcatcacctacatcctcaaccacagctccatccgtgtgtcccggaaaggctggcacatgctgctgaacttgtgcttccacatagccatgacctctgctgtctttgcggggggcatcacactcaccaactaccagatggtctgccaggcggtgggcatcaccctgcactactcctccctatccacgctgctctggatgggcgtgaaggcgcgagtgctccataaggagctcacctggagggcaccccctccgcaagaaggggaccccgctctgcctactcccagtcctatgctccggttctatttgatcgctggagggattccactcattatctgtggcatcacagctgcagtcaacatccacaactaccgggaccacagcccctactgctggctggtgtggcgtccaagccttggcgccttctacatccctgtggctttgattctgctcatcacctggatctatttcctgtgcgccgggctacgcttacggggtcctctggcacagaaccccaaggcgggcaacagcagggcctccctggaggcaggggaggagctgaggggttccaccaggctcaggggcagcggccccctcctgagtgactcaggttcccttcttgctactgggagcgcgcgagtggggacgcccgggcccccggaggatggtgacagcctctattctccgggagtccagctaggggcgctggtgaccacgcacttcctgtacttggccatgtgggcctgcggggctctggcagtgtcccagcgctggctgccccgggtggtgtgcagctgcttgtacggggtggcagcctccgccctgggcctcttcgtcttcactcaccactgtgccaggcggagggacgtgagagcctcgtggcgcgcctgctgcccccctgcctctcccgcggccccccatgccccgccccgggccctgcccgccgccgcagaggacggttccccggtgttcggggaggggcccccctccctcaagtcctccccaagcggcagcagcggccatccgctggctctgggcccctgcaagctcaccaacctgcagctggcccagagtcaggtgtgcgaggcgggggcggcggccggcggggaaggagagccggagccggcgggcacccggggaaacctcgcccaccgccaccccaacaacgtgcaccacgggcgtcgggcgcacaagagccgggccaagggacaccgcgcgggggaggcctgcggcaagaaccggctcaaggccctgcgcgggggcgcggcgggggcgctggagctgctgtccagcgagagcggtagtctgcacaacagccccaccgacagctacctgggcagcagccgcaacagcccgggcgccggcctgcagctggaaggcgagcccatgctcacgccgtccgagggcagcgacaccagcgccgcgccgctttctgaggcgggccgggcaggccagcgccgcagcgccagccgcgacagtctcaagggcggcggcgcgctggagaaggagagccatcgccgctcgtacccgctcaacgccgccagcctaaacggcgcccccaaggggggcaagtacgacgacgtcaccctgatgggcgcggaggtagccagcggcggctgcatgaagaccggactctggaagagcgaaactaccgtctaaggtggggcgggcgacgcggtagacgggctggccacgcggctcgttcccccgctcctcggggccctccaaggtgtctccgtagtcagcaggttggaggcagaggagccgatggctggaggaagcccacaggcggatgttccccacttgcctagagggcatccctctggggtagcgacagacaatcccagaaacacgcataatacatttccgtccagcccggggcagtctgactgtcggtgccctcccaggaacggggaaggcctccgtctgtgtgaaagggcacagcacatcccaggtgcaccctccccaagtactcccaccccgcctactgtccatgcggcctcactgggggccatcagcctcaccagcaaagcagagatgagagcgtgggaactgtgttctttcctccctgccctctactgatttcagcccagcccctgcctagatcctaggtcccttttcctcccgagtttggctggcacgagagctagcccagcacatgaagcaggtgatgttaagtcacaaggtgctgcttttcagatccactatgcaagaggggagggtggggccacgtgaaaggcagctctagacatcaaccagtcctgggggaggggagtgggaaccgggcacaactaggaacaatgccaccattcccacaggagtggtacttaaaccagacagcagggttcagaggtggcacaccgggacaaagctgaggccctgcacctcaacagctgactgccaggtgcctgtgggtgaactgaggggagtagagggagagggcaggtggaactggggcagaatctagtcatgccctaaagctagtcctgtaaacaatggtgccccagaaagctgcaggtggtgtttggagaagcagttacttttcagttacaagacccatctccctagtctcagccttacaacaccacgggactaaggaagagcacttccttgcctccgtaaggccagaggaagaaccatcccaatcatttgatctccagctccacagtagagagaaacctacaaaatgtcaaaccagcttcccgactcccaggagctcaagccaagcccagaggcagtggctggggtccctgcaggtcatgaggggcctatgcctttactccttttaaacaccagcacccgtcttttccccaacctaaaaccaaccaccagcatttcactacaggaccaaatggaaaccgagggaaccctgggtcttgggaagaacaacaggaaaccaaggtctgacctagggttccctcccagtcttcacatcactctggcctcatcaccaaggtgacagaggacacaggggagggggaaaacccacacacactccttggaatgggtcctgttatttatgcttgctgcacagacatattagaagaaaaaaaaaagctttgtattattcttccacatatgctggctgctgtttacacaccctgccaatgccttagcactggagagctttttgcaatatgctggggaaaggggagggagggaatgaaagtgccaaagaaaacatgtttttaagaactcgggttttatacaatagaatgttttctagcaga

SEQ ID NO: 276917 - DNA, 6717 bp, Homo sapiens
atccatggcacggagcggcggcggcggcggcagcaggagcccggcgcgatccgctaggtcccagcccagcgcccagcgagcaggcgacgcggaggggccgggcctccagtgtcccgagggccgggcgctgagactccggccgcgcagctgggagctgcccgcgctgcgctgacagccgcgccgacgtcctccccgccggggcgctcgcaggacatgcccccggggcgcggcggcggggaccccggggctcgcctccgcccagggcccccctccacgccctcgggagccccgggcccccgctgagcactcctcccgcacgcctgggtccctccggccggcgcgcagcccggccccagcgctgtgggtccccgcggggcgatgggttgatgggcgccgggggacgcaggatgcggggggcgcccgcgcgcctgctgctgccgctgctgccgtggctcctgctgctcctggcgcccgaggctcggggcgcgcccggctgcccgctatccatccgcagctgcaagtgctcgggggagcggcccaaggggctgagcggcggcgtccctggcccggctcggcggagggtggtgtgcagcggcggggacctcccggagcctcccgagcccggccttctgcctaacggcaccgttaccctgctcttgagcaataacaagatcacggggctccgcaatggctccttcctgggactgtcactgctggagaagctggacctgaggaacaacatcatcagcacagtgcagccgggcgccttcctgggcctgggggagctgaagcgtttagatctctccaacaaccggattggctgtctcacctccgagaccttccagggcctccccaggcttctccgactaaacatatctggaaacatcttctccagtctgcaacctggggtctttgatgagctgccagcccttaaggttgtggacttgggcaccgagttcctgacctgtgactgccacctgcgctggctgctgccctgggcccagaatcgctccctgcagctgtcggaacacacgctctgtgcttaccccagtgccctgcatgctcaggccctgggcagcctccaggaggcccagctctgctgcgagggggccctggagctgcacacacaccacctcatcccgtccctacgccaagtggtgttccagggggatcggctgcccttccagtgctctgccagctacctgggcaacgacacccgcatccgctggtaccacaaccgagcccctgtggagggtgatgagcaggcgggcatcctcctggccgagagcctcatccacgactgcaccttcatcaccagtgagctgacgctgtctcacatcggcgtgtgggcctcaggcgagtgggagtgcaccgtgtccatggcccaaggcaacgccagcaagaaggtggagatcgtggtgctggagacctctgcctcctactgccccgccgagcgtgttgccaacaaccgcggggacttcaggtggccccgaactctggctggcatcacagcctaccagtcctgcctgcagtatcccttcacctcagtgcccctgggcgggggtgccccgggcacccgagcctcccgccggtgtgaccgtgccggccgctgggagccaggggactactcccactgtctctacaccaacgacatcaccagggtgctgtacaccttcgtgctgatgcccatcaatgcctccaatgcgctgaccctggctcaccagctgcgcgtgtacacagccgaggccgctagcttttcagacatgatggatgtagtctatgtggctcagatgatccagaaatttttgggttatgtcgaccagatcaaagagctggtagaggtgatggtggacatggccagcaacctgatgctggtggacgagcacctgctgtggctggcccagcgcgaggacaaggcctgcagccgcatcgtgggtgccctggagcgcattgggggggccgccctcagcccccatgcccagcacatctcagtgaatgcgaggaacgtggcattggaggcctacctcatcaagccgcacagctacgtgggcctgacctgcacagccttccagaggagggagggaggggtgccgggcacacggccaggaagccctggccagaaccccccacctgagcccgagcccccagctgaccagcagctccgcttccgctgcaccaccgggaggcccaatgtttctctgtcgtccttccacatcaagaacagcgtggccctggcctccatccagctgcccccgagtctattctcatcccttccggctgccctggctcccccggtgcccccagactgcaccctgcaactgctcgtcttccgaaatggccgcctcttccacagccacagcaacacctcccgccctggagctgctgggcctggcaagaggcgtggcgtggccacccccgtcatcttcgcaggaaccagtggctgtggcgtgggaaacctgacagagccagtggccgtttcgctgcggcactgggctgagggagccgaacctgtggccgcttggtggagccaggaggggcccggggaggctgggggctggacctcggagggctgccagctccgctccagccagcccaatgtcagcgccctgcactgccagcacttgggcaatgtggccgtgctcatggagctgagcgcctttcccagggaggtggggggcgccggggcagggctgcaccccgtggtatacccctgcacggccttgctgctgctctgcctcttcgccaccatcatcacctacatcctcaaccacagctccatccgtgtgtcccggaaaggctggcacatgctgctgaacttgtgcttccacatagccatgacctctgctgtctttgcggggggcatcacactcaccaactaccagatggtctgccaggcggtgggcatcaccctgcactactcctccctatccacgctgctctggatgggcgtgaaggcgcgagtgctccataaggagctcacctggagggcaccccctccgcaagaaggggaccccgctctgcctactcccagtcctatgctccggttctatttgatcgctggagggattccactcattatctgtggcatcacagctgcagtcaacatccacaactaccgggaccacagcccctactgctggctggtgtggcgtccaagccttggcgccttctacatccctgtggctttgattctgctcatcacctggatctatttcctgtgcgccgggctacgcttacggggtcctctggcacagaaccccaaggcgggcaacagcagggcctccctggaggcaggggaggagctgaggggttccaccaggctcaggggcagcggccccctcctgagtgactcaggttcccttcttgctactgggagcgcgcgagtggggacgcccgggcccccggaggatggtgacagcctctattctccgggagtccagctaggggcgctggtgaccacgcacttcctgtacttggccatgtgggcctgcggggctctggcagtgtcccagcgctggctgccccgggtggtgtgcagctgcttgtacggggtggcagcctccgccctgggcctcttcgtcttcactcaccactgtgccaggcggagggacgtgagagcctcgtggcgcgcctgctgcccccctgcctctcccgcggccccccatgccccgccccgggccctgcccgccgccgcagaggacggttccccggtgttcggggaggggcccccctccctcaagtcctccccaagcggcagcagcggccatccgctggctctgggcccctgcaagctcaccaacctgcagctggcccagagtcaggtgtgcgaggcgggggcggcggccggcggggaaggagagccggagccggcgggcacccggggaaacctcgcccaccgccaccccaacaacgtgcaccacgggcgtcgggcgcacaagagccgggccaagggacaccgcgcgggggaggcctgcggcaagaaccggctcaaggccctgcgcgggggcgcggcgggggcgctggagctgctgtccagcgagagcggtagtctgcacaacagccccaccgacagctacctgggcagcagccgcaacagcccgggcgccggcctgcagctggaaggcgagcccatgctcacgccgtccgagggcagcgacaccagcgccgcgccgctttctgaggcgggccgggcaggccagcgccgcagcgccagccgcgacagtctcaagggcggcggcgcgctggagaaggagagccatcgccgctcgtacccgctcaacgccgccagcctaaacggcgcccccaaggggggcaagtacgacgacgtcaccctgatgggcgcggaggtagccagcggcggctgcatgaagaccggactctggaagagcgaaactaccgtctaaggtggggcgggcgacgcggtagacgggctggccacgcggctcgttcccccgctcctcggggccctccaaggtgtctccgtagtcagcaggttggaggcagaggagccgatggctggaggaagcccacaggcggatgttccccacttgcctagagggcatccctctggggtagcgacagacaatcccagaaacacgcataatacatttccgtccagcccggggcagtctgactgtcggtgccctcccaggaacggggaaggcctccgtctgtgtgaaagggcacagcacatcccaggtgcaccctccccaagtactcccaccccgcctactgtccatgcggcctcactgggggccatcagcctcaccagcaaagcagagatgagagcgtgggaactgtgttctttcctccctgccctctactgatttcagcccagcccctgcctagatcctaggtcccttttcctcccgagtttggctggcacgagagctagcccagcacatgaagcaggtgatgttaagtcacaaggtgctgcttttcagatccactatgcaagaggggagggtggggccacgtgaaaggcagctctagacatcaaccagtcctgggggaggggagtgggaaccgggcacaactaggaacaatgccaccattcccacaggagtggtacttaaaccagacagcagggttcagaggtggcacaccgggacaaagctgaggccctgcacctcaacagctgactgccaggtgcctgtgggtgaactgaggggagtagagggagagggcaggtggaactggggcagaatctagtcatgccctaaagctagtcctgtaaacaatggtgccccagaaagctgcaggtggtgtttggagaagcagttacttttcagttacaagacccatctccctagtctcagccttacaacaccacgggactaaggaagagcacttccttgcctccgtaaggccagaggaagaaccatcccaatcatttgatctccagctccacagtagagagaaacctacaaaatgtcaaaccagcttcccgactcccaggagctcaagccaagcccagaggcagtggctggggtccctgcaggtcatgaggggcctatgcctttactccttttaaacaccagcacccgtcttttccccaacctaaaaccaaccaccagcatttcactacaggaccaaatggaaaccgagggaaccctgggtcttgggaagaacaacaggaaaccaaggtctgacctagggttccctcccagtcttcacatcactctggcctcatcaccaaggtgacagaggacacaggggagggggaaaacccacacacactccttggaatgggtcctgttatttatgcttgctgcacagacatattagaagaaaaaaaaaagctttgtattattcttccacatatgctggctgctgtttacacaccctgccaatgccttagcactggagagctttttgcaatatgctggggaaaggggagggagggaatgaaagtgccaaagaaaacatgtttttaagaactcgggttttatacaatagaatgttttctagcagatgcctcttgttttaatatattaaaattttgcaaagccctttgagctactgccttagtctacccactgtccttttgttatgaggtagaggatctcatgacaccatacacacaaacccatcattgcctgtgaatgcacgtagggccagaattccccagttcccgctcctctgagggttgatactgctgggaatgccaaccactccacaagcagagggaagccccggagggttagggacactcgtggcagcctgtctagcagcctgggctctctgaaagtccctaacttcctgaggggtacgcaaatactgttctatttcactatcagaaatgttctcatctccagtgacagtggagacagggggtacagggcagatccgcttcggggacttcaacatgcagggtggcaagagaagggcaggactggccggccgcttcccctggggtaaacctaaggaattatttcccacctccccttctccttgcccctgtccccaccccggtggctccttctctcgggtctccacttctgctgtcccatcccgaaaggcagagcggaccagtgactggcggtgctggagaaggtcaccgatgtgcttcaccacagaccgtttgtcaagtctcagaactcgtaaccaggccagctgctcagccatccgcagcagcacagccagcagctcctgcaggcgggaggacgccgggtagggcaggtccacatttgccaatttacaaaatcgggcaaggga

SEQ ID NO: 276918 - DNA, 6032 bp, Homo sapiens
atccatggcacggagcggcggcggcggcggcagcaggagcccggcgcgatccgctaggtcccagcccagcgcccagcgagcaggcgacgcggaggggccgggcctccagtgtcccgagggccgggcgctgagactccggccgcgcagctgggagctgcccgcgctgcgctgacagccgcgccgacgtcctccccgccggggcgctcgcaggacatgcccccggggcgcggcggcggggaccccggggctcgcctccgcccagggcccccctccacgccctcgggagccccgggcccccgctgagcactcctcccgcacgcctgggtccctccggccggcgcgcagcccggccccagcgctgtgggtccccgcggggcgatgggttgatgggcgccgggggacgcaggatgcggggggcgcccgcgcgcctgctgctgccgctgctgccgtggctcctgctgctcctggcgcccgaggctcggggcgcgcccggctgcccgctatccatccgcagctgcaagtgctcgggggagcggcccaaggggctgagcggcggcgtccctggcccggctcggcggagggtggtgtgcagcggcggggacctcccggagcctcccgagcccggccttctgcctaacggcaccgttaccctgctcttgagcaataacaagatcacggggctccgcaatggctccttcctgggactgtcactgctggagaagctggacctgaggaacaacatcatcagcacagtgcagccgggcgccttcctgggcctgggggagctgaagcgtttagatctctccaacaaccggattggctgtctcacctccgagaccttccagggcctccccaggcttctccgactaaacatatctggaaacatcttctccagtctgcaacctggggtctttgatgagctgccagcccttaaggttgtggacttgggcaccgagttcctgacctgtgactgccacctgcgctggctgctgccctgggcccagaatcgctccctgcagctgtcggaacacacgctctgtgcttaccccagtgccctgcatgctcaggccctgggcagcctccaggaggcccagctctgctgcgagggggccctggagctgcacacacaccacctcatcccgtccctacgccaagtggtgttccagggggatcggctgcccttccagtgctctgccagctacctgggcaacgacacccgcatccgctggtaccacaaccgagcccctgtggagggtgatgagcaggcgggcatcctcctggccgagagcctcatccacgactgcaccttcatcaccagtgagctgacgctgtctcacatcggcgtgtgggcctcaggcgagtgggagtgcaccgtgtccatggcccaaggcaacgccagcaagaaggtggagatcgtggtgctggagacctctgcctcctactgccccgccgagcgtgttgccaacaaccgcggggacttcaggtggccccgaactctggctggcatcacagcctaccagtcctgcctgcagtatcccttcacctcagtgcccctgggcgggggtgccccgggcacccgagcctcccgccggtgtgaccgtgccggccgctgggagccaggggactactcccactgtctctacaccaacgacatcaccagggtgctgtacaccttcgtgctgatgcccatcaatgcctccaatgcgctgaccctggctcaccagctgcgcgtgtacacagccgaggccgctagcttttcagacatgatggatgtagtctatgtggctcagatgatccagaaatttttgggttatgtcgaccagatcaaagagctggtagaggtgatggtggacatggccagcaacctgatgctggtggacgagcacctgctgtggctggcccagcgcgaggacaaggcctgcagccgcatcgtgggtgccctggagcgcattgggggggccgccctcagcccccatgcccagcacatctcagtgaatgcgaggaacgtggcattggaggcctacctcatcaagccgcacagctacgtgggcctgacctgcacagccttccagaggagggagggaggggtgccgggcacacggccaggaagccctggccagaaccccccacctgagcccgagcccccagctgaccagcagctccgcttccgctgcaccaccgggaggcccaatgtttctctgtcgtccttccacatcaagaacagcgtggccctggcctccatccagctgcccccgagtctattctcatcccttccggctgccctggctcccccggtgcccccagactgcaccctgcaactgctcgtcttccgaaatggccgcctcttccacagccacagcaacacctcccgccctggagctgctgggcctggcaagaggcgtggcgtggccacccccgtcatcttcgcaggaaccagtggctgtggcgtgggaaacctgacagagccagtggccgtttcgctgcggcactgggctgagggagccgaacctgtggccgcttggtggagccaggaggggcccggggaggctgggggctggacctcggagggctgccagctccgctccagccagcccaatgtcagcgccctgcactgccagcacttgggcaatgtggccgtgctcatggagctgagcgcctttcccagggaggtggggggcgccggggcagggctgcaccccgtggtatacccctgcacggccttgctgctgctctgcctcttcgccaccatcatcacctacatcctcaaccacagctccatccgtgtgtcccggaaaggctggcacatgctgctgaacttgtgcttccacatagccatgacctctgctgtctttgcggggggcatcacactcaccaactaccagatggtctgccaggcggtgggcatcaccctgcactactcctccctatccacgctgctctggatgggcgtgaaggcgcgagtgctccataaggagctcacctggagggcaccccctccgcaagaaggggaccccgctctgcctactcccagtcctatgctccggttctatttgatcgctggagggattccactcattatctgtggcatcacagctgcagtcaacatccacaactaccgggaccacagcccctactgctggctggtgtggcgtccaagccttggcgccttctacatccctgtggctttgattctgctcatcacctggatctatttcctgtgcgccgggctacgcttacggggtcctctggcacagaaccccaaggcgggcaacagcagggcctccctggaggcaggggaggagctgaggggttccaccaggctcaggggcagcggccccctcctgagtgactcaggttcccttcttgctactgggagcgcgcgagtggggacgcccgggcccccggaggatggtgacagcctctattctccgggagtccagctaggggcgctggtgaccacgcacttcctgtacttggccatgtgggcctgcggggctctggcagtgtcccagcgctggctgccccgggtggtgtgcagctgcttgtacggggtggcagcctccgccctgggcctcttcgtcttcactcaccactgtgccaggcggagggacgtgagagcctcgtggcgcgcctgctgcccccctgcctctcccgcggccccccatgccccgccccgggccctgcccgccgccgcagaggacggttccccggtgttcggggaggggcccccctccctcaagtcctccccaagcggcagcagcggccatccgctggctctgggcccctgcaagctcaccaacctgcagctggcccagagtcaggtgtgcgaggcgggggcggcggccggcggggaaggagagccggagccggcgggcacccggggaaacctcgcccaccgccaccccaacaacgtgcaccacgggcgtcgggcgcacaagagccgggccaagggacaccgcgcgggggaggcctgcggcaagaaccggctcaaggccctgcgcgggggcgcggcgggggcgctggagctgctgtccagcgagagcggtagtctgcacaacagccccaccgacagctacctgggcagcagccgcaacagcccgggcgccggcctgcagctggaaggcgagcccatgctcacgccgtccgagggcagcgacaccagcgccgcgccgctttctgaggcgggccgggcaggccagcgccgcagcgccagccgcgacagtctcaagggcggcggcgcgctggagaaggagagccatcgccgctcgtacccgctcaacgccgccagcctaaacggcgcccccaaggggggcaagtacgacgacgtcaccctgatgggcgcggaggtagccagcggcggctgcatgaagaccggactctggaagagcgaaactaccgtctaaggtggggcgggcgacgcggtagacgggctggccacgcggctcgttcccccgctcctcggggccctccaaggtgtctccgtagtcagcaggttggaggcagaggagccgatggctggaggaagcccacaggcggatgttccccacttgcctagagggcatccctctggggtagcgacagacaatcccagaaacacgcataatacatttccgtccagcccggggcagtctgactgtcggtgccctcccaggaacggggaaggcctccgtctgtgtgaaagggcacagcacatcccaggtgcaccctccccaagtactcccaccccgcctactgtccatgcggcctcactgggggccatcagcctcaccagcaaagcagagatgagagcgtgggaactgtgttctttcctccctgccctctactgatttcagcccagcccctgcctagatcctaggtcccttttcctcccgagtttggctggcacgagagctagcccagcacatgaagcaggtgatgttaagtcacaaggtgctgcttttcagatccactatgcaagaggggagggtggggccacgtgaaaggcagctctagacatcaaccagtcctgggggaggggagtgggaaccgggcacaactaggaacaatgccaccattcccacaggagtggtacttaaaccagacagcagggttcagaggtggcacaccgggacaaagctgaggccctgcacctcaacagctgactgccaggtgcctgtgggtgaactgaggggagtagagggagagggcaggtggaactggggcagaatctagtcatgccctaaagctagtcctgtaaacaatggtgccccagaaagctgcaggtggtgtttggagaagcagttacttttcagttacaagacccatctccctagtctcagccttacaacaccacgggactaaggaagagcacttccttgcctccgtaaggccagaggaagaaccatcccaatcatttgatctccagctccacagtagagagaaacctacaaaatgtcaaaccagcttcccgactcccaggagctcaagccaagcccagaggcagtggctggggtccctgcaggtcatgaggggcctatgcctttactccttttaaacaccagcacccgtcttttccccaacctaaaaccaaccaccagcatttcactacaggaccaaatggaaaccgagggaaccctgggtcttgggaagaacaacaggaaaccaaggtctgacctagggttccctcccagtcttcacatcactctggcctcatcaccaaggtgacagaggacacaggggagggggaaaacccacacacactccttggaatgggtcctgttatttatgcttgctgcacagacatattagaagaaaaaaaaaagctttgtattattcttccagccccaaagaggcagattgctgatcctgcccctctatgcgttagccatgaaatgttttatgctaattcatagggctaacattgggatagggtgcaatggcctgatttttagatccatgatcagtcatcgtttttttcaaaaataggatttttaccgtttccctctctgttcagtgtagtctaatggtgtttaacccttttcattcaaaatttc

SEQ ID NO: 276919 - DNA, 5474 bp, Homo sapiens
atccatggcacggagcggcggcggcggcggcagcaggagcccggcgcgatccgctaggtcccagcccagcgcccagcgagcaggcgacgcggaggggccgggcctccagtgtcccgagggccgggcgctgagactccggccgcgcagctgggagctgcccgcgctgcgctgacagccgcgccgacgtcctccccgccggggcgctcgcaggacatgcccccggggcgcggcggcggggaccccggggctcgcctccgcccagggcccccctccacgccctcgggagccccgggcccccgctgagcactcctcccgcacgcctgggtccctccggccggcgcgcagcccggccccagcgctgtgggtccccgcggggcgatgggttgatgggcgccgggggacgcaggatgcggggggcgcccgcgcgcctgctgctgccgctgctgccgtggctcctgctgctcctggcgcccgaggctcggggcgcgcccggctgcccgctatccatccgcagctgcaagtgctcgggggagcggcccaaggggctgagcggcggcgtccctggcccggctcggcggagggtggtgtgcagcggcggggacctcccggagcctcccgagcccggccttctgcctaacggcaccgttaccctgctcttgagcaataacaagatcacggggctccgcaatggctccttcctgggactgtcactgctggagaagctggacctgaggaacaacatcatcagcacagtgcagccgggcgccttcctgggcctgggggagctgaagcgtttagatctctccaacaaccggattggctgtctcacctccgagaccttccagggcctccccaggcttctccgactaaacatatctggaaacatcttctccagtctgcaacctggggtctttgatgagctgccagcccttaaggttgtggacttgggcaccgagttcctgacctgtgactgccacctgcgctggctgctgccctgggcccagaatcgctccctgcagctgtcggaacacacgctctgtgcttaccccagtgccctgcatgctcaggccctgggcagcctccaggaggcccagctctgctgcgagggggccctggagctgcacacacaccacctcatcccgtccctacgccaagtggtgttccagggggatcggctgcccttccagtgctctgccagctacctgggcaacgacacccgcatccgctggtaccacaaccgagcccctgtggagggtgatgagcaggcgggcatcctcctggccgagagcctcatccacgactgcaccttcatcaccagtgagctgacgctgtctcacatcggcgtgtgggcctcaggcgagtgggagtgcaccgtgtccatggcccaaggcaacgccagcaagaaggtggagatcgtggtgctggagacctctgcctcctactgccccgccgagcgtgttgccaacaaccgcggggacttcaggtggccccgaactctggctggcatcacagcctaccagtcctgcctgcagtatcccttcacctcagtgcccctgggcgggggtgccccgggcacccgagcctcccgccggtgtgaccgtgccggccgctgggagccaggggactactcccactgtctctacaccaacgacatcaccagggtgctgtacaccttcgtgctgatgcccatcaatgcctccaatgcgctgaccctggctcaccagctgcgcgtgtacacagccgaggccgctagcttttcagacatgatggatgtagtctatgtggctcagatgatccagaaatttttgggttatgtcgaccagatcaaagagctggtagaggtgatggtggacatggccagcaacctgatgctggtggacgagcacctgctgtggctggcccagcgcgaggacaaggcctgcagccgcatcgtgggtgccctggagcgcattgggggggccgccctcagcccccatgcccagcacatctcagtgaatgcgaggaacgtggcattggaggcctacctcatcaagccgcacagctacgtgggcctgacctgcacagccttccagaggagggagggaggggtgccgggcacacggccaggaagccctggccagaaccccccacctgagcccgagcccccagctgaccagcagctccgcttccgctgcaccaccgggaggcccaatgtttctctgtcgtccttccacatcaagaacagcgtggccctggcctccatccagctgcccccgagtctattctcatcccttccggctgccctggctcccccggtgcccccagactgcaccctgcaactgctcgtcttccgaaatggccgcctcttccacagccacagcaacacctcccgccctggagctgctgggcctggcaagaggcgtggcgtggccacccccgtcatcttcgcaggaaccagtggctgtggcgtgggaaacctgacagagccagtggccgtttcgctgcggcactgggctgagggagccgaacctgtggccgcttggtggagccaggaggggcccggggaggctgggggctggacctcggagggctgccagctccgctccagccagcccaatgtcagcgccctgcactgccagcacttgggcaatgtggccgtgctcatggagctgagcgcctttcccagggaggtggggggcgccggggcagggctgcaccccgtggtatacccctgcacggccttgctgctgctctgcctcttcgccaccatcatcacctacatcctcaaccacagctccatccgtgtgtcccggaaaggctggcacatgctgctgaacttgtgcttccacatagccatgacctctgctgtctttgcggggggcatcacactcaccaactaccagatggtctgccaggcggtgggcatcaccctgcactactcctccctatccacgctgctctggatgggcgtgaaggcgcgagtgctccataaggagctcacctggagggcaccccctccgcaagaaggggaccccgctctgcctactcccagtcctatgctccggttctatttgatcgctggagggattccactcattatctgtggcatcacagctgcagtcaacatccacaactaccgggaccacagcccctactgctggctggtgtggcgtccaagccttggcgccttctacatccctgtggctttgattctgctcatcacctggatctatttcctgtgcgccgggctacgcttacggggtcctctggcacagaaccccaaggcgggcaacagcagggcctccctggaggcaggggaggagctgaggggttccaccaggctcaggggcagcggccccctcctgagtgactcaggttcccttcttgctactgggagcgcgcgagtggggacgcccgggcccccggaggatggtgacagcctctattctccgggagtccagctaggggcgctggtgaccacgcacttcctgtacttggccatgtgggcctgcggggctctggcagtgtcccagcgctggctgccccgggtggtgtgcagctgcttgtacggggtggcagcctccgccctgggcctcttcgtcttcactcaccactgtgccaggcggagggacgtgagagcctcgtggcgcgcctgctgcccccctgcctctcccgcggccccccatgccccgccccgggccctgcccgccgccgcagaggacggttccccggtgttcggggaggggcccccctccctcaagtcctccccaagcggcagcagcggccatccgctggctctgggcccctgcaagctcaccaacctgcagctggcccagagtcaggtgtgcgaggcgggggcggcggccggcggggaaggagagccggagccggcgggcacccggggaaacctcgcccaccgccaccccaacaacgtgcaccacgggcgtcgggcgcacaagagccgggccaagggacaccgcgcgggggaggcctgcggcaagaaccggctcaaggccctgcgcgggggcgcggcgggggcgctggagctgctgtccagcgagagcggtagtctgcacaacagccccaccgacagctacctgggcagcagccgcaacagcccgggcgccggcctgcagctggaaggcgagcccatgctcacgccgtccgagggcagcgacaccagcgccgcgccgctttctgaggcgggccgggcaggccagcgccgcagcgccagccgcgacagtctcaagggcggcggcgcgctggagaaggagagccatcgccgctcgtacccgctcaacgccgccagcctaaacggcgcccccaaggggggcaagtacgacgacgtcaccctgatgggcgcggaggtagccagcggcggctgcatgaagaccggactctggaagagcgaaactaccgtctaaggtggggcgggcgacgcggtagacgggctggccacgcggctcgttcccccgctcctcggggccctccaaggtgtctccgtagtcagcaggttggaggcagaggagccgatggctggaggaagcccacaggcggatgttccccacttgcctagagggcatccctctggggtagcgacagacaatcccagaaacacgcataatacatttccgtccagcccggggcagtctgactgtcggtgccctcccaggaacggggaaggcctccgtctgtgtgaaagggcacagcacatcccaggtgcaccctccccaagtactcccaccccgcctactgtccatgcggcctcactgggggccatcagcctcaccagcaaagcagagatgagagcgtgggaactgtgttctttcctccctgccctctactgatttcagcccagcccctgcctagatcctaggtcccttttcctcccgagtttggctggcacgagagctagcccagcacatgaagcaggtgatgttaagtcacaaggtgctgcttttcagatccactatgcaagaggggagggtggggccacgtgaaaggcagctctagacatcaaccagtcctgggggaggggagtgggaaccgggcacaactaggaacaatgccaccattcccacaggagtggtacttaaaccagacagcagggttcagaggtggcacaccgggacaaagctgaggccctgcacctcaacagctgactgccaggtgcctgtgggtgaactgaggggagtagagggagagggcaggtggaactggggcagaatctagtcatgccctaaagctagtcctgtaaacaatggtgccccagaaagctgcaggtggtgtttggagaagcagttacttttcagttacaagacccatctccctagtctcagccttacaacaccacgggactaaggaagagcacttccttgcctccgtttcgtcttatgtaaaaccatccctattttttgttcttcattttcacagtttttgtatctctacttaatgttataccagttttccgacttttatgagctaatgccaatccc

SEQ ID NO: 276920 - DNA, 1902 bp, Homo sapiens
atccatggcacggagcggcggcggcggcggcagcaggagcccggcgcgatccgctaggtcccagcccagcgcccagcgagcaggcgacgcggaggggccgggcctccagtgtcccgagggccgggcgctgagactccggccgcgcagctgggagctgcccgcgctgcgctgacagccgcgccgacgtcctccccgccggggcgctcgcaggacatgcccccggggcgcggcggcggggaccccggggctcgcctccgcccagggcccccctccacgccctcgggagccccgggcccccgctgagcactcctcccgcacgcctgggtccctccggccggcgcgcagcccggccccagcgctgtgggtccccgcggggcgatgggttgatgggcgccgggggacgcaggatgcggggggcgcccgcgcgcctgctgctgccgctgctgccgtggctcctgctgctcctggcgcccgaggctcggggcgcgcccggctgcccgctatccatccgcagctgcaagtgctcgggggagcggcccaaggggctgagcggcggcgtccctggcccggctcggcggagggtggtgtgcagcggcggggacctcccggagcctcccgagcccggccttctgcctaacggcaccgttaccctgctcttgagcaataacaagatcacggggctccgcaatggctccttcctgggactgtcactgctggagaagctggacctgaggaacaacatcatcagcacagtgcagccgggcgccttcctgggcctgggggagctgaagcgtttagatctctccaacaaccggattggctgtctcacctccgagaccttccagggcctccccaggcttctccgactaaacatatctggaaacatcttctccagtctgcaacctggggtctttgatgagctgccagcccttaaggttgtggacttgggcaccgagttcctgacctgtgactgccacctgcgctggctgctgccctgggcccagaatcgctccctgcagctgtcggaacacacgctctgtgcttaccccagtgccctgcatgctcaggccctgggcagcctccaggaggcccagctctgctgcgagggggccctggagctgcacacacaccacctcatcccgtccctacgccaagtggtgttccagggggatcggctgcccttccagtgctctgccagctacctgggcaacgacacccgcatccgctggtaccacaaccgagcccctgtggagggtgatgagcaggcgggcatcctcctggccgagagcctcatccacgactgcaccttcatcaccagtgagctgacgctgtctcacatcggcgtgtgggcctcaggcgagtgggagtgcaccgtgtccatggcccaaggcaacgccagcaagaaggtggagatcgtggtgctggagacctctgcctcctactgccccgccgagcgtgttgccaacaaccgcggggacttcaggtggccccgaactctggctggcatcacagcctaccagtcctgcctgcagtatcccttcacctcagtgcccctgggcgggggtgccccgggcacccgagcctcccgccggtgtgaccgtgccggccgctgggagccaggggactactcccactgtctctacaccaacgacatcaccagggtgctgtacaccttcgtgctgatgcccatcaatgcctccaatgcgctgaccctggctcaccagctgcgcgtgtacacagccgaggccgctagcttttcagacatgatggatgtagtctatgtggctcagatgatccagaaatttttgggttatgtcgaccagatcaaagagctggtagaggtgatggtgatgccagcaacagcaggtgctcgtccaccagcatcaggtaccgagccgatta

SEQ ID NO: 276921 - DNA, 4110 bp, Homo sapiens
ttcgtctgagacgaaggcgcaggctcggggctccctgtcgccggtggctgggtggcgtccccccaccacgcccccacccctctactcacccaagaggagcctctccaccgagccctgcatcctgctgccctggcagccagtccagctaggcactggcccagttcactgtacctggacttacccactggcaccctccggatccccttatcaaagctgatgggggtcgctggggaccccccagccttttgctagagcctgcacggctgtgcgagcttgaaaagaaacatgaaggtgggctggccaggtgagagctgctggcaggtgggcctggctgtggaggatagcccagctctgggagcaccgcgggtgggagccctccctgacgtggtgccggaggggacactactcaacatggtgttgagaaggatgcaccggccccgaagctgctcctaccagctgctgctggagcaccagcgtccgagctgcatccaggggctgcgctggacaccactcaccaacagcgaggagtccctggatttcagcgagagcctggagcaggcctccacagagcgggtgctcagggctgggaggcagctgcatcggcatctgctggccacctgcccaaacctcatccgagaccggaagtaccaccttaggctctatcggcagtgctgctctggccgggagctggtggatgggatcttggccctgggacttggggtccattcccggagccaagttgtgggaatctgccaggtgctgctggatgaaggtgccctctgccatgtgaaacacgactgggccttccaggaccgagatgcccaattctaccggttccccgggcccgagcccgagcccgtgggaactcatgagatggaggaggagttggccgaagctgtggccctgctctcccagcgggggcctgacgccctgctcactgtggcacttcgaaagcccccaggtcagcgcacggatgaagagctggacctcatctttgaggagctgctgcacatcaaggctgtggcccacctctccaactcggtgaagcgagaattagcggctgttctgctctttgaaccacacagcaaggcagggaccgtgttgttcagccagggggacaagggcacttcgtggtacattatctggaagggatctgtcaacgtggtgacccatggcaaggggctggtgaccaccctgcatgagggagatgattttggacagctggctctggtgaatgatgcaccccgggcagccaccatcatcctgcgagaagacaactgtcatttcctgcgtgtggacaagcaggacttcaaccgtatcatcaaggatgtggaggcaaagaccatgcggctggaagaacatggcaaagtggtgctggtgctggagagagcctctcagggcgccggcccttcccgacccccaaccccaggcaggaaccggtaatacacctgccatgctccctctccacactgtccctcctttcatttcccaatctttgctcccttcccctgtgtcatatccctgccctctggccacttgtggatggagaggtattgagggaccaggatgtgcctgctgagccagtctcctccctgccctaaggtgggacagggctggctaatcgagaaaaatgatgtaattgattattgatgtctgcccaggtgtgggagtggggagtagtggcaccagtgccaaagattggccatttctgctaggtatacagtgatgtctggcaccccagagaagatcctagagcttctgttggaggccatgggaccagattccagtgctcatgacccaacaggtgggtggccctgcttggatgttgtggttcccttgactggtgcccaccttccatgtggagcctgcgggtggcagcgagcaggagcgcagcacctacgtctgcaacaagaggcagcagatcttgcggctggtcagccagtgggtggccctgtatggctccatgctccacactgaccctgtggccaccagcttcctccagaaactctcagacctggtgggcagggacacccgactcagcaacctgctgagggagcagtggccagagaggcggcgatgccacaggttggagaatggctgtgggaatgcatctcctcagatgaaggcccggaacttgcctgtttggctccccaaccaggacgagccccttcctggcagcagctgtgccatccaagttggggataaagtcccctatgacatctgccggccagaccactcagtgttgaccctgcagctgcctgtgacagcctccgtgagagaggtgatggcagcgttggcccaggaggatggctggaccaaggggcaggtgctggtgaaggtcaattctgcaggtgatgccattggcctgcagccagatgcccgtggtgtggccacatctctggggctcaatgagcgtctctttgttgtcaacccacaggaagtgcatgagctgatcccacaccctgaccagctggggcccactgtgggctctgctgaggggctggacctggtgagtgccaaggacctggcaggccagctgacggaccacgactggagcctcttcaacagtatccaccaggtggagctgatccactatgtgctgggcccccagcatctgcgggatgtcaccaccgccaacctggagcgcttcatgcgccgcttcaatgagctgcagtactgggtggccaccgagctgtgtctctgccccgtgcccggcccccgggcccagctgctcaggaagttcattaagctggcggcccacctcaaggagcagaagaatctcaattccttctttgccgtcatgtttggcctcagcaactcggccatcagccgcctagcccacacctgggagcggctgcctcacaaagtccggaagctgtactccgccctcgagaggctgctggatccctcatggaaccaccgggtataccgactggccctcgccaagctctcccctcctgtcatccccttcatgccccttcttctcaaagacatgaccttcattcatgagggaaaccacacactagtggagaatctcatcaactttgagaagatgagaatgatggccagagccgcgcggatgctgcaccactgccgaagccacaaccctgtgcctctctcaccactcagaagccgagtttcccacctccacgaggacagccaggtggcgaggatttccacatgctcggagcagtccctgagcacccggagtccagccagcacctgggcttatgtccagcagctgaaggtcattgacaaccagcgggaactctcccgcctctcccgagagctggagccatgaggaggggctgggactggagctggagcaggcacttgcagccgggaaagccagggtgtgccgggccaagatactcacaggctggccacagctgggcaaggctctccgtggagtggactcgagtccctggagcaggcagtgtggaggcagccatcccctgtgatgactggcagctaaggaggacctcggagtggacccgagccaggaataacgaatgacccaaggccaaggaagggaggacagagaggccccaggagtgggtggagagtggagtgcgctgggacgttgtgtgcaatagagaggtctccacaccagatgtcttccagattctgtgcctctggctttgttgtccagccaggcctgcagtttattttcacagtggacagagagagagagagaggctgcatgtgtgtaccgtgtgtggcaagggcagggccttggcctggggcaggggccccctgctttctttccacagctttcttccaacagcaggcagtggggctgcgggcctgtgcggtggtccctgaggagctttattgttactgtcaacatagtagtatgttccaggccagcccagagtgggcgtggcagggaggctgaggccccgccctctgggaaggagctgtggaggagaagcagccccatgctgggcacgggccagactgggtccaagatcctgatgccacccagatgtgcctccagggctctggccaaagggcgggctggagcctggagcccctgtcagcagccagccagggtgaccatcagctccccgtggtggtccaataggactttacagtccagatgcaact

SEQ ID NO: 276922 - DNA, 2850 bp, Homo sapiens
tccggtcggtaccgacgctctctctgtggatcatgagttgagcatgggatgtggcctgttctccaggatgtggaggcaaagaccatgcggctggaagaacatggcaaagtggtgctggtgctggagagagcctctcagggcgccggcccttcccgacccccaaccccaggcaggaaccggtaatacacctgccatgctccctctccacactgtccctcctttcatttcccaatctttgctcccttcccctgtgtcatatccctgccctctggccacttgtggatggagaggtattgagggaccaggatgtgcctgctgagccagtctcctccctgccctaaggtgggacagggctggctaatcgagaaaaatgatgtaattgattattgatgtctgcccaggtgtgggagtggggagtagtggcaccagtgccaaagattggccatttctgctaggtatacagtgatgtctggcaccccagagaagatcctagagcttctgttggaggccatgggaccagattccagtgctcatgacccaacaggtgggtggccctgcttggatgttgtggttcccttgactggtgcccaccttccatgtggagcctgcgggtggcagcgagcaggagcgcagcacctacgtctgcaacaagaggcagcagatcttgcggctggtcagccagtgggtggccctgtatggctccatgctccacactgaccctgtggccaccagcttcctccagaaactctcagacctggtgggcagggacacccgactcagcaacctgctgagggagcagtggccagagaggcggcgatgccacaggttggagaatggctgtgggaatgcatctcctcagatgaaggcccggaacttgcctgtttggctccccaaccaggacgagccccttcctggcagcagctgtgccatccaagttggggataaagtcccctatgacatctgccggccagaccactcagtgttgaccctgcagctgcctgtgacagcctccgtgagagaggtgatggcagcgttggcccaggaggatggctggaccaaggggcaggtgctggtgaaggtcaattctgcaggtgatgccattggcctgcagccagatgcccgtggtgtggccacatctctggggctcaatgagcgtctctttgttgtcaacccacaggaagtgcatgagctgatcccacaccctgaccagctggggcccactgtgggctctgctgaggggctggacctggtgagtgccaaggacctggcaggccagctgacggaccacgactggagcctcttcaacagtatccaccaggtggagctgatccactatgtgctgggcccccagcatctgcgggatgtcaccaccgccaacctggagcgcttcatgcgccgcttcaatgagctgcagtactgggtggccaccgagctgtgtctctgccccgtgcccggcccccgggcccagctgctcaggaagttcattaagctggcggcccacctcaaggagcagaagaatctcaattccttctttgccgtcatgtttggcctcagcaactcggccatcagccgcctagcccacacctgggagcggctgcctcacaaagtccggaagctgtactccgccctcgagaggctgctggatccctcatggaaccaccgggtataccgactggccctcgccaagctctcccctcctgtcatccccttcatgccccttcttctcaaagacatgaccttcattcatgagggaaaccacacactagtggagaatctcatcaactttgagaagatgagaatgatggccagagccgcgcggatgctgcaccactgccgaagccacaaccctgtgcctctctcaccactcagaagccgagtttcccacctccacgaggacagccaggtggcgaggatttccacatgctcggagcagtccctgagcacccggagtccagccagcacctgggcttatgtccagcagctgaaggtcattgacaaccagcgggaactctcccgcctctcccgagagctggagccatgaggaggggctgggactggagctggagcaggcacttgcagccgggaaagccagggtgtgccgggccaagatactcacaggctggccacagctgggcaaggctctccgtggagtggactcgagtccctggagcaggcagtgtggaggcagccatcccctgtgatgactggcagctaaggaggacctcggagtggacccgagccaggaataacgaatgacccaaggccaaggaagggaggacagagaggccccaggagtgggtggagagtggagtgcgctgggacgttgtgtgcaatagagaggtctccacaccagatgtcttccagattctgtgcctctggctttgttgtccagccaggcctgcagtttattttcacagtggacagagagagagagagaggctgcatgtgtgtaccgtgtgtggcaagggcagggccttggcctggggcaggggccccctgctttctttccacagctttcttccaacagcaggcagtggggctgcgggcctgtgcggtggtccctgaggagctttattgttactgtcaacatagtagtatgttccaggccagcccagagtgggcgtggcagggaggctgaggccccgccctctgggaaggagctgtggaggagaagcagccccatgctgggcacgggccagactgggtccaagatcctgatgccacccagatgtgcctccagggctctggccaaagggcgggctggagcctggagcccctgtcagcagccagccagggtgaccatcagctccccgtggtggtccaataggactttacagtccagatgcaact

SEQ ID NO: 276923 - DNA, 2174 bp, Homo sapiens
gccaccatataggctaggtacgaggctggtgtgaatcggccgagggtgtccttatggtgccacttccatgtggagcctgcgggtggcagcgagcaggagcgcagcacctacgtctgcaacaagaggcagcagatcttgcggctggtcagccagtgggtggccctgtatggctccatgctccacactgaccctgtggccaccagcttcctccagaaactctcagacctggtgggcagggacacccgactcagcaacctgctgagggagcagtggccagagaggcggcgatgccacaggttggagaatggctgtgggaatgcatctcctcagatgaaggcccggaacttgcctgtttggctccccaaccaggacgagccccttcctggcagcagctgtgccatccaagttggggataaagatgccattggcctgcagccagatgcccgtggtgtggccacatctctggggctcaatgagcgtctctttgttgtcaacccacaggaagtgcatgagctgatcccacaccctgaccagctggggcccactgtgggctctgctgaggggctggacctggtgagtgccaaggacctggcaggccagctgacggaccacgactggagcctcttcaacagtatccaccaggtggagctgatccactatgtgctgggcccccagcatctgcgggatgtcaccaccgccaacctggagcgcttcatgcgccgcttcaatgagctgcagtactgggtggccaccgagctgtgtctctgccccgtgcccggcccccgggcccagctgctcaggaagttcattaagctggcggcccacctcaaggagcagaagaatctcaattccttctttgccgtcatgtttggcctcagcaactcggccatcagccgcctagcccacacctgggagcggctgcctcacaaagtccggaagctgtactccgccctcgagaggctgctggatccctcatggaaccaccgggtataccgactggccctcgccaagctctcccctcctgtcatccccttcatgccccttcttctcaaagacatgaccttcattcatgagggaaaccacacactagtggagaatctcatcaactttgagaagatgagaatgatggccagagccgcgcggatgctgcaccactgccgaagccacaaccctgtgcctctctcaccactcagaagccgagtttcccacctccacgaggacagccaggtggcgaggatttccacatgctcggagcagtccctgagcacccggagtccagccagcacctgggcttatgtccagcagctgaaggtcattgacaaccagcgggaactctcccgcctctcccgagagctggagccatgaggaggggctgggactggagctggagcaggcacttgcagccgggaaagccagggtgtgccgggccaagatactcacaggctggccacagctgggcaaggctctccgtggagtggactcgagtccctggagcaggcagtgtggaggcagccatcccctgtgatgactggcagctaaggaggacctcggagtggacccgagccaggaataacgaatgacccaaggccaaggaagggaggacagagaggccccaggagtgggtggagagtggagtgcgctgggacgttgtgtgcaatagagaggtctccacaccagatgtcttccagattctgtgcctctggctttgttgtccagccaggcctgcagtttattttcacagtggacagagagagagagagaggctgcatgtgtgtaccgtgtgtggcaagggcagggccttggcctggggcaggggccccctgctttctttccacagctttcttccaacagcaggcagtggggctgcgggcctgtgcggtggtccctgaggagctttattgttactgtcaacatagtagtatgttccaggccagcccagagtgggcgtggcagggaggctgaggccccgccctctgggaaggagctgtggaggagaagcagccccatgctgggcacgggccagactgggtccaagatcctgatgccacccagatgtgcctccagggctctggccaaagggcgggctggagcctggagcccctgtcagcagccagccagggtgaccatcagctccccgtggtggtccaataggactttacagtccagatgcaact

SEQ ID NO: 276924 - DNA, 1870 bp, Homo sapiens
gtcttattgtctccattttaccagggaagaaagtgaggctgagggaggctcagaccctgcccaggttcttcctgactcactgagaatctttcctcatcctcttggatgtgcttccctgggctgcgtggctgcgtgggcacatgcacctgtgtattctgagcaccacccaggacttcaaccccgctactaggagaaacaacctctcagcctcccaaacagcacctccaccctggcatccagctggtccccggcctccctcccttcccccacccagtccgcctctgctgtctttgcagatgccattggcctgcagccagatgcccgtggtgtggccacatctctggggctcaatgagcgtctctttgttgtcaacccacaggaagtgcatgagctgatcccacaccctgaccagctggggcccactgtgggctctgctgaggggctggacctggtgagtgccaaggacctggcaggccagctgacggaccacgactggagcctcttcaacagtatccaccagcctcaaggagcagaagaatctcaattccttctttgccgtcatgtttggcctcagcaactcggccatcagccgcctagcccacacctgggagcggctgcctcacaaagtccggaagctgtactccgccctcgagaggctgctggatccctcatggaaccaccgggtataccgactggccctcgccaagctctcccctcctgtcatccccttcatgccccttcttctcaaagacatgaccttcattcatgagggaaaccacacactagtggagaatctcatcaactttgagaagatgagaatgatggccagagccgcgcggatgctgcaccactgccgaagccacaaccctgtgcctctctcaccactcagaagccgagtttcccacctccacgaggacagccaggtggcgaggatttccacatgctcggagcagtccctgagcacccggagtccagccagcacctgggcttatgtccagcagctgaaggtcattgacaaccagcgggaactctcccgcctctcccgagagctggagccatgaggaggggctgggactggagctggagcaggcacttgcagccgggaaagccagggtgtgccgggccaagatactcacaggctggccacagctgggcaaggctctccgtggagtggactcgagtccctggagcaggcagtgtggaggcagccatcccctgtgatgactggcagctaaggaggacctcggagtggacccgagccaggaataacgaatgacccaaggccaaggaagggaggacagagaggccccaggagtgggtggagagtggagtgcgctgggacgttgtgtgcaatagagaggtctccacaccagatgtcttccagattctgtgcctctggctttgttgtccagccaggcctgcagtttattttcacagtggacagagagagagagagaggctgcatgtgtgtaccgtgtgtggcaagggcagggccttggcctggggcaggggccccctgctttctttccacagctttcttccaacagcaggcagtggggctgcgggcctgtgcggtggtccctgaggagctttattgttactgtcaacatagtagtatgttccaggccagcccagagtgggcgtggcagggaggctgaggccccgccctctgggaaggagctgtggaggagaagcagccccatgctgggcacgggccagactgggtccaagatcctgatgccacccagatgtgcctccagggctctggccaaagggcgggctggagcctggagcccctgtcagcagccagccagggtgaccatcagctccccgtggtggtccaataggactttacagtccagatgcaact

SEQ ID NO: 276925 - DNA, 3866 bp, Homo sapiens
ttcgtctgagacgaaggcgcaggctcggggctccctgtcgccggtggctgggtggcgtccccccaccacgcccccacccctctactcacccaagaggagcctctccaccgagccctgcatcctgctgccctggcagccagtccagctaggcactggcccagttcactgtacctggacttacccactggcaccctccggatccccttatcaaagctgatgggggtcgctggggaccccccagccttttgctagagcctgcacggctgtgcgagcttgaaaagaaacatgaaggtgggctggccaggtgagagctgctggcaggtgggcctggctgtggaggatagcccagctctgggagcaccgcgggtgggagccctccctgacgtggtgccggaggggacactactcaacatggtgttgagaaggatgcaccggccccgaagctgctcctaccagctgctgctggagcaccagcgtccgagctgcatccaggggctgcgctggacaccactcaccaacagcgaggagtccctggatttcagcgagagcctggagcaggcctccacagagcgggtgctcagggctgggaggcagctgcatcggcatctgctggccacctgcccaaacctcatccgagaccggaagtaccaccttaggctctatcggcagtgctgctctggccgggagctggtggatgggatcttggccctgggacttggggtccattcccggagccaagttgtgggaatctgccaggtgctgctggatgaaggtgccctctgccatgtgaaacacgactgggccttccaggaccgagatgcccaattctaccggttccccgggcccgagcccgagcccgtgggaactcatgagatggaggaggagttggccgaagctgtggccctgctctcccagcgggggcctgacgccctgctcactgtggcacttcgaaagcccccaggtcagcgcacggatgaagagctggacctcatctttgaggagctgctgcacatcaaggctgtggcccacctctccaactcggtgaagcgagaattagcggctgttctgctctttgaaccacacagcaaggcagggaccgtgttgttcagccagggggacaagggcacttcgtggtacattatctggaagggatctgtcaacgtggtgacccatggcaaggggctggtgaccaccctgcatgagggagatgattttggacagctggctctggtgaatgatgcaccccgggcagccaccatcatcctgcgagaagacaactgtcatttcctgcgtgtggacaagcaggacttcaaccgtatcatcaaggatgtggaggcaaagaccatgcggctggaagaacatggcaaagtggtgctggtgctggagagagcctctcagggcgccggcccttcccgacccccaaccccaggcaggaaccggtatacagtgatgtctggcaccccagagaagatcctagagcttctgttggaggccatgggaccagattccagtgctcatgacccaacagagacattcctcagcgacttcctcctgacccacagggtcttcatgcccagcgcccaactctgcgctgcccttctgcaccacttccatgtggagcctgcgggtggcagcgagcaggagcgcagcacctacgtctgcaacaagaggcagcagatcttgcggctggtcagccagtgggtggccctgtatggctccatgctccacactgaccctgtggccaccagcttcctccagaaactctcagacctggtgggcagggacacccgactcagcaacctgctgagggagcagtggccagagaggcggcgatgccacaggttggagaatggctgtgggaatgcatctcctcagatgaaggcccggaacttgcctgtttggctccccaaccaggacgagccccttcctggcagcagctgtgccatccaagttggggataaagtcccctatgacatctgccggccagaccactcagtgttgaccctgcagctgcctgtgacagcctccgtgagagaggtgatggcagcgttggcccaggaggatggctggaccaaggggcaggtgctggtgaaggtcaattctgcaggtgatgccattggcctgcagccagatgcccgtggtgtggccacatctctggggctcaatgagcgtctctttgttgtcaacccacaggaagtgcatgagctgatcccacaccctgaccagctggggcccactgtgggctctgctgaggggctggacctggtgagtgccaaggacctggcaggccagctgacggaccacgactggagcctcttcaacagtatccaccaggtggagctgatccactatgtgctgggcccccagcatctgcgggatgtcaccaccgccaacctggagcgcttcatgcgccgcttcaatgagctgcagtactgggtggccaccgagctgtgtctctgccccgtgcccggcccccgggcccagctgctcaggaagttcattaagctggcggcccacctcaaggagcagaagaatctcaattccttctttgccgtcatgtttggcctcagcaactcggccatcagccgcctagcccacacctgggagcggctgcctcacaaagtccggaagctgtactccgccctcgagaggctgctggatccctcatggaaccaccgggtataccgactggccctcgccaagctctcccctcctgtcatccccttcatgccccttcttctcaaagacatgaccttcattcatgagggaaaccacacactagtggagaatctcatcaactttgagaagatgagaatgatggccagagccgcgcggatgctgcaccactgccgaagccacaaccctgtgcctctctcaccactcagaagccgagtttcccacctccacgaggacagccaggtggcgaggatttccacatgctcggagcagtccctgagcacccggagtccagccagcacctgggcttatgtccagcagctgaaggtcattgacaaccagcgggaactctcccgcctctcccgagagctggagccatgaggaggggctgggactggagctggagcaggcacttgcagccgggaaagccagggtgtgccgggccaagatactcacaggctggccacagctgggcaaggctctccgtggagtggactcgagtccctggagcaggcagtgtggaggcagccatcccctgtgatgactggcagctaaggaggacctcggagtggacccgagccaggaataacgaatgacccaaggccaaggaagggaggacagagaggccccaggagtgggtggagagtggagtgcgctgggacgttgtgtgcaatagagaggtctccacaccagatgtcttccagattctgtgcctctggctttgttgtccagccaggcctgcagtttattttcacagtggacagagagagagagagaggctgcatgtgtgtaccgtgtgtggcaagggcagggccttggcctggggcaggggccccctgctttctttccacagctttcttccaacagcaggcagtggggctgcgggcctgtgcggtggtccctgaggagctttattgttactgtcaacatagtagtatgttccaggccagcccagagtgggcgtggcagggaggctgaggccccgccctctgggaaggagctgtggaggagaagcagccccatgctgggcacgggccagactgggtccaagatcctgatgccacccagatgtgcctccagggctctggccaaagggcgggctggagcctggagcccctgtcagcagccagccagggtgaccatcagctccccgtggtggtccaataggactttacagtccagatgcaact

SEQ ID NO: 276926 - DNA, 3118 bp, Homo sapiens
tttcctctcctcccccacgcctgggcctctgccccccagtgaaacacgactgggccttccaggaccgagatgcccaattctaccggttccccgggcccgagcccgagcccgtgggaactcatgagatggaggaggagttggccgaagctgtggccctgctctcccagcgggggcctgacgccctgctcactgtggcacttcgaaagcccccaggtcagcgcacggatgaagagctggacctcatctttgaggagctgctgcacatcaaggctgtggcccacctctccaactcggtgaagcgagaattagcggctgttctgctctttgaaccacacagcaaggcagggaccgtgttgttcagccagggggacaagggcacttcgtggtacattatctggaagggatctgtcaacgtggtgacccatggcaaggggctggtgaccaccctgcatgagggagatgattttggacagctggctctggtgaatgatgcaccccgggcagccaccatcatcctgcgagaagacaactgtcatttcctgcgtgtggacaagcaggacttcaaccgtatcatcaaggatgtggaggcaaagaccatgcggctggaagaacatggcaaagtggtgctggtgctggagagagcctctcagggcgccggcccttcccgacccccaaccccaggcaggaaccggtatacagtgatgtctggcaccccagagaagatcctagagcttctgttggaggccatgggaccagattccagtgctcatgacccaacagagacattcctcagcgacttcctcctgacccacagggtcttcatgcccagcgcccaactctgcgctgcccttctgcaccacttccatgtggagcctgcgggtggcagcgagcaggagcgcagcacctacgtctgcaacaagaggcagcagatcttgcggctggtcagccagtgggtggccctgtatggctccatgctccacactgaccctgtggccaccagcttcctccagaaactctcagacctggtgggcagggacacccgactcagcaacctgctgagggagcagtggccagagaggcggcgatgccacaggttggagaatggctgtgggaatgcatctcctcagatgaaggcccggaacttgcctgtttggctccccaaccaggacgagccccttcctggcagcagctgtgccatccaagttggggataaagtcccctatgacatctgccggccagaccactcagtgttgaccctgcagctgcctgtgacagcctccgtgagagaggtgatggcagcgttggcccaggaggatggctggaccaaggggcaggtgctggtgaaggtcaattctgcaggtgatgccattggcctgcagccagatgcccgtggtgtggccacatctctggggctcaatgagcgtctctttgttgtcaacccacaggaagtgcatgagctgatcccacaccctgaccagctggggcccactgtgggctctgctgaggggctggacctggtgagtgccaaggacctggcaggccagctgacggaccacgactggagcctcttcaacagtatccaccaggtggagctgatccactatgtgctgggcccccagcatctgcgggatgtcaccaccgccaacctggagcgcttcatgcgccgcttcaatgagctgcagtactgggtggccaccgagctgtgtctctgccccgtgcccggcccccgggcccagctgctcaggaagttcattaagctggcggcccacctcaaggagcagaagaatctcaattccttctttgccgtcatgtttggcctcagcaactcggccatcagccgcctagcccacacctgggagcggctgcctcacaaagtccggaagctgtactccgccctcgagaggctgctggatccctcatggaaccaccgggtataccgactggccctcgccaagctctcccctcctgtcatccccttcatgccccttcttctcaaagacatgaccttcattcatgagggaaaccacacactagtggagaatctcatcaactttgagaagatgagaatgatggccagagccgcgcggatgctgcaccactgccgaagccacaaccctgtgcctctctcaccactcagaagccgagtttcccacctccacgaggacagccaggtggcgaggatttccacatgctcggagcagtccctgagcacccggagtccagccagcacctgggcttatgtccagcagctgaaggtcattgacaaccagcgggaactctcccgcctctcccgagagctggagccatgaggaggggctgggactggagctggagcaggcacttgcagccgggaaagccagggtgtgccgggccaagatactcacaggctggccacagctgggcaaggctctccgtggagtggactcgagtccctggagcaggcagtgtggaggcagccatcccctgtgatgactggcagctaaggaggacctcggagtggacccgagccaggaataacgaatgacccaaggccaaggaagggaggacagagaggccccaggagtgggtggagagtggagtgcgctgggacgttgtgtgcaatagagaggtctccacaccagatgtcttccagattctgtgcctctggctttgttgtccagccaggcctgcagtttattttcacagtggacagagagagagagagaggctgcatgtgtgtaccgtgtgtggcaagggcagggccttggcctggggcaggggccccctgctttctttccacagctttcttccaacagcaggcagtggggctgcgggcctgtgcggtggtccctgaggagctttattgttactgtcaacatagtagtatgttccaggccagcccagagtgggcgtggcagggaggctgaggccccgccctctgggaaggagctgtggaggagaagcagccccatgctgggcacgggccagactgggtccaagatcctgatgccacccagatgtgcctccagggctctggccaaagggcgggctggagcctggagcccctgtcagcagccagccagggtgaccatcagctccccgtggtggtccaataggactttacagtccagatgcaact

SEQ ID NO: 276927 - DNA, 3103 bp, Homo sapiens
ttcgtctgagacgaaggcgcaggctcggggctccctgtcgccggtggctgggtggcgtccccccaccacgcccccacccctctactcacccaagaggagcctctccaccgagccctgcatcctgctgccctggcagccagtccagctaggcactggcccagttcactgtacctggacttacccactggcaccctccggatccccttatcaaagctgatgggggtcgctggggaccccccagccttttgctagagcctgcacggctgtgcgagcttgaaaagaaacatgaaggtgggctggccaggtgagagctgctggcaggtgggcctggctgtggaggatagcccagctctgggagcaccgcgggtgggagccctccctgacgtggtgccggaggggacactactcaacatggtgttgagaaggatgcaccggccccgaagctgctcctaccagctgctgctggagcaccagcgtccgagctgcatccaggggctgcgctggacaccactcaccaacagcgaggagtccctggatttcagcgagagcctggagcaggcctccacagagcgggtgctcagggctgggaggcagctgcatcggcatctgctggccacctgcccaaacctcatccgagaccggaagtaccaccttaggctctatcggcagtgctgctctggccgggagctggtggatgggatcttggccctgggacttggggtccattcccggagccaagttgtgggaatctgccaggtgctgctggatgaaggtgccctctgccatgtgaaacacgactgggccttccaggaccgagatgcccaattctaccggttccccgggcccgagcccgagcccgtgggaactcatgagatggaggaggagttggccgaagctgtggccctgctctcccagcgggggcctgacgccctgctcactgtggcacttcgaaagcccccaggtcagcgcacggatgaagagctggacctcatctttgaggagctgctgcacatcaaggctgtggcccacctctccaactcggtgaagcgagaattagcggctgttctgctctttgaaccacacagcaaggcagggaccgtgttgttcagccagggggacaagggcacttcgtggtacattatctggaagggatctgtcaacgtggtgacccatggcaaggggctggtgaccaccctgcatgagggagatgattttggacagctggctctggtgaatgatgcaccccgggcagccaccatcatcctgcgagaagacaactgtcatttcctgcgtgtggacaagcaggacttcaaccgtatcatcaaggatgtggaggcaaagaccatgcggctggaagaacatggcaaagtggtgctggtgctggagagagcctctcagggcgccggcccttcccgacccccaaccccaggcaggaaccggtatacagtgatgtctggcaccccagagaagatcctagagcttctgttggaggccatgggaccagattccagtgctcatgacccaacagagacattcctcagcgacttcctcctgacccacagggtcttcatgcccagcgcccaactctgcgctgcccttctgcaccacttccatgtggagcctgcgggtggcagcgagcaggagcgcagcacctacgtctgcaacaagaggcagcagatcttgcggctggtcagccagtgggtggccctgtatggctccatgctccacactgaccctgtggccaccagcttcctccagaaactctcagacctggtgggcagggacacccgactcagcaacctgctgagggagcagtggccagagaggcggcgatgccacaggttggagaatggctgtgggaatgcatctcctcagatgaaggcccggaacttgcctgtttggctccccaaccaggacgagccccttcctggcagcagctgtgccatccaagttggggataaagtcccctatgacatctgccggccagaccactcagtgttgaccctgcagctgcctgtgacagcctccgtgagagaggtgatggcagcgttggcccaggaggatggctggaccaaggggcaggtgctggtgaaggtcaattctgcaggtgatgccattggcctgcagccagatgcccgtggtgtggccacatctctggggctcaatgagcgtctctttgttgtcaacccacaggaagtgcatgagctgatcccacaccctgaccagctggggcccactgtgggctctgctgaggggctggacctggtgagtgccaaggacctggcaggccagctgacggaccacgactggagcctcttcaacagtatccaccaggtggagctgatccactatgtgctgggcccccagcatctgcgggatgtcaccaccgccaacctggagcgcttcatgcgccgcttcaatgagctgcagtactgggtggccaccgagctgtgtctctgccccgtgcccggcccccgggcccagctgctcaggaagttcattaagctggcggcccacctcaaggagcagaagaatctcaattccttctttgccgtcatgtttggcctcagcaactcggccatcagccgcctagcccacacctgggagcggctgcctcacaaagtccggaagctgtactccgccctcgagaggctgctggatccctcatggaaccaccgggtataccgactggccctcgccaagctctcccctcctgtcatccccttcatgccccttcttctcaaagacatgaccttcattcatgagggaaaccacacactagtggagaatctcatcaactttgagaagatgagaatgatggccagagccgcgcggatgctgcaccactgccgaagccacaaccctgtgcctctctcaccactcagaagccgagtttcccacctccacgaggacagccaggtggcgaggatttccacatgctcggagcagtccctgagcacccggagtccagccagcacctgggcggctctggccatcattctcatcttctcaaagttgatgagattctccactagtgtgtggtttccctcatgaatgaaggtcatgcctttgagaagaaggggcatgaaggggatgtcgcacc

SEQ ID NO: 276928 - DNA, 1707 bp, Homo sapiens
ctagaccagtagaagaggcgaggatagagttgggggtggaacctcccacctccaggaacttttgaggattttgagggttttgactattctggagagaagcagagaagaggtacttcatcagcatagcctgggagctcttgagagaaaatccacctcgtggggctcaagggattcaaaggagtttactctgcagagagagagagggagggacacagaaagagacagggatagaaagggacagagaggtgacagtgacagacttttccaagaaacctggggcccctgtgactaactgctgtgaattttctcagtgctaatgggaggttggaagccccgtgttcgcctgtgacagagcctgggtgagacctggggctgaggagaggctgagttggggcctctgcacctgctgtgggatgggcatgtggcccctccttggttgggtggggtctgtggtggcttatggtgtgtgcaaccccctcagtgtggcttcttcccctaggatccctcatggaaccaccgggtataccgactggccctcgccaagctctcccctcctgtcatccccttcatgccccttcttctcaaagacatgaccttcattcatgagggaaaccacacactagtggagaatctcatcaactttgagaagatgagaatgatggccagagccgcgcggatgctgcaccactgccgaagccacaaccctgtgcctctctcaccactcagaagccgagtttcccacctccacgaggacagccaggtggcgaggatttccacatgctcggagcagtccctgagcacccggagtccagccagcacctgggcttatgtccagcagctgaaggtcattgacaaccagcgggaactctcccgcctctcccgagagctggagccatgaggaggggctgggactggagctggagcaggcacttgcagccgggaaagccagggtgtgccgggccaagatactcacaggctggccacagctgggcaaggctctccgtggagtggactcgagtccctggagcaggcagtgtggaggcagccatcccctgtgatgactggcagctaaggaggacctcggagtggacccgagccaggaataacgaatgacccaaggccaaggaagggaggacagagaggccccaggagtgggtggagagtggagtgcgctgggacgttgtgtgcaatagagaggtctccacaccagatgtcttccagattctgtgcctctggctttgttgtccagccaggcctgcagtttattttcacagtggacagagagagagagagaggctgcatgtgtgtaccgtgtgtggcaagggcagggccttggcctggggcaggggccccctgctttctttccacagctttcttccaacagcaggcagtggggctgcgggcctgtgcggtggtccctgaggagctttattgttactgtcaacatagtagtatgttccaggccagcccagagtgggcgtggcagggaggctgaggccccgccctctgggaaggagctgtggaggagaagcagccccatgctgggcacgggccagactgggtccaagatcctgatgccacccagatgtgcctccagggctctggccaaagggcgggctggagcctggagcccctgtcagcagccagccagggtgaccatcagctccccgtggtggtccaataggactttacagtccagatgcaact

SEQ ID NO: 276929 - DNA, 1398 bp, Homo sapiens
atggacactgccagccatagccttgttcttctccagcagctgaacatgcagcgagaatttggttttctgtgtgattgcacagttgcaattggagatgtttacttcaaagcccacagagcagtgcttgctgctttttctaactatttcaagatgatatttattcaccaaacaagtgaatgcataaaaatacaaccaactgacatccaacctgacatattcagctatttgttgcacattatgtacacggggaaagggccaaaacagattgtggatcatagtcgtttggaggaagggattcgatttcttcacgccgactacctttctcacattgcaactgaaatgaatcaagtgttctcaccagagactgtgcagtcctcaaatttatatggcattcagatctcaacaacccaaaaaacagttgtcaaacaaggactggaggtcaaagaagctccttccagtaacagtggaaacagagctgctgtccagggtgaccacccccagttgcagttgtctcttgctattggtctggatgatggcactgcagaccagcagagggcctgtcctgccacccaggccctggaggagcaccagaagcccccagtttccatcaagcaggagagatgtgacccagaatctgtgatctcccagagccacccctcaccctcatcagaggtgacaggccccacttttactgaaaacagtgtcaaaatacacttatgccattactgtggggaacgttttgattcccgtagtaacctaaggcaacatctccatacacatgtgtctggatccctgccattcggtgtccctgcttccattctggaaagtaatgaccttggtgaagtgcatccccttaatgaaaacagcgaggcccttgaatgccgcaggctcagctccttcattgttaaggagaatgaacagcagccagaccacaccaaccggggtaccacagagcctttgcagatcagtcaagtatctttgatctccaaagacacagagccagtagaattaaactgtaatttttctttttcaaggaaaagaaaaatgagctgtaccatctgtggtcataaattccctcgaaagagccaattgttggaacacatgtatacacacaaaggtaaatcttacagatataaccgatgccaaaggtttggtaatgcattggcccagagatttcagccatactgtgacagctggtctgatgtctccctgaaaagttctcgcttgtcacaagaacacttagacttgccttgtgccttagagtcagagctcacacaagaaaatgtggatactatcctagttgagtagcagcttctctttcagaatttttataccaattctgaaaaagaaaatttgcgtggcatttttaattcataaattattttcctcctcaagttt

SEQ ID NO: 276930 - DNA, 580 bp, Homo sapiens
cagtgatctggatctctgacagcttcttctccaggtctctgagcgtctcctgctttaaggtgatttcctccttccgcacctcaactggcctcatcattttctccatcctcgcccattcagcccactcggccgcctcctcccgctcggcctcctcctcctcctccaccttctccctcaggacctccattctggagcgtctctgggtgtctggagatggaatgtctctgtggggaaggatccctggagatcccatccatgtcatgtggacatcatatcacatgattctgcccttctggtcgcagctgattggaccagagatggacgatggacacccaacttgcaagacaacacagcccatcacctccctggtgcaggggcctcaccttgcaaggagttgaaaagtgcaaagatgtagacggtggagaggcccaacggggtgaagatggccaacccccatgtcacacccaccaggctcgagaggcccagcaggggggaatctgggagaacgaaccacaggactctgcactatttttgcatctttctgttttatctcaaaataaaatccttctcaatcctgaaa

SEQ ID NO: 276931 - DNA, 577 bp, Homo sapiens
gaagagactgactagtcctcccaaagtacttgtgtccgggtggtggactggattcgctgcggagccctggaagctgcctttccttctccctgtgcttaaccagaggtgcccatgggttggacaatgaggctggtcacagcagcactgttactgggtctcatgatggtggtcactggagacgaggatgagaacagcccgtgtgcccatgaggccctcttggacgaggacaccctcttttgccagggccttgaagttttctacccagagttggggaacattggctgcaaggttgttcctgattgtaacaactacagacagaagatcacctcctggatggagccgatagtcaagttcccgggggccgtggacacggtgtgcctgggacacagagctggcttcccaagaggacctggtgaatacccacgaggcgtattcatctgcatgcatgagtcctgacttctttcagaagctctctggagaccttgggcagagtagcttcactagcaacagtgctgaggacgccaggaagtggagatgttgtccacagactgtctcttgtgtccttctaagctgggca

SEQ ID NO: 276932 - DNA, 939 bp, Homo sapiens
gaagagactgactagtcctcccaaagtacttgtgtccgggtggtggactggattcgctgcggagccctggaagctgcctttccttctccctgtgcttaaccagaggtgcccatgggttggacaatgaggctggtcacagcagcactgttactgggtctcatgatggtggtcactggagacgaggatgagaacagcccgtgtgcccatgaggccctcttggacgaggacaccctcttttgccagggccttgaagttttctacccagagttggggaacattggctgcaaggttgttcctgattgtaacaactacagacagaagatcacctcctggatggagccgatagtcaagttcccgggggccgtggacggcgcaacctatatcctggtgatggtggatccagatgcccctagcagagcagaacccagacagagattctggagacattggctggtaacagatatcaagggcgccgacctgaagaaagggaagattcagggccaggagttatcagcctaccaggctccctccccaccggcacacagtggcttccatcgctaccagttctttgtctatcttcaggaaggaaaagtcatctctctccttcccaaggaaaacaaaactcgaggctcttggaaaatggacagatttctgaaccgtttccacctgggcgaacctgaagcaagcacccagttcatgacccagaactaccaggactcaccaaccctccaggctcccagagaaagggccagcgagcccaagcacaaaaaccaggcggagatagctgcctgctagatagccggctttgccatccgggcatgtggccacactgcccaccaccgacgatgtgggtatggaaccccctctggatacagaaccccttcttttccaaataaaaacgtggcctcgttgacctcagcggtgagcgtctcgcaaagc

SEQ ID NO: 276933 - DNA, 778 bp, Homo sapiens
caccttaacacagagctgtttgtgaccaccatcatgagacccagtaacagcccgtgtgcccatgaggccctcttggacgaggacaccctcttttgccagggccttgaagttttctacccagagttggggaacattggctgcaaggttgttcctgattgtaacaactacagacagaagatcacctcctggatggagccgatagtcaagttcccgggggccgtggacggcgcaacctatatcctggtgatggtggatccagatgcccctagcagagcagaacccagacagagattctggagacattggctggtaacagatatcaagggcgccgacctgaagaaagggaagattcagggccaggagttatcagcctaccaggctccctccccaccggcacacagtggcttccatcgctaccagttctttgtctatcttcaggaaggaaaagtcatctctctccttcccaaggaaaacaaaactcgaggctcttggaaaatggacagatttctgaaccgtttccacctgggcgaacctgaagcaagcacccagttcatgacccagaactaccaggactcaccaaccctccaggctcccagagaaagggccagcgagcccaagcacaaaaaccaggcggagatagctgcctgctagatagccggctttgccatccgggcatgtggccacactgcccaccaccgacgatgtgggtatggaaccccctctggatacagaaccccttcttttccaaataaaaaaaaaaatcatccaggaaaaaaaa

SEQ ID NO: 276934 - DNA, 855 bp, Homo sapiens
gggatccagccgctctaaagttctttctgttccaggtggtgcccatgggttggacaatgaggctggtcacagcagcactgttactgggtctcatgatggtggtcactggagacgaggatgagaacagcccgtgtgcccatgaggccctcttggacgaggacaccctcttttgccagggccttgaagttttctacccagagttggggaacattggctgcaaggttgttcctgattgtaacaactacagacagaagatcacctcctggatggagccgatagtcaagttcccgggggccgtggacggcgcaacctatatcctggtgatggtggatccagatgcccctagcagagcagaacccagacagagattctggagacattggctggtaacagatatcaagggcgccgacctgaagaaagggaagattcagggccaggagttatcagcctaccaggctccctccccaccggcacacagtggcttccatcgctaccagttctttgtctatcttcaggaaggaaaagtcatctctctccttcccaaggaaaacaaaactcgaggctcttggaaaatggacagatttctgaaccgtttccacctgggcgaacctgaagcaagcacccagttcatgacccagaactaccaggactcaccaaccctccaggctcccagagaaagggccagcgagcccaagcacaaaaaccaggcggagatagctgcctgctagatagccggctttgccatccgggcatgtggccacactgcccaccaccgacgatgtgggtatggaaccccctctggatacagaaccccttcttttccaaataaaaaaaaaaatcatccaggaaaaaaaa

SEQ ID NO: 276935 - DNA, 922 bp, Homo sapiens
gaagagactgactagtcctcccaaagtacttgtgtccgggtggtggactggattcgctgcggagccctggaagctgcctttccttctccctgtgcttaaccagaggtgcccatgggttggacaatgaggctggtcacagcagcactgttactgggtctcatgatggtggtcactggagacgaggatgagaacagcccgtgtgcccatgaggccctcttggacgaggacaccctcttttgccagggccttgaagttttctacccagagttggggaacattggctgcaaggttgttcctgattgtaacaactacagacagaagatcacctcctggatggagccgatagtcaagttcccgggggccgtggacggcgcaacctatatcctggtgatggtggatccagatgcccctagcagagcagaacccagacagagattctggagacattggctggtaacagatatcaagggcgccgacctgaagaaagggaagattcagggccaggagttatcagcctaccaggctccctccccaccggcacacagtggcttccatcgctaccagttctttgtctatcttcaggaaggaaaagtcatctctctccttcccaaggaaaacaaaactcgaggctcttggaaaatggacagatttctgaaccgtttccacctgggcgaacctgaagcaagcacccagttcatgacccagaactaccaggactcaccaaccctccaggctcccagagaaagggccagcgagcccaagcacaaaaaccaggcggagatagctgcctgctagatagccggctttgccatccgggcatgtggccacactgcccaccaccgacgatgtgggtatggaaccccctctggatacagaaccccttcttttccaaataaaaaaaaaaatcatccaggaaaaaaaa

SEQ ID NO: 276936 - DNA, 846 bp, Homo sapiens
tagtcgtaccgggttatcgatgccaccatgtgcccatgggttggacaatgaggctggtcacagcagcactgttactgggtctcatgatggtggtcactggagacgaggatgagaacagcccgtgtgcccatgaggccctcttggacgaggacaccctcttttgccagggccttgaagttttctacccagagttggggaacattggctgcaaggttgttcctgattgtaacaactacagacagaagatcacctcctggatggagccgatagtcaagttcccgggggccgtggacggcgcaacctatatcctggtgatggtggatccagatgcccctagcagagcagaacccagacagagattctggagacattggctggtaacagatatcaagggcgccgacctgaagaaagggaagattcagggccaggagttatcagcctaccaggctccctccccaccggcacacagtggcttccatcgctaccagttctttgtctatcttcaggaaggaaaagtcatctctctccttcccaaggaaaacaaaactcgaggctcttggaaaatggacagatttctgaaccgtttccacctgggcgaacctgaagcaagcacccagttcatgacccagaactaccaggactcaccaaccctccaggctcccagagaaagggccagcgagcccaagcacaaaaaccaggcggagatagctgcctgctagatagccggctttgccatccgggcatgtggccacactgcccaccaccgacgatgtgggtatggaaccccctctggatacagaaccccttcttttccaaataaaaaaaaaaatcatccaggaaaaaaaa

SEQ ID NO: 276937 - DNA, 1143 bp, Homo sapiens
agttgggacgacgccggcgccgccgcgctgctgctgggctccagcctcccggccagctcgcggccactcagaaactccggcagggcagcccaggccggacgtgggcccaggagcggacgcgcgcgctgcactgcagccgctgccccttccggatcagcatcgccccgcgcgccaggcgcccaatgtcacggcggcgcgcggagccgggctgcggaggcagcgggcggcgcgcaggggcgccgggagaggggcgaggccgccgccgctacgcgcccgggcccgcggcgaaggcgctgccgcgaagacgcctggcgctgcagtcccaggtgcccatgggttggacaatgaggctggtcacagcagcactgttactgggtctcatgatggtggtcactggagacgaggatgagaacagcccgtgtgcccatgaggccctcttggacgaggacaccctcttttgccagggccttgaagttttctacccagagttggggaacattggctgcaaggttgttcctgattgtaacaactacagacagaagatcacctcctggatggagccgatagtcaagttcccgggggccgtggacggcgcaacctatatcctggtgatggtggatccagatgcccctagcagagcagaacccagacagagattctggagacattggctggtaacagatatcaagggcgccgacctgaagaaagggaagattcagggccaggagttatcagcctaccaggctccctccccaccggcacacagtggcttccatcgctaccagttctttgtctatcttcaggaaggaaaagtcatctctctccttcccaaggaaaacaaaactcgaggctcttggaaaatggacagatttctgaaccgtttccacctgggcgaacctgaagcaagcacccagttcatgacccagaactaccaggactcaccaaccctccaggctcccagagaaagggccagcgagcccaagcacaaaaaccaggcggagatagctgcctgctagatagccggctttgccatccgggcatgtggccacactgcccaccaccgacgatgtgggtatggaaccccctctggatacagaaccccttcttttccaaataaaaaaaaaaatcatccaggaaaaaaaa

SEQ ID NO: 276938 - DNA, 893 bp, Homo sapiens
gaagagactgactagtcctcccaaagtacttgtgtccgggtggtggactggattcgctgcggagccctggaagctgcctttccttctccctgtgcttaaccagaggtgcccatgggttggacaatgaggctggtcacagcagcactgttactgggtctcatgatggtggtcactggagacgaggatgagaacagcccgtgtgcccatgaggccctcttggacgaggacaccctcttttgccagggccttgaagttttctacccagagttggggaacattggctgcaaggttgttcctgattgtaacaactacagacagaagatcacctcctggatggagccgatagtcaagttcccgggggccgtggacggcgcaacctatatcctggtgatggtggatccagatgcccctagcagagcagaacccagacagagattctggagacattggctggtaacagatatcaagggcgccgacctgaagaaagggaagattcagggccaggagttatcagcctaccaggctccctccccaccggcacacagtggcttccatcgctaccagttctttgtctatcttcaggaaggaaaagtcatctctctccttcccaaggaaaacaaaactcgaggctcttggaaaatggacagatttctgaaccgtttccacctgggcgaacctgaagcaagcacccagttcatgacccagaactaccaggactcaccaaccctccaggctcccagagaaagggccagcgagcccaagcacaaaaaccaggcggagatagctgcctgctagatagccggctttgccatccgggcatgtggccacactgcccaccaccgacgatgtgggtatggaaccccctctggataacacgttcgcgagggggatct

SEQ ID NO: 276939 - DNA, 590 bp, Homo sapiens
tgcgggcccttgcgggggctggttccagcagcaaccgccgggcagggcccctcccgaccgcgacctcctgtccgcaccgtagggcagccggccgggccagcctccctcacaggactaccgaggaagaggtaggatttcactctgtcacccaggcgggagtgcagtggtgcgatcatagcggggactacaagtgtgcaccacatgcttgtctacgaacctgaagtattctgatgcagtggagagagtgtagaactctggagtgaagagatctgcctggaaccctgactctatcactaggagattccttggaatgaaaccaatgggagtccagggtttgggagagtctcatcagagcagatgggcgagcagcagccagaacgcttgttgcctttggctgagaacactatcctggatctgaatgtcttatcaggacctgaagtaggtggctgcccatccaggtattctacaggcacttgcccgtgaaaccttcaccactccttgaatctggttctgcaaagtgggacagctgagacttaggctaagtgacttactgaggcagcagtcagcaccgtgtgggaccagcccccatg

SEQ ID NO: 276940 - DNA, 589 bp, Homo sapiens
tgcgggcccttgcgggggctggttccagcagcaaccgccgggcagggcccctcccgaccgcgacctcctgtccgcaccgtagggcagccggccgggccagcctccctcacaggactaccgaggaagaggtaggatttcactctgtcacccaggcgggagtgcagtggtgcgatcatagcggggactacaagtgtgcaccacatgcttgtctacgaacctgaagtattctgatgcagtggagagagtgtagaactctggagtgaagagatctgcctggaaccctgactctatcactaggtaattcctataatctccctaggcctgttttctcagctggaaaattgattgatttgtggtatttgaagtgcctttgagcttgggatatccatgctggtgtttggctacagtatagcatagtggctagagcacaaactctggagttagaatgtttaggttaaacctcagcaactcacaccaaaggtatgtgactgtgggcaagttattagcctctctgagcctcagtttcttcatctgtagactggggataataatagtaaatatactgctgaacagttttaaagattcaatg

SEQ ID NO: 276941 - DNA, 775 bp, Homo sapiens
atggagatggctaacagctagagcaggctgtcctcggagggagacattccatctccagacacccagagacgctccagaatggaggtcctgagggagaaggtggaggaggaggaggaggccgagcgggaggaggcggccgagtgggctgaatgggcgaggatggagaaaatgatgaggccagttgaggtgcggaaggaggaaatcaccttaaagcaggagacgctcagagacctggagaagaagctgtcagagatccagatcactgtctcagcggagctcccggcctttaccaaggacactattgacatctccaagctgcccatttcctacaaaaccaacacacccaaggaggaacacctgctgcaggtggcagacaacttctcccgccagtacagccatctgtgcccggaccgcgtgccctcttcctgcaccccctgaacgagtgtgaagtgcccaagttcgtgagcacaaccctccggcccacactgatgccctaccccgagctctacaactgggacagctgtgcccagtttgtctccgacttcctcaccatggtgcccctgcctgaccctctcaagccgcctcgcacctgtactcctcgaccactgtgctcaagtaccagaaggggaactgctttgacttcagtacgctgctctgctccatgcttatcggctctggctatgatgcttactgcgtcaacggctacggctcgctggacctgtgccacatggacctgacgcgggaggtgtgcccactcactgtgaagcccaaggag

SEQ ID NO: 276942 - DNA, 1220 bp, Homo sapiens
ggaaaacagatgttcgaggacagaaatggaaagaccccagctgggaggctgcagatagtgcatcagctgggatggcgttgggtggtgtggaacagggacccccatagaagctgaggtttcttatataaggaaaggctagaggtggcactccaggcctctgtggcactgctggggaccccagctcccccatctctcggccctgccgtccatagcaggcagctttagccctcatgtgtggccacctcatggtctcgccttggctgccccacctcccactttatctccacattccaggtgggaggaggagaagggcagagggctccccaatcacttctgcccacatctcattggccagaaccgggtcacatcgcagggccacctctagctgcaagagaatctgggaagctgagcaattcaaaccaggcacactgctgccccccacacaactggggttctgccgtatagaagaggagactggatctttggagacattccatctccagacacccagagacgctccagaatggaggtcctgagggagaaggtggaggaggaggaggaggccgagcgggaggaggcggccgagtgggctgaatgggcgaggatggagaaaatgatgaggccagttgaggtgcggaaggaggaaatcaccttaaagcaggagacgctcagagacctggagaagaagctgtcagagatccagatcactgtctcagcggagctcccggcctttaccaaggacactattgacatctccaagctgcccatttcctacaaaaccaacacacccaaggaggaacacctgctgcaggtggcagacaacttctcccgccagtacagccatctgtgcccggaccgcgtgccctcttcctgcaccccctgaacgagtgtgaagtgcccaagttcgtgagcacaaccctccggcccacactgatgccctaccccgagctctacaactgggacagctgtgcccagtttgtctccgacttcctcaccatggtgcccctgcctgaccctctcaagccgcctcgcacctgtactcctcgaccactgtgctcaagtaccagaaggggaactgctttgacttcagtacgctgctctgctccatgcttatcggctctggctatgatgcttactgcgtcaacggctacggctcgctggacctgtgccacatggacctgacgcgggaggtgtgcccactcactgtgaagcccaaggag

SEQ ID NO: 276943 - DNA, 944 bp, Homo sapiens
taacgacgagaggacagccaacggcgagccgatcgcgagagcggaggagaggcaacagcagagcaggcgtcccggagggaaccgggtcacatcgcagggccacctctagctgcaagagaatctgggaagctgagcaattcaaaccaggcacactgctgccccccacacaactggggttctgccgtatagaagaggagactggatctttggagacattccatctccagacacccagagacgctccagaatggaggtcctgagggagaaggtggaggaggaggaggaggccgagcgggaggaggcggccgagtgggctgaatgggcgaggatggagaaaatgatgaggccagttgaggtgcggaaggaggaaatcaccttaaagcaggagacgctcagagacctggagaagaagctgtcagagatccagatcactgtctcagcggagctcccggcctttaccaaggacactattgacatctccaagctgcccatttcctacaaaaccaacacacccaaggaggaacacctgctgcaggtggcagacaacttctcccgccagtacagccatctgtgcccggaccgcgtgccctcttcctgcaccccctgaacgagtgtgaagtgcccaagttcgtgagcacaaccctccggcccacactgatgccctaccccgagctctacaactgggacagctgtgcccagtttgtctccgacttcctcaccatggtgcccctgcctgaccctctcaagccgcctcgcacctgtactcctcgaccactgtgctcaagtaccagaaggggaactgctttgacttcagtacgctgctctgctccatgcttatcggctctggctatgatgcttactgcgtcaacggctacggctcgctggacctgtgccacatggacctgacgcgggaggtgtgcccactcactgtgaagcccaaggag

SEQ ID NO: 276944 - DNA, 249 bp, Homo sapiens
ctatttagagaaagggtgattatccccactgtttctccatttaacagcccaatttggtctgttcttaggcttggaaagaatgaatggtgcctctcggtgaattactacaacctgaatcctgtgaccccacctgtgatggcccaatgttattgaaattactgactccatccacttagcaagtggtaaatactctgcaggcatagatttgactaatgtgttctgttcagcgcctatttcaacagatctcag

SEQ ID NO: 276945 - DNA, 937 bp, Homo sapiens
agtgtagatatagacttttaaaggtaaaaagaaagaataaagatggagggtgtgataatcctatgaagtgtctgggtttgggtcctgagggcagccaattacatcccagactcactggcaatcaacagtccaagccagggtcccatcagctgaatcctgaggtggggatgcttcagtctttacagaacagggtcaaggaagagtccagaaaccgccgtcattggcttcatgaaaaccgagcacgtctttgagatctttttcaaattctgcctctaagtcaagtcctacctggccaaagtcagaagccagctggtcctgaggctgcatctgcctctccagggtcttagatacatgatggcactgttggcttcctgaagacctcttcatcctgcagaaggtgcaactccacagcatcctgagaggttggacacaaggtgagcagagggcaaagcccctggaaatggccaccattcctgtggctgccactgtcttccctcaggaaggatgggctcagccatgagggtgggacacctcccagagtgtccaagatccccacatggggtctccagcattggcccttccctcgcatcagtggtagcggcaggcgggcagcctgaggaaggtggtgtcactgttaagtgtgggctctcttttccctgtctgagctgctgggagcacaaaggaaccctgcctgccaggcttgagtgtcagaatctgggctttcacctgcagggacctcaggcctccatcagccaggcttggaaagaatgaatggtgcctctcggtgaattactacaacctgaatcctgtgaccccacctgtgatggcccaatgttattgaaattactgactccatccacttagcaagtggtaaatactctgcaggcatagatttgactaatgtgttctgttcagcgcctatttcaacagatctcag

SEQ ID NO: 276946 - DNA, 951 bp, Homo sapiens
accttcctcacccccgccatttccaggactcacatccaaaggcgacagcaccaggatttgctcccgcctttggcacagaggaggacgggtccctctctcagcctggccagtctttcccagggcttgatgggaaaaaggacttccctagaaggcgggcaggtccggacgcgctgggccctggtcccttcggccgcaaacggcgcaagtcacgcactgcgttcaccgcgcaacaggtgctggagctggagcggcgcttcgtcttccagaagtacctggcgccgtccgagcgagacgggctagctacgcgactcggcctggccaacgcgcaggtggtcacttggttccagaaccggcgagccaagctcaagcgcgatgtggaggagatgcgcgccgacgtcgcctcgctacgcgcgttgtccccggaagtcctgtgcagcttagcactgcccgaaggcgctccagatcccggcctctgcctcggccctgccggccctgactcccggccccacctgtcagacgaggagatacaggtggacgattgaagacaaagccgccgccaatcctgggctctggggccctggactcctcacctcgcgctctgcctctggccagagttccagggtggaggaaggaggtccacttgggcctcttccggcccacagtccagacgctcacctttcccggtttttttgtaagtttgttttgttgtctgagacagggcctcgctctgtcgcccaggctggagtgccgtggagcgatcaccgctcactgcagtcgcgacctcctgggctcaagcgatcctcctgcctcaacctcccgactagctggcattacaggcgtgcagcaccaccccaggctaatttaaaaaacttttttttttagagaggaggtcccgctatgttgtccaggctactttcccaatatttgagaataaagtcgagactctgccgc

SEQ ID NO: 276947 - DNA, 873 bp, Homo sapiens
ttctgatgacataaattccttggtataatagagttataaaaaaggaatataccaccattctgcctgaattttgtggtacatttcagttacttatatcaattgaaattactgaatattttgccatgaccatttagaaaaaaagtgtaatgctattgatttaattcaagtacatttaaattttccatgaggagtgttccttttcccaccaaattgcataaagcataacagtatagatccctttttcaagaatttttaaataaaatgtaacttttatcaatttgtttagattgtttaaaaggatactttgaaaaaaatcattatttcttgctttagtaactggaggacatctctttatctatatagaatccatgcccaaacttaatattcctctattttcttgattttagaggtgaaaagccaggcatccttcaagctagtggatctttgacaaagatgcattgcaaaacaatcaacaaacaatcagaaaggcatgctatgtgtgagtgatgatccctgcagcatatgccataggcttgttgtagaggagctgctcagtaaatggtggattcaattgaaacaagtcttttttggatgcttaatgggaagttgtagggtgggtatgatggactaaaaattatttctaaagaaggttatatattgtatatattccagaatcttccgtttttatcgtttcttaaattaaaaaataaaaatttaactctgtcccaggttaactcagatgttaacacttatatagaaatttttttcctctttccccgttaggcatctcacagtattttctgcttgtctgtttaggatgttaggtagaggaaaagagagtgatagaagattttttttcttaaaaaaaaaaaa

SEQ ID NO: 276948 - DNA, 3358 bp, Homo sapiens
ggagcggggcgggcggctgggcggcgggcggcgggcggcgcgggagggcgggcggagggaaccaggccggccggagcgtgtgcgccgcccgcggtccggtcacgtccccgcgtgggcgccgctgcccgcgtcgtacggaacgagggcgccgcggccccgtgctcgccgccccgccccgccccgccctgcccggagcagctcggcagatgctctgtgctgcggcccggaggtgaagggctggatgcacagtgggagccggaggcggggggctgcagggagcacaccagcgaccggccctccaaccctccagccactcagcaacatcgccacagcaaccagcaaccagacggcagcagccgaggcaaacacaagcggacggcttcccaccgtcgccgaggacagggaatgactacggcaaatcaggccactttgccaactagggaggtggagtgtcactagtggggaggggcggccaccgcccgctgcacagagcgccatgccggctggagaagaggcgctggggcaggggctgcagtgtggctcggcctcacccccctgctggcactgagtgcctccagggcagctgggctcttgtctgcctggtctcagtgtcccctgtggcaagagggagaggtgccccatcccgtgctccttgtctgggcccgctgctgccagaccatgggatgtcggcaaagctcagaggaaaaagaagcagcccggcggtcccggagaattgaccgccacctgcgctcagagagccagcggcaacgccgcgaaatcaagctgctcctgctgggcaccagcaactcaggcaagagcaccatcgtcaaacagatgaagatcatccacagcggcggcttcaacctggaggcctgcaaggagtacaagcccctcatcatctacaatgccatcgactcgctgacccgcatcatccgggccctggccgccctcaggatcgacttccacaaccccgaccgcgcctacgacgctgtgcagctctttgcgctgacgggccccgctgagagcaagggcgagatcacacccgagctgctgggtgtcatgcgacggctctgggccgacccaggggcacaggcctgcttcagccgctccagcgagtaccacctggaggacaacgcggcctactacctgaacgacctggagcgcatcgccgcagctgactatatccccactgtcgaggacatcctgcgctcccgggacatgaccacgggcattgtggagaacaagttcaccttcaaggagctcaccttcaagatggtggacgtgggggggcagaggtcagagcgcaaaaagtggatccactgcttcgagggcgtcacagccatcatcttctgtgtggagctcagcggctacgacctgaaactctacgaggataaccagacaagtcggatggcagagagcttgcgcctctttgactccatctgcaacaacaactggttcatcaacacctcactcatcctcttcctgaacaagaaggacctgctggcagagaagatccgccgcatcccgctcaccatctgctttcccgagtacaagggccagaacacgtacgaggaggccgctgtctacatccagcggcagtttgaagacctgaaccgcaacaaggagaccaaggagatctactcccacttcacctgcgccaccgacaccagtaacatccagtttgtcttcgacgcggtgacagacgtcatcatacagaacaatctcaagtacattggcctttgctgaggagctgggcccggggcccgcctgcctatggtgaaacccacggggtgtcatgccccaacgcgtgctagagaggcccaatccaggggcagaaaacagggggcctaaagaatgtcccccaccccttggcctctgcctccttggccccacatttctgcaaacataaatatttacggatagattgctaggtagatagacacacacacatgcacacacacacatctggagatggcaaaatcctctaaaatgtcgaggtctcttgaagacttgagaagctgtcacaaggtcactacaagcccaacctgccccttcactttgccttcctgagttggccccactccacttgggggtctgcattggattgttagggataggcagcagggctgaggcaaggtaggccaactgcacccctgtcgcctggaggagggccagctcgctgcccgagctctggcctagggaccttgccgctgaccaagagggaggaccagtgcagggtctgtgcaccttccctgctggcctgcacacagctgctcagcaccactttcattctggacctgggaccttaggagccgggtgacagcactaaccagacctccagccactcacagctctttttaaaaaacagcttcaaaatatgcagcaaaaaccaatacaacaaaacgagtggcacgatttatttcaaactaggccagctgggattccagcttttcttctactagtctgatgttttataaatcaaaacctggttttccttctctgacatttttttttgttttttgttttttggttttttttttttttttggccaaatctcgtggtgtttcgcagaaaaaaatccagaaaatttcaaatgcagttgagtattcttttttaaatgcagattttcaaaacatattttttttcaggtggtcttttttgtgtctggcttgctgagtgtaaaagttgttatctggacgatctgtctctctgctccaaagaaattttggagtgagtggcagtcctgcgccagcctcgcgggacacgtgttgtacataagcctctgcagtgtcctcttgttaatggtggggttttctgctttgtttttatttaagaaaataaacacgacatatttaaagaaggttctttcacctgggagcaaatgaacaatagctaagtgtcttggtatttaaagagtaaattatttgtggctttgctgagtgaaggaaggggagcaaggggtggtgcccctggtcccagcatgccccgcgcctgagactggctggaaatgctctgactcctgtgaaggcacagccagcgttgtggcctgagggaggccctgctgggaccctgatctgggccttcctgtcccagggcctatgggcaactgcgttgaaaggacgttcgccaagggccgtgtgtaaatacgaactgcgccatggagaggagaggcactgccggagcccttgccagatctccctccctctctccgtgcagtagctgtgtgtccgaggtcagtgtgcggaatcacagccaaggacgtgaagagatgtacgggggaaagagaagctggggattggatgaaagtcaaaggttgtctactttaagaaaataaaataccctgaatggagcccagcat

SEQ ID NO: 276949 - DNA, 3171 bp, Homo sapiens
ggagcggggcgggcggctgggcggcgggcggcgggcggcgcgggagggcgggcggagggaaccaggccggccggagcgtgtgcgccgcccgcggtccggtcacgtccccgcgtgggcgccgctgcccgcgtcgtacggaacgagggcgccgcggccccgtgctcgccgccccgccccgccccgccctgcccggagcagctcggcagatgctctgtgctgcggcccggaggtgaagggctggatgcacagtgggagccggaggcggggggctgcagggagcacaccagcgaccggccctccaaccctccagccactcagcaacatcgccacagcaaccagcaaccagacggcagcagccgaggcaaacacaagcggacggcttcccaccgtcgccgaggacagggaatgactacggcaaatcaggccactttgccaactagggagaggtgccccatcccgtgctccttgtctgggcccgctgctgccagaccatgggatgtcggcaaagctcagaggaaaaagaagcagcccggcggtcccggagaattgaccgccacctgcgctcagagagccagcggcaacgccgcgaaatcaagctgctcctgctgggcaccagcaactcaggcaagagcaccatcgtcaaacagatgaagatcatccacagcggcggcttcaacctggaggcctgcaaggagtacaagcccctcatcatctacaatgccatcgactcgctgacccgcatcatccgggccctggccgccctcaggatcgacttccacaaccccgaccgcgcctacgacgctgtgcagctctttgcgctgacgggccccgctgagagcaagggcgagatcacacccgagctgctgggtgtcatgcgacggctctgggccgacccaggggcacaggcctgcttcagccgctccagcgagtaccacctggaggacaacgcggcctactacctgaacgacctggagcgcatcgccgcagctgactatatccccactgtcgaggacatcctgcgctcccgggacatgaccacgggcattgtggagaacaagttcaccttcaaggagctcaccttcaagatggtggacgtgggggggcagaggtcagagcgcaaaaagtggatccactgcttcgagggcgtcacagccatcatcttctgtgtggagctcagcggctacgacctgaaactctacgaggataaccagacaagtcggatggcagagagcttgcgcctctttgactccatctgcaacaacaactggttcatcaacacctcactcatcctcttcctgaacaagaaggacctgctggcagagaagatccgccgcatcccgctcaccatctgctttcccgagtacaagggccagaacacgtacgaggaggccgctgtctacatccagcggcagtttgaagacctgaaccgcaacaaggagaccaaggagatctactcccacttcacctgcgccaccgacaccagtaacatccagtttgtcttcgacgcggtgacagacgtcatcatacagaacaatctcaagtacattggcctttgctgaggagctgggcccggggcccgcctgcctatggtgaaacccacggggtgtcatgccccaacgcgtgctagagaggcccaatccaggggcagaaaacagggggcctaaagaatgtcccccaccccttggcctctgcctccttggccccacatttctgcaaacataaatatttacggatagattgctaggtagatagacacacacacatgcacacacacacatctggagatggcaaaatcctctaaaatgtcgaggtctcttgaagacttgagaagctgtcacaaggtcactacaagcccaacctgccccttcactttgccttcctgagttggccccactccacttgggggtctgcattggattgttagggataggcagcagggctgaggcaaggtaggccaactgcacccctgtcgcctggaggagggccagctcgctgcccgagctctggcctagggaccttgccgctgaccaagagggaggaccagtgcagggtctgtgcaccttccctgctggcctgcacacagctgctcagcaccactttcattctggacctgggaccttaggagccgggtgacagcactaaccagacctccagccactcacagctctttttaaaaaacagcttcaaaatatgcagcaaaaaccaatacaacaaaacgagtggcacgatttatttcaaactaggccagctgggattccagcttttcttctactagtctgatgttttataaatcaaaacctggttttccttctctgacatttttttttgttttttgttttttggttttttttttttttttggccaaatctcgtggtgtttcgcagaaaaaaatccagaaaatttcaaatgcagttgagtattcttttttaaatgcagattttcaaaacatattttttttcaggtggtcttttttgtgtctggcttgctgagtgtaaaagttgttatctggacgatctgtctctctgctccaaagaaattttggagtgagtggcagtcctgcgccagcctcgcgggacacgtgttgtacataagcctctgcagtgtcctcttgttaatggtggggttttctgctttgtttttatttaagaaaataaacacgacatatttaaagaaggttctttcacctgggagcaaatgaacaatagctaagtgtcttggtatttaaagagtaaattatttgtggctttgctgagtgaaggaaggggagcaaggggtggtgcccctggtcccagcatgccccgcgcctgagactggctggaaatgctctgactcctgtgaaggcacagccagcgttgtggcctgagggaggccctgctgggaccctgatctgggccttcctgtcccagggcctatgggcaactgcgttgaaaggacgttcgccaagggccgtgtgtaaatacgaactgcgccatggagaggagaggcactgccggagcccttgccagatctccctccctctctccgtgcagtagctgtgtgtccgaggtcagtgtgcggaatcacagccaaggacgtgaagagatgtacgggggaaagagaagctggggattggatgaaagtcaaaggttgtctactttaagaaaataaaataccctgaatggagcccagcat

SEQ ID NO: 276950 - DNA, 1362 bp, Homo sapiens
gcggccgcgtctccttccgccgcccggaaatcagggcccctccccctccctgctgtgctcacgtgatcgcagcccgcagccgcgcgcaaccggggaggcgggagcgggagcggtaggccccgcccacagaggagggtaccccgccggaagccccctgctctgtgggaaccggagggaggacagcgcgaggtccccggacaaagcgtggcgcataagtccggcccgtaacttggtgggcaggcaacttaggggatgtgggcctggttatagctgagcatgcttttctattcctcccagaccacagttcttcagacctggagccactttcagagaagagtataagttgcactgaattgaaaaagggaaaagtttaggactgcagaagatggaattcctggggacgttaaactgggctaagatggagcagataagatttccttaattagagcaagacacacctagtatctagagcctggaagtcttggtcaaggattctccctaacatctcagtttctcagcactaacattcctgctactaaaatgaagtgagaaattaatttctgaagttaagtaaagaaataaactaaaattcctagaaaagaggtaagaagaatgagcctttgaaaaatgtcttcacaaagactggcatgatggcatggaagaaagagccccagatatccagtatacatctcaaggtcaacttgtccaaaacagagctactgatgattttccccttgaaatctactcttcctacagcttattcatctcaaatagctggagtacagtggcatgatcatatctcactgcaacttctacctcctgggctcaagcaatcctcttacctcagcctcctgagtagctgggactatagtctccctctcttgccaagcctggactgtactgccatgatctcagctcgctgcaacctccctgcctcgagttctggtgattctcctgcctcggcctgacattccaggcaggcgccgccactcctgactggtttttgtatttttggtggagacggggtttcaccgtgttgaccgggctggtctccagctcctggcctcgggtgatctgcccacctcggcctcccgaggtgctgggattgcagacggagtctcgctcactcaatgctcaatgttgcccaggctggagtgcagtggcgtgatctcagcttgctacaacctccacctcccagccgcctgccttggcctcccaaagtgctaagattacagcctctgcccacccgccaccccgtctaggaagtgagcagcgtctctgcctggccgcccatcgtctgggatgtgaggagcacctttgcccggccgccccgtctgggaagtgaggagcgcctctgcccgg

SEQ ID NO: 276951 - DNA, 1026 bp, Homo sapiens
gcggccgcgtctccttccgccgcccggaaatcagggcccctccccctccctgctgtgctcacgtgatcgcagcccgcagccgcgcgcaaccggggaggcgggagcgggagcggtaggccccgcccacagaggagggtaccccgccggaagccccctgctctgtgggaaccggagggaggacagcgcgaggtccccggacaaagcgtggcgcataagtccggcccgtaacttggtgggcaggcaacttaggggatgtgggcctggttatagctgagcatgcttttctattcctcccagaccacagttcttcagacctggagccactttcagagaagagtatatccagtatacatctcaaggtcaacttgtccaaaacagagctactgatgattttccccttgaaatctactcttcctacagcttattcatctcaaatagctggagtacagtggcatgatcatatctcactgcaacttctacctcctgggctcaagcaatcctcttacctcagcctcctgagtagctgggactatagtctccctctcttgccaagcctggactgtactgccatgatctcagctcgctgcaacctccctgcctcgagttctggtgattctcctgcctcggcctgacattccaggcaggcgccgccactcctgactggtttttgtatttttggtggagacggggtttcaccgtgttgaccgggctggtctccagctcctggcctcgggtgatctgcccacctcggcctcccgaggtgctgggattgcagacggagtctcgctcactcaatgctcaatgttgcccaggctggagtgcagtggcgtgatctcagcttgctacaacctccacctcccagccgcctgccttggcctcccaaagtgctaagattacagcctctgcccacccgccaccccgtctaggaagtgagcagcgtctctgcctggccgcccatcgtctgggatgtgaggagcacctttgcccggccgccccgtctgggaagtgaggagcgcctctgcccgg

SEQ ID NO: 276952 - DNA, 1354 bp, Homo sapiens
  misc_feature (52)..(52): n is a, c, g, or t
  misc_feature (1175)..(1175): n is a, c, g, or t
tgcctacccacgtgggggaatttctctgtcaagtttctgctgctttgcagcnatttaaaatgggtcctgaaatatctgcagtgcagaacatctgagaagagcttttcatttgctagaatgttgcagcaagcaggctaagcgatgttagcaggcaactttgtgatagatttagaaagccccgaagaaatgggtggtggtgatacagagagattttttctttcctttttttccttttttggcttgtctgcagaatagatgaaaagagaaaatatacccagatactttgctcactctcccaagtgcacactaggcaatgtaagctccagaggcagcgcttacaggaggggaagggacgctgaggccaagagtgctggctcactggggtggaagggacttcagagggcgttcctcactcctcttattgcaggtgaagaaacagaggcagtggtcctttgccccaggccattcagctggccagtagcggagcccagggctacccagatcctccaatgcccaggctggtcctctttcctttctgaccccaacacatgaagagtccatctggaaatgttggctcccacacttcaaaacattaaactccttgttctctttctccaaatgattaatttgttttcagtgtttacattagctggaagccaagttgggaacactcctaactcgtttctcaaacaagatgtttttaaaatgaagtttcccagcatggaatgctttgctactttgtaagggcttcagttgctaagaacttactgcacctgtgtcaaaactgtgctctcagggcccctggtggagtccagaagaagagttccacgcagtccctgtttttcttttttttccaggaactcctggaaactgaatcacagatcagatcatgttgttccacaagaacgatgtgtcactgtgaggctgcattcctgaccacgaactgagcaccaaataagtcatggacatgcaccaaaaggtgtgacccaagggaggcagggtgagccccatgtctcagaacatcctcgcggacagcaaagcccttgatgtggtggagtaggggcctgtggcaacccctcacacatggcaggtcctttgcaaccccaagtgcttcagatgctaccagccctccttgggcaggtctgagatgtgacagagaagaagatgagaatggnaaaagagaaagaagagcggaaaactaaaagagggaagggcagaggaaagagcagaaatgcagtctagctggagggcaggctgctggctccagccactgcctcagatccccccgacctggggtactcaggagtctgagtgggtacagggctatagcctcaatttccccatctgatgtggg

SEQ ID NO: 276953 - DNA, 805 bp, Homo sapiens
agctaccaggcggcaagagcagtgaagcacccgtcgtcacgctggttccctagtgcagacttggaatatgctggagaatattcagaggagcatgggtgcttgctctgacatgagtctcagaggtgcagacacgcacctgcaacgtcctaactttccttagaagcaatttggaactatcaaccacaatatatttatccaaagtccctataaactaagactttctggcatcctttatcttgaagttgaaccaactgaaaacaccctttgactcctcttctgcctgtcctactgatgtctatcaccttctcctgcctgatcccagccccaccagaaggtcataagcgaagtggccttctcagaatgcagctgctgaaggttcagccacacagaatccatccaggagcctcaagcagccagacctcaagcctcttgggaaaaacatctctttcaaaataaaggcacgagaatcacgttctgtcagcgcagtcgccactgtctggaccgctgcacaaaagcagacacgagtggagtgaggcccgcggcggagccctccctgcctcctggcggcgtgggctcaggccagggccagggcgcaccaggaatccggtcgcacggaggacgtgacttcggccggcgaggcgagactgacgcctatgtagagcccatcttgacccgaatacttgagctcgctgttctcgggattggtgctctctcccgcaccagtcatcaccggggcacccgcctggcagaagagggggacacagaggagagacgagaaggtgagaagcggttacaatcctggtag

SEQ ID NO: 276954 - DNA, 2647 bp, Homo sapiens
agtcgctgcagtcgtccgcgggactccggccggttgccggccccaggcggtgcttctccccaccaccgcccagctcagctcagcccagcccagcccactctgcccttagaggcccttctccccaaagacgcactccagaagtctcgccctcgtgcggctgaggagcctgggatcccagacctgaacaagtgaaacccccgcccctgaagaatgggtaagacgttttcccagctgggctcttggcgggaggatgagaacaagtcaatcctgtcctccaaaccagccattggcagcaaggctgtcaactactccagcaccggtagcagcaagtctttttgttcctgtgtgccttgtgaaggaactgctgatgccagcttcgtgacttgtcccacctgccagggcagtggcaagattccccaagagctggagaagcagttggtggctctcattccctatggggaccagaggctgaagcccaagcacacgaagctctttgtgttcctggccgtgctcatctgcctggtgacctcctccttcatcgtctttttcctgtttccccggtccgtcattgtgcagcctgcaggcctcaactcctccacagtggcctttgatgaggctgatatctacctcaacataacgaatatcttaaacatctccaatggcaactactaccccattatggtgacacagctgaccctcgaggttctgcacctgtccctcgtggtggggcaggtttccaacaaccttctcctacacattggccctttggccagtgaacagatgttttacgcagtagctaccaagatacgggatgaaaacacatacaaaatctgtacctggctggaaatcaaagtccaccatgtgcttttgcacatccagggcaccctgacctgttcatacctgagccattcagagcagctggtctttcagagctatgaatatgtggactgccgaggaaacgcatctgtgccccaccagctgacccctcacccaccatgacctgtctgctgtccctgtactccaggcacctgcaaccctggtctatatctcccacaactccctggtgactaaggaaggactacagaggctttgccaaaggagaagccctgcctcatcacacccttacctcccaccccctcagcacaggaagcttgctttgaagttaacttcatacacacacactcatatcctccagtttcccccagattctttcaggggctgccatcagattctgcccttggttagttttttgttttttttttggtagagacagagtctcactgttggtccaggttggttttgaactcctgggctcaagcgatcctcccttcttggcctcccaaagcacttggattacagatgtgagcctgtgcctggctggtctttcttgaggaaaatctgacctggcattttcttgaggcaccttagattccctggagtggcacctggcctttctgtactgagcacctggtcagtctgaagggggcatttcaccccagctccatcagggctggctgtcccgtctgaatgtggagagagctgtagttttatctggcttttaaaacatggacctgccggctgggcgcagtggcttacacctgtaatcccagtactttgggaggccgaagtgggtggatcacttgagggcaggagttcgtgaccagcctggtcaacatggtgaaaccttgtctctactaaaaatacaaaaattagctgggtgtggtggcatgcgcctgtaatcccagctactcgggaggctgaggcagcagaatcacttgaaaccggaaggcagaggttgcagtgagccaagatcgtgcaactgcactccagcctgggcaaaagagcaaaactttgtctcaaaaaaagactcttttcaagttttctaccctctgataagaaaatttggggatatccagtgccatctccaaggactttcaggggatcatagatgcttttctgtgcctatctgctttgaccatgtgaaaaagtgatagtctgcttctctctggtaacttgtctgccacccatctgatagtaagattagccaaggccctttagccctctgtcctttctggttattgactgtccctggttcctaggaagacagagttgttctccagctaaagcgtctcctctctataaagtagttttactattcttttcatagcaggagccaaaatagtagaggaggggagagaggcacctggcactctgcgggcctgcacaggaaaaacagagccaaagacagaatcattgtataagatatttattaaaggagagcctctaagtccacatcctgagcccatgtgagtggacacaggtaggtaaaacggtgggtccagctgctgtcatctgaaagccttcaggagatgaagctatcagtatccagctgaaggctgctgggttctgttccaccaccaccttagcaccagggccctctctggtcccagaggcctcatctctccttgggctttgacaatgtggagcagcacatcagcagggactggtctagaccctccctttcctgtcacttagctggagctaagctccagataacccctaggttcccactggctcctagtagaaatagtttctgtactttagcagaacaggaaggatatttgttcattaaaggtggcttggtctt

SEQ ID NO: 276955 - DNA, 367 bp, Homo sapiens
ggaaagtgggcccgtaaatatttaaccccccaaccccgtttttttataaaaaaccccaaaaaaaaaaaaaaaaaaaaaaaaaaagatggctgtctctttatcattcagacagaacgatgaacacaggtgagcagggaaagctaattttgaagtagggtgcatggagagggagaagtggtgacagaacttggtaactagctggctgggggaacgaggggaaggaaggagactgctgtctccaagctgaggtcagggtggtgttggcaagagcgcaaaagtccagggaagccaggctggagctgctgtgtatagactgccaaatgtgaagtatttatattgtattcaataaactatacttaagagtgtt

SEQ ID NO: 276956 - DNA, 3599 bp, Homo sapiens
agtcgctgcagtcgtccgcgggactccggccggttgccggccccaggcggtgcttctccccaccaccgcccagctcagctcagcccagcccagcccactctgcccttagaggcccttctccccaaagacgcactccagaagtctcgccctcgtgcggctgaggagcctgggatcccagacctgaacaagtgaaacccccgcccctgaagaatgggtaagacgttttcccagctgggctcttggcgggaggatgagaacaagtcaatcctgtcctccaaaccagccattggcagcaaggctgtcaactactccagcaccggtagcagcaagtctttttgttcctgtgtgccttgtgaaggaactgctgatgccagcttcgtgacttgtcccacctgccagggcagtggcaagattccccaagagctggagaagcagttggtggctctcattccctatggggaccagaggctgaagcccaagcacacgaagctctttgtgttcctggccgtgctcatctgcctggtgacctcctccttcatcgtctttttcctgtttccccggtccgtcattgtgcagcctgcaggcctcaactcctccacagtggcctttgatgaggctgatatctacctcaacataacgaatatcttaaacatctccaatggcaactactaccccattatggtgacacagctgaccctcgaggttctgcacctgtccctcgtggtggggcaggtttccaacaaccttctcctacacattggccctttggccagtgaacagatgttttacgcagtagctaccaagatacgggatgaaaacacatacaaaatctgtacctggctggaaatcaaagtccaccatgtgcttttgcacatccagtaagtagagcttggagctctggtatccctgctctcacttctgacttcattctcactcagctacacctcatgggcagagagtcttccaagctgaccccatgaatctttgttggctcttgggaatagcaagtctagccccttttctgagtctcaccttgcctataagttattaggggcaacaggcatagggctgtctggaagctgctggaaaacaggtggggcagctgtcccaggtaccttggcagagtggggagccagagggaagggcaaatgagggagctccccgctccccacccccagacagtataatggggccagagctttccttttcctcccagccatggcaacaaggcctgcttcctctccaggggcaccctgacctgttcatacctgagccattcagagcagctggtctttcagagctatgaatatgtggactgccgaggaaacgcatctgtgccccaccagctgacccctcacccaccatgacctgtctgctgtccctgtactccaggcacctgcaaccctggtctatatctcccacaactccctggtgactaaggaaggactacagaggctttgccaaaggagaagccctgcctcatcacacccttacctcccaccccctcagcacaggaagcttgctttgaagttaacttcatacacacacactcatatcctccagtttcccccagattctttcaggggctgccatcagattctgcccttggttagttttttgttttttttttggtagagacagagtctcactgttggtccaggttggttttgaactcctgggctcaagcgatcctcccttcttggcctcccaaagcacttggattacagatgtgagcctgtgcctggctggtctttcttgaggaaaatctgacctggcattttcttgaggcaccttagattccctggagtggcacctggcctttctgtactgagcacctggtcagtctgaagggggcatttcaccccagctccatcagggctggctgtcccgtctgaatgtggagagagctgtagttttatctggcttttaaaacatggacctgccggctgggcgcagtggcttacacctgtaatcccagtactttgggaggccgaagtgggtggatcacttgagggcaggagttcgtgaccagcctggtcaacatggtgaaaccttgtctctactaaaaatacaaaaattagctgggtgtggtggcatgcgcctgtaatcccagctactcgggaggctgaggcagcagaatcacttgaaaccggaaggcagaggttgcagtgagccaagatcgtgcaactgcactccagcctgggcaaaagagcaaaactttgtctcaaaaaaagactcttttcaagttttctaccctctgataagaaaatttggggatatccagtgccatctccaaggactttcaggggatcatagatgcttttctgtgcctatctgctttgaccatgtgaaaaagtgatagtctgcttctctctggtaacttgtctgccacccatctgatagtaagattagccaaggccctttagccctctgtcctttctggttattgactgtccctggttcctaggaagacagagttgttctccagctaaagcgtctcctctctataaagtagttttactattcttttcatagcaggagccaaaatagtagaggaggggagagaggcacctggcactctgcgggcctgcacaggaaaaacagagccaaagacagaatcattgtataagatatttattaaaggagagcctctaagtccacatcctgagcccatgtgagtggacacaggtaggtaaaacggtgggtccagctgctgtcatctgaaagccttcaggagatgaagctatcagtatccagctgaaggctgctgggttctgttccaccaccaccttagcaccagggccctctctggtcccagaggcctcatctctccttgggctttgacaatgtggagcagcacatcagcagggactggtctagaccctccctttcctgtcacttagctggagctaagctccagataacccctaggttcccactggctcctagtagaaatagtttctgtactttagcagaacaggaaggatatttgttcattaaaggtggcttggtcttacagctgggtgcagtggtatatacctgtagtcccagctactcaggaagctgaggtgagaggatctctagagcccaggaattcaagtttaacatgagcagcaacattagcaagaccccgtttaaaaaaaaaaaaagagctgggcgtaatggcgcacacctgtaatcccacctactcaggaggctgaggcaggagaatcacttgaacccgggaggcagaggttgcagtgagccaagatcgcaccactgcactccagcctgggcaacaagggcgagactctgtctcaaaaaaaaaaaaaaaaaagatggctgtctctttatcattcagacagaacgatgaacacaggtgagcagggaaagctaattttgaagtagggtgcatggagagggagaagtggtgacagaacttggtaactagctggctgggggaacgaggggaaggaaggagactgctgtctccaagctgaggtcagggtggtgttggcaagagcgcaaaagtccagggaagccaggctggagctgctgtgtatagactgccaaatgtgaagtatttatattgtattcaataaactatacttaagagtgtt

SEQ ID NO: 276957 - DNA, 414 bp, Homo sapiens
aaatatttgtcacagttgcatcttggccctccctctcaccttctctctctctagagctggagaagcagttggtggctctcattccctatggggaccagaggctgaagcccaagcacacgtaagccccccttcctcccctagcttcacaagccattgcccctgggggctgctccctttgtctcccctgttttgatctcccttaatttcttcctattagttcttccatagaaagcctgagcctcagaggtaccagctccttacgtccaaggattttttcctgatttagaagctcctggaccgggtgtggtggctcatgcctgtaatcccagcactttgggaggccaaggcaggcagattacttgagctcaggagttcaagaccagcctgggcaacatggtgaaaccccatctctat

SEQ ID NO: 276958 - DNA, 809 bp, Homo sapiens
gcacgtccagaatgaaccggatccggtcgccgttggtgcgctggagcaccttggcccccacctcctggtagacgccctgcaggtacttcaccaccaggtccagctgcccctcatcctccagaggagtaaaaataactgcactgagttgacgtgttggtgctggaagtcgccacaacaaaatgagtatttccagaggggaaatagacatttctgagttagacaaatcccttgcagttcatcgacagcacatgatgaaagctggctgcagatccagggagcaggaagccactctgcagcaagacgtctgccacgtggtatcggccaggctcactgcagcacttgagcgcccacagggctcccgacgctgagctagggacgcccccggccgcaaggggctggctaccgaggccaccgtgacatggggtggactgagacagtcggccagggaaggcggtggccttgcgcagaggctctctgctgtagccttgcctggtggccctgggtaaactgtcctcgccggagccccagcttccttacccgtaaagcggggaaatggggccgcaacttcccaggacagttgtgagaattcagcgcagtgactgagcccacgatctaactctaacggccagagcgcagcctggctctgctacttcccacaatcattcacacgcgtacaccgcagccatggatttcaagagctacacacagaggacatatttactaatcacaaagtaaaccatttaaagcaagcacaaaacatcatccacctaccagaagcgtctgtttctctttacaatcaaagtgcttta

SEQ ID NO: 276959 - DNA, 498 bp, Homo sapiens
tcaattggaagaaaaaatttcaaaagggtgtccacagaggcgaaaaaagcccaggctctaccgaccttcaaactacaacagagctttcaggagaatgcggagagacggcttcccacccggacctcaccagaaacccgcacaccccagccacattgctcctcattcagccagaaaggactccaactccaccaccaggaggccccccttcctggtgctggccagttgcagaggctgttcatggcatcccacaggtggcgactgccccccaccctcctcctagcactttagagggtccctctgtggcagacaccatggctaggtttctctttccaactcctgttggtctggcaagtgacagatcatcttcactacattaatcagtagtcacccgaacattcctatactgtcccccaattcctttcagcaccagctgcctcccccactggaattattcaatatggaactagattaaattgaagacttgccctttagttttta

SEQ ID NO: 276960 - DNA, 727 bp, Homo sapiens
tttttttttttggggcatgagtttatacaacatgctacactacgcacttggtagcagtattcaaataaaaatatgattgctgcctcaggtcattccaaaagtatagtcatccaaaagtatttaaggcctatgctgaggactgaagcacaagtgttaagactgctattccttactctgacctaatagctttcccccattcattctcatcaaatattgatttaacaatggaaagtggcaggaagcttgtgttcccattaaacacaacacttcccctcctccccagaaaacagaaaaaaaaaaagtcaggaacagggaagaaaagtaatcacatttaaatggtgatagaaaaatttaagtcttctatgctttaagcatttaattgcaatgtgtaggtaactcattcatttatttaacaaatattcaggagtaccaggtactgtgccccaggaaattccaacagagtgacatgtgctaaacaggggcaaacaaaatttaagagcacacaggaggagcctaatccagtcactggaggtaaggaaatgttcctggtagaatggtatctaggctaaagagaagagccagaggaaggtgtggtggacaggagcaagtgatttgccaggcagccagctaatacaaaatcgggaggcactaaacatcaccatgagggatagaacatgcactgctggaagcagtgcaaacacatttttctgtgaatcatatcctttgt

SEQ ID NO: 276961 - DNA, 1399 bp, Homo sapiens
tttttttttttggggcatgagtttatacaacatgctacactacgcacttggtagcagtattcaaataaaaatatgattgctgcctcaggtcattccaaaagtatagtcatccaaaagtatttaaggcctatgctgaggactgaagcacaagtgttaagactgctattccttactctgacctaatagctttcccccattcattctcatcaaatattgatttaacaatggaaagtggcaggaagcttgtgttcccattaaacacaacacttcccctcctccccagaaaacagaaaaaaaaaaagtcaggaacagggaagaaaagtaatcacatttaaatggtgatagaaaaatttaagtcttctatgctttaagcatttaattgcaatgtgtaggtaactcattcatttatttaacaaatattcaggagtaccaggtactgtgctaggggctgggagtaaacaagacatagtccttacccataggaagttatattttgtatctccccaggaaattccaacagagtgacatgtgctaaacaggggcaaacaaaatttaagagcacacaggaggagcctaatccagtcactggagtttcagcacatgagaacaaaagtacgccctttgaaaaagtagcagtagatcaaaagcacagagatgctgctgcatttacttttacttcaggttttctgtagtgcttccacagcaagatggacgctgtttaaagtattgccaatggaagctacactctgaatggaaacatataggaaggtgtaaaaaagctttaagagacaactgacatgcaataaactgtacatattcaaaaatgtataatttgaatgttttgacacataaacaattgtgaaaccagtactacaatcaagataataaacactcatcacctctgaaaaaaaaaaagtaaatataatacaattaatcttcatttttattatttatgatatactacgtccaatatacaacttaactccgtctcctccccgtatttttcccagcaatacttgagtggttgatcagccaagtcctgtcccgtcttcatttttctcatgttgctacctacaccccccccaatcagctgcgacggtcgcacatacaagattggatgatgtatttatcagaagcatgctgtttatcataagctgaggagatgagctccgtgcacgatgatttgtcaatcatataatattatccttcctccccctatttacttattcatttacgctaatttatcttgattcgcccttgaatgtcttgactcgtttgtcggaagtcttatctgttacagtagtgcgagctggtcctagttgcacaatcaaatgtatctacactgactgtatgtattcgcgttttcctatctattatgcaatatgactgctacatattg

SEQ ID NO: 276962 - DNA, 990 bp, Homo sapiens
ttagttgcagagccagttctcaaatctacatctgccttgcatcaaagttactggtatgaaagttattgatcatcagttgcttggcatcaaagccccaggaaattccaacagagtgacatgtgctaaacaggggcaaacaaaatttaagagcacacaggaggagcctaatccagtcactggagtttcagcacatgagaacaaaagtacgccctttgaaaaagtagcagtagatcaaaagcacagagatgctgctgcatttacttttacttcaggttttctgtagtgcttccacagcaagatggacgctgtttaaagtattgccaatggaagctacactctgaatggaaacatataggaaggtgtaaaaaagctttaagagacaactgacatgcaataaactgtacatattcaaaaatgtataatttgaatgttttgacacataaacaattgtgaaaccagtactacaatcaagataataaacactcatcacctctgaaaaaaaaaaagtaaatataatacaattaatcttcatttttattatttatgatatactacgtccaatatacaacttaactccgtctcctccccgtatttttcccagcaatacttgagtggttgatcagccaagtcctgtcccgtcttcatttttctcatgttgctacctacaccccccccaatcagctgcgacggtcgcacatacaagattggatgatgtatttatcagaagcatgctgtttatcataagctgaggagatgagctccgtgcacgatgatttgtcaatcatataatattatccttcctccccctatttacttattcatttacgctaatttatcttgattcgcccttgaatgtcttgactcgtttgtcggaagtcttatctgttacagtagtgcgagctggtcctagttgcacaatcaaatgtatctacactgactgtatgtattcgcgttttcctatctattatgcaatatgactgctacatattg

SEQ ID NO: 276963 - DNA, 833 bp, Homo sapiens
gaccccaggagcaggggtcgcgccgaagagcagagtccgcggctggaaaccaggcaggggagccacggagtagtcacacaggttttctgccgcctttcaactggtcttattttgctttcatttttcaccagcccatgtggggtgtttaatgttgcacgcgaacgcagtttcttccgggcccggaaggcccacgcacgcaacaatgttgtgcaagtgactggaaaccacctgagtgtccctccatgggggtgggttgcccagcatggacctctactcctgtcacaatgaagtcgactgtttcgtcgagggaagtggccaccgttgataaaatgaaaagacgccatgcagaatactgtgcacaggaggaaaggtctgcgtgccctaagagagagctgctggcgtgcagagagaagcagagatgccgacgacggggaggaaacacactggcggtggtgaggctccttccagcagccacagccctggttcctctcagtctgtgaccctcccacatccttcccatctatgagagcctgtaaactccttttgcttaaccttgttttagttaaggttttaaacaattgccaccagtgtgccctaaaccaccccagtggcttgagtgtttctccgcttcttttgcctaggatgctgcggagatggacaggacaggagactaaggaggtgagaaccctggcccacaccatcactaagggcccttcctgaggtctgcttcccacatgaagtcctcccagggccctgaatccagccatccacctccttgttggacataggctccattagagagatgcggggctccagccccccttgctctgcct

SEQ ID NO: 276964 - DNA, 635 bp, Homo sapiens
gggggacagagcgagaatccgtttcaaaaaatagagaaaagaaaaagtcttgagtgctggacaagcctgtgactcaggactcggaatgataaacaagagagaaatacactgagtttctatgatagtcactaactcggggctgccggcactcgtgttcccctgcagaggaaaggtctgcgtgccctaagagagagctgctggcgtgcagagagaagcagagatgccgacgacggggaggaaacacactggcggtggtgaggctccttccagcagccacagccctggttcctctcagtctgtgaccctcccacatccttcccatctatgagagcctgtaaactccttttgcttaaccttgttttagttaaggttttaaacaattgccaccagtgtgccctaaaccaccccagtggcttgagtgtttctccgcttcttttgcctaggatgctgcggagatggacaggacaggagactaaggaggtgagaaccctggcccacaccatcactaagggcccttcctgaggtctgcttcccacatgaagtcctcccagggccctgaatccagccatccacctccttgttggacataggctccattagagagatgcggggctccagccccccttgctctgcct

SEQ ID NO: 276965 - DNA, 517 bp, Homo sapiens
gccaggcacaaaaagatcaaatattgtttgattccacagatataagctgtccagaataggcaaatcctaagaaacagaaagtggatgagtgattgccagagcctggcaggggccaaaagaaatggtcaaggcagaaggccagaaaagaacacagataaccagaaccagaagagcacaaaggccattgagaagaaggggctaataaaatattaaattcctcaagtaatgctacccacacaggaatatgatgcttcagatgtgaacgacagaggacctgaaatccttgagccctttaaagagatcactgtgctctgatgcatgtgtgtggaggtctacgaacacctataataggtgatacctgcgaggtcacacaattctgtatcagaagcacttgtcaaagcttcttctaattctggatcaagagacactttttcttctgtaaaagtctgtacaggtttctgtttggggataaatattttccctgtaaaataaagcattttgttaattccattactac

SEQ ID NO: 276966 - DNA, 704 bp, Homo sapiens
ttgccccacttaaatggttaacagtaacagcagcacagacccaaacttgataaaactttggtacttgttatttggactaaaattttgtctcactcgattcagacacgtaaatgggagttttcagtttatcctgcccactgattcataactgggagacagattcatgggaaggcagcattggacacatactccttctcttgctgagaaccaccaatataatctaattctctttttttaggtgagagaagcagaggcccaaaggaatattgcaaatacccaaggtcaccctgtcaggagtggcagaatagggctggaacaaggactcttttctctggacagcttgcacctacaatcctttccatcttgcacctacaatccactcgaacactgcagcatggaggcagactccttgccaacgggtattgtcgagagcttcttcctaccatcatttgaagaaaaaaagcttggagatggggaagaatgattgatcaacatgtttcttccttagtttgttactgctgttgttttaaatcgagaaagcatttttaaacaggatggggggggactgataatatcagtcctccttaatttcattacagccgagtcatcagtattttagtatttcttgcaggttgatgattacaacaatataattttatttattttaattaaactctatttgcttcccacataatttgtgttga

SEQ ID NO: 276967 - DNA, 158 bp, Homo sapiens
acctgatccctacaactcagatttggaaccctgaccagtcttggtgcttctccaatacaaatcctatattttcaaggcatataaatcatattagagatatggaaatccttgcccttgagtcaaaggctaacctttccctagaagattagttgatttgt

SEQ ID NO: 276968 - DNA, 348 bp, Homo sapiens
taaatctccacttccattttcaaacaaaatttcctttgagatttttttccccctctttgggaatagggtctcgccctgttgcccaggctggagtgcagtggcgtgatctcggctcgctgcacctctgcctcctggctttcaagctgaggtgggaggattgcttgagcctaggaggtcgaggctgcagtgggctgtggtctcgccgctgcactccagcctggactacagagtgagaccctgtctcaaaaaaatttatcatggcatgacaaatgctgtgattcggtgtactgattgggtccgaaacatttgctacaaatatagaaaatgtatatactcctaagcataaat

SEQ ID NO: 276969 - DNA, 1216 bp, Homo sapiens
cgggagggctctcctcacacaagcgcttccttgccgagaggctggagctgcggcaccgcaggcctgagccaccccttctctgctgtctccttctcttcctcagggctcccgtgtctgctcgccctccgacgctgctcagaatattaaaggagacaggaagaagtccagatgaagtgactcatggaaccatttgtttatctgaacctgagctaaatcttaggagagaaggactatggaaatgatgttagacaaaaagcaaattcaagtgattttcttattcaagttcaaaatgggtcataaagcagcagagacaactcgcagcatcaacaatgcatttggcccagaaattgctaacaaaggtacagtgcagtggtggttcaagaacttttgcaaaggagacgagagccgtgaagatgaggagtgttgtgcccggccatcaaaagttggcaacgaccaattgagagcaatcatcgaagctgatcctcttacaacactagaagttgccgagaactcaacatcaaccatcctacggtcattcagcatttgaagcaaattagaaggttgtaaaagctcgataagtgggtgcctcatgagctgactgaaaataaaaacaatcgtcattttgaagtgttgtcttctcttactttgtgtaacaacaatgaaccatttcttgatcagattgtgacgtgcgttggtaagtggattttatatgacaaccgctgatgaccagcttggtgggtggactgagaagaagctccagagcacttcccaaagccaaacttctaccaaaatgttaatggtcactgttggatggtctgctgccggtctgatccactacagctttctgagttccagcaaaaccattacatctgagaagtatgctcaacaaatctctgagatgcatggaaagctgcaacgcctgcagccagcattgatcaacataaagggcccagtccttcggcacaacaatgcctgacaatgcgtcgcacaaccaacgcttcaaaagttgaatgaattgggcacaaagttttgcctcatccaccgtattcacctgacttcttgccaactgactaccacttcttcaagcatctcagcaactttttgcagggaagatgtttccacaaccagaatgcagaaaaagctttccaagagtttatcgaatcccagatcacacatttttacactacaggaataaataaacttatttctcattggc

SEQ ID NO: 276970 - DNA, 1126 bp, Homo sapiens
cgggagggctctcctcacacaagcgcttccttgccgagaggctggagctgcggcaccgcaggcctgagccaccccttctctgctgtctccttctcttcctcagggctcccgtgtctgctcgccctccgacgctgctcagactatggaaatgatgttagacaaaaagcaaattcaagtgattttcttattcaagttcaaaatgggtcataaagcagcagagacaactcgcagcatcaacaatgcatttggcccagaaattgctaacaaaggtacagtgcagtggtggttcaagaacttttgcaaaggagacgagagccgtgaagatgaggagtgttgtgcccggccatcaaaagttggcaacgaccaattgagagcaatcatcgaagctgatcctcttacaacactagaagttgccgagaactcaacatcaaccatcctacggtcattcagcatttgaagcaaattagaaggttgtaaaagctcgataagtgggtgcctcatgagctgactgaaaataaaaacaatcgtcattttgaagtgttgtcttctcttactttgtgtaacaacaatgaaccatttcttgatcagattgtgacgtgcgttggtaagtggattttatatgacaaccgctgatgaccagcttggtgggtggactgagaagaagctccagagcacttcccaaagccaaacttctaccaaaatgttaatggtcactgttggatggtctgctgccggtctgatccactacagctttctgagttccagcaaaaccattacatctgagaagtatgctcaacaaatctctgagatgcatggaaagctgcaacgcctgcagccagcattgatcaacataaagggcccagtccttcggcacaacaatgcctgacaatgcgtcgcacaaccaacgcttcaaaagttgaatgaattgggcacaaagttttgcctcatccaccgtattcacctgacttcttgccaactgactaccacttcttcaagcatctcagcaactttttgcagggaagatgtttccacaaccagaatgcagaaaaagctttccaagagtttatcgaatcccagatcacacatttttacactacaggaataaataaacttatttctcattggc

SEQ ID NO: 276971 - DNA, 613 bp, Homo sapiens
gtgttcttgcagctggaatgataaaggaatctcttttctctcttcttagaatattaaaggagacaggaagaagtccagatgaagtgactcatggaaccatttgtttatctgaacctgagctaaatcttaggagagaagggtaaaaataattcattcttattatttttagtccagattaccaggatttttcagatagtgatgtaggtatgggttctggcagtaataaacggcaattttacccagaatggcatctgttaaatatcttcctctggcacttgaagtggtatttggtatctgtttgatagttcaggggttgttctaaaacattgatcctgtgtgcagaaagtaaccattaatctcatgttactactgcttgactcaattttctttatttttattttcttggacttttcttttttaaaaaataagaagagtagcatatttgtaccatctgcaaagcacttttataatggattggaatgtgaaaatctctaatccagaaggaagattcttatatagtctttatagataaatgcaatgtacctttctttaattactgggtgaggtaatatgttgtgaaagaaaatagtgaacttggattcaaaaaaaccta

SEQ ID NO: 276972 - DNA, 291 bp, Homo sapiens
agtaagggtggggattggcacaggggtacccgctgcatctcaggctgcaggacaaacccaagacctcactttgtttccaaattctcacacatggctcctgcctccttcctttccctgaggagaggtttccagatgtccaggacaatgcatgtccccaggaagctctggtaagcccagcctgggcaacataacaagaccccttttttcaaaaagatttttttttttaagatttttgtttttaattagctgggtgtggtggagtgcacctgtaatcccagctacttgggagac

SEQ ID NO: 276973 - DNA, 1319 bp, Homo sapiens
atttttatattatttatttattctttgttagtttttggagtgtgggttttgttttgttttttgaattttttattttgttctactcggttttattcttattgctcaggcttgagtgcactggcctcttctcagctcaacctccgcctcttgggttcgggtaatgatggttccacgtcagcggccctccgcctcttgggtttgcgtgacggttccacgtcaccgaccctccgcctcttgggttcgggtgatgatggttccacgtcagcggccctccgcctcttgggtttgcgtgacggttccacatcaccgaccctccgcctcttgcgttcgggtgatgatggttccacgtcagcggccctccgcctcttgggtttgcgtgacggttccacgtcaccgaccctccgcctcttgggttcgggaggtggttccatctcagccgccctctgcctcttgggtttgcgtggtttttctgcctcagcctcctgagtagctaagggaggtgtcttgagattatcatcggctgagggtggaagcggcccccgcagacgctcggcaggtgtcttgatattatcatctgctgagggtggagctgagggtggaaggggagtgagctgacgctcggaaggtgtcttgagattatcatccgctgagggtggaagcggcccccgcagacgctcggcaggtgtcttgatattatcatctgctgagggtggagctgagggtggaaggggagtgagctgacgctcggaaggtgtcttgagattatcatccgctgagggtggaagcggcccccgcagaagctccgcagacgctcagcaggtatcttgatattatcatctgctgagggtggagctgagggtggaaggggagtgagctgacgctcggaaggtgtcttgagatcatccgctgagggtggaaggcaggtgtcttgatattatcatctgctgagggtggagctgaggggtggaaggggagtgagctgacgctcggaaggtgtcttgagattatcatccgctgagggtggaagcggcccccgcagacgctcggcaggtgtcttgaatattatcatctgctgagggtggaagggcagtgagctgacgctcggaaggtgtcttgagattatcatccgctgagggtggaagcggcccccgcagacgctcggcaggtgtcttgatattatcatctgctgagggtggagctgagggtggaaggggagtgagctgacgctcggaaggtgtcttgagattatcatccgctgagggtggaagcggccccccagacgctcggcaggtgtcttgatattatcatctgctgagggt

SEQ ID NO: 276974 - DNA, 1444 bp, Homo sapiens
atttttatattatttatttattctttgttagtttttggagtgtgggttttgttttgttttttgaattttttattttgttctactcggttttattcttattgctcaggcttgagtgcactggcctcttctcagctcaacctccgcctcttgggttcgggtaatgatggttccacgtcagcggccctccgcctcttgggtttgcgtgacggttccacgtcaccgaccctccgcctcttgggttcgggtgatgatggttccacgtcagcggccctccgcctcttgggtttgcgtgacggttccacatcaccgaccctccgcctcttgcgttcgggtgatgatggttccacgtcagcggccctccgcctcttgggtttgcgtgacggttccacgtcaccgaccctccgcctcttgggttcgggaggtggttccatctcagccgccctctgcctcttgggtttgcgtggtttttctgcctcagcctcctgagtagctaagggaggtgtcttgagattatcatcggctgagggtggaagcggcccccgcagacgctcggcaggtgtcttgatattatcatctgctgagggtggagctgagggtggaaggggagtgagctgacgctcggaaggtgtcttgagattatcatccgctgagggtggaagcggcccccgcagacgctcggcaggtgtcttgatattatcatctgctgagggtggagctgagggtggaaggggagtgagctgacgctcggaaggtgtcttgagattatcatccgctgagggtggaagcggcccccgcagaagctccgcagacgctcagcaggtatcttgatattatcatctgctgagggtggagctgagggtggaaggggagtgagctgacgctcggaaggtgtcttgagatcatccgctgagggtggaaggcaggtgtcttgatattatcatctgctgagggtggagctgagggtggaaggggagtgagctgacgctcggaaggtgtcttgagattatcatccgctgagggtggaagcggcccccgcagacgctcggcaggtgtcttgatattatcatctgctgagggtggagctgagggtggaaggggagtgagctgacgctcggaaggtgtcttgagattatcatccgctgagggtggaagcggcccccgcagacgctcggcaggtgtcttgaatattatcatctgctgagggtggaagggcagtgagctgacgctcggaaggtgtcttgagattatcatccgctgagggtggaagcggcccccgcagacgctcggcaggtgtcttgatattatcatctgctgagggtggagctgagggtggaaggggagtgagctgacgctcggaaggtgtcttgagattatcatccgctgagggtggaagcggccccccagacgctcggcaggtgtcttgatattatcatctgctgagggt

SEQ ID NO: 276975 - DNA, 1160 bp, Homo sapiens
atttttatattatttatttattctttgttagtttttggagtgtgggttttgttttgttttttgaattttttattttgttctactcggttttattcttattgctcaggcttgagtgcactggcctcttctcagctcaacctccgcctcttgggttcgggtaatgatggttccacgtcagcggccctccgcctcttgggtttgcgtgacggttccacgtcaccgaccctccgcctcttgggttcgggtgatgatggttccacgtcagcggccctccgcctcttgggtttgcgtgacggttccacatcaccgaccctccgcctcttgcgttcgggtgatgatggttccacgtcagcggccctccgcctcttgggtttgcgtgacggttccacgtcaccgaccctccgcctcttgggttcgggaggtggttccatctcagccgccctctgcctcttgggtttgcgtggtttttctgcctcagcctcctgagtagctaagggaggtgtcttgagattatcatcggctgaggggtggaagcggcccccgcagaagctccccgcagacgctcggcaggtgtcttgatattatcatctgctgagggtggagctgagggtggaaggggagtgagctgacgctcggaaggtgtcttgatattatcatctgctgagggtggagctgagggtggaaggggagtgagctgacgctcggaaggtgtcttgagattatcatccgctgagggtggaagcggcccccgcagacgctcggcaggtgtcttgatattatcatctgctgagggtggagctgagggtggaaggggagtgagctgacgctcggaaggtgtcttgagattatcatccgctgagggtggaagcggcccccgcagacgctcggcaggtgtcttgaatattatcatctgctgagggtggaagggcagtgagctgacgctcggaaggtgtcttgagattatcatccgctgagggtggaagcggcccccgcagacgctcggcaggtgtcttgatattatcatctgctgagggtggagctgagggtggaaggggagtgagctgacgctcggaaggtgtcttgagattatcatccgctgagggtggaagcggccccccagacgctcggcaggtgtcttgatattatcatctgctgagggt

SEQ ID NO: 276976 - DNA, 234 bp, Homo sapiens
agggtggaagcggcccccgcagaagctccccgcagacgctcggcaggtgtcttgatattatcatctgctgagggtggagctgagggtggaaggggagtgagctgacgctcggaaggtgtcttgagattatcatccgctgagggtggaagcggcccccgcagacgctcggcaggtgtcttgatattatcatctgctgagggtggagctgagggtggaaggggagtgagctgacgc

SEQ ID NO: 276977 - DNA, 278 bp, Homo sapiens
gggtggagctgagggtggaaggggagtgagctgacgctcggaaggtgtcttgagattatcatccgctgagggtggaagcggcccccgcagaagctccccgcagacgctcggcaggtgtcttgatattatcatctgctgagggtggagctgagggtggaaggggagtgagctgacgctcggaaggtgtcttgagattatcatccgctgagggtggaagcggcccccgcagacgctcggcaggtgtcttgatattatcatctgctgagggtggagctgag

SEQ ID NO: 276978 - DNA, 574 bp, Homo sapiens
gggttttcccttggtggctgatgcgggtagcagctccgtggagttctgcatgatcagtctgcaggactgcagtgccaccccaccggagacctcggccgtcttgtaattctggtgaactgtgatcttgctaatggattttaactgtatttaattaaatgtgatttttaggaagtgaaattgcagatgatctaagtatcttatattcaaatagagcagcatgttacctaaaagaaggaaactgcagtggctgcattcaagattgtaacaggtaaactgcacgttttcaggtttgtcaagagattgttataatttcattatggtgaatgcaatatccaagatcctaaattttctgcctaaggatctaatttcttaagagctttatggtatgttaattgattgatgcataaaaatcataaattatcttacgtatatgaagagagttatagaagattgtgcaaacttttttcatttccactgctaccgccctaattcgtgctcttttcatatcactcctagactactggagaagcctgataactaattccaatccactgcgcatcagcctgtttcctga

SEQ ID NO: 276979 - DNA, 543 bp, Homo sapiens
agaaatgctacactgatgtggggaattttccagacggtcattttctacctcaggaagaatgttaacagtagcaaagcgggtgtgataatcactggaaccatgactacaagaagttttcatgctttctaggtcagaacaactaaattcagaaaaatgactagagtgagaatctgctacagaaggcatactgtcactgagggatggagcctcaaattcacttgagttcgtgctttgttgttctaacaactgtgcatccatgtcctctctcgtctcatttatcttcatgttaccctttttcctcagtttaccactttttgattttttccctgctgttgcttctttggaccacttggtggcactagatttaccttcaggcaagccactggatgaaccgccagcatgacttcgggtggcactgccatcatccacactactgcttccactgttgtgcctgaatttggatggctttgactcaatatctacttgcacctccatactgttgccttctctgaaatataagagtaacaaatacaaacataattg

SEQ ID NO: 276980 - DNA, 4216 bp, Homo sapiens
gtgcggcggccgcgacttccccgacgcggggcgctgagaagcagtgagtgcctgtgtgtacctgccggccgggaatataggacttgtcgcatctcagcccttccctcccggagcgggggcgagaggtcgaggcggggaggcgaaggggcggtgggccgcgagggagaaggagcgatggggtggacgtccttcaaggccggggaacacgcggggctttccaggccgcgggggacggtggcgggtgtcggggcgcggtggcaacgctggagttcccgggtccaccggcgcggtcagccctggtgacccaagccaggggctggggagcaatctgagaccattgcggctgggctgtggggctccccagtcccggcaggtcctggcgccgctgtacatagaaaccgttgccacggcgggaggatgccgtttcttttcggtctccgactgcagggggcggtcggccctgtggatgcaggaaagagggtgcctcggtgggagagacccagcttttcgcgttagtaggcccgagcagtttgaactggagctatgaccaccaaagattatccatcattgtggggctttggaacaacaaaaacattcaaaattcccattgaacatctagatttcaaatacattgaaaaatgttcagatgttaaacatctggaaaaaattctttgcgtgctcagatctggtgaggaaggatattatcctgaacttacagaattttgtgaaaagcatcttcaagccttggcccctgaaagcagagctttgaggaaagataaaccagcagcaacagcagccagttttacagctgaagaatgggaaaaaattgatggtgatataaagagttgggtatcagaaattaaaaaagaagaagataaaatgcactttcatgaaactgagacatttccagcaatgaaagataatttgcctccagttcgtggttcaaacagctgtcttcatgtaggcaaggaaaaatattctaaaagaccaactaaaaagaaaactccaagggattacgcggaatgggataaatttgacgtggagaaggaatgtttaaaaattgatgaagattacaaagaaaagacggtaatagacaagtcacgcttgtctaaaattgagacaagaatagatacagcaggtctaactgagaaagaaaaggattttcttgccactcgtgaaaaggagaaaggaaatgaagctttcaactcaggggattatgaagaagcagtgatgtattataccaggagcatatcagcgcttcccactgtagttgcctataacaatcgagctcaagcagaaatcaaattacagaactggaatagtgcttttcaggattgtgaaaaggtcttggagttagaacctggaaacgtaaaggctcttctgcgtcgtgctactacatataaacatcaaaacaagctccgggaagctacagaagatttgagtaaagtactagatgttgagcctgataatgatttggccaagaaaaccttgtcagaggttgaaagagatctgaaaaattctgaagctgcatctgagactcaaaccaaagggaaaaggatggttattcaggaaatagaaaactccgaagatgaagaaggaaaaagcggaagaaaacatgaagatggcggtggagataagaagcccgcggagccggcgggagccgcgcgcgccgcccagccgtgcgtcatgggcaacatccagaagaagctgactggcaaagccgaaggcggcaagcggccggcaaggggcgcgccgcagcggggccagaccccggaggccggcgcggacaagcggagcccacggcgggcctctgcggcggcggcggcgggcggcggcgccaccgggcatccgggcggcgggcagggcgcggagaaccctgccggcctgaagagccagggcaacgagctgttccgaagcgggcagttcgccgaggcggccggcaagtactcggcggcaatcgcgctcctggagccagcaggaagtgaaattgcagatgatctaagtatcttatattcaaatagagcagcatgttacctaaaagaaggaaactgcagtggctgcattcaagattgtaacagggctctggaacttcatccattctctatgaaacctcttctgaggcgggcgatggcctatgaaactctagagcagtatgggaaagcttatgtggattataaaacagtgttgcagatagactgtggactccagctagcaaatgacagtgttaacaggctatcaagaattttaatggagctggatggaccaaattggcgggagaagctgtcacctattcctgctgtgcctgcttctgtgccactgcaagcttggcatccggcaaaagagatgatctcaaaacaagcaggagactccagcagccatcgccagcagggcatcacagatgaaaaaacatttaaagcccttaaggaagaaggaaatcaatgtgtaaatgacaaaaactataaagacgccctcagtaaatacagcgaatgcttaaagattaacaatacggaatgtgccatatatacaaacagagctctctgttacttgaagctgtgccagtttgaagaagcaaagcaggactgtgatcaggcacttcagctagctgatgggaacgtgaaagccttctatagacgagctctggctcataaaggactcaagaattatcagaaaagcttaattgatctcaataaagttatcctactagatccaagtattattgaggcaaagatggaactggaagaggtaactagactccttaatcttaaggataagacagcaccattcaacaaagaaaaggagagaaggaaaattgagattcaagaggtgaatgaaggcaaggaggagcctggaagacctgcaggggaggtctccacgggatgccttgcttctgagaagggaggcaaaagcagcaggtcaccagaagaccctgagaaacttccgatagccaagcctaataatgcctatgaatttggtcagattataaatgctctcagtaccaggaaggataaagaagcctgtgcacatcttttagccatcactgcaccaaaagatttgccgatgtttttaagtaacaaacttgaaggggatacattccttctcctcattcagtctctgaaaaataatcttattgaaaaagatccctcattggtgtatcagcatcttttatacctgagtaaagcagaaaggtttaagatgatgttgacactaattagcaagggccaaaaggagctaattgaacagctgtttgaggacctttcagacacaccaaacaaccattttactttagaagatatacaggccctaaaaaggcagtatgagctttaaatcaagataattgttagatttcttccatgcatgtatgtgttccaggaatgttaatgagatggtattgtaaaagagttgcatggataaaacttggcctagaaaagtttggtctgcactataaaacattttacttattttcctacatagaacatgtatattctacaatctgctttttattagttgtaaatattttcttatgtaccagaaccaaataagtatatttagaacttgttaaaaatacattttaatttatgatatacatattattttaattacttgttaaaattttgagttaagttgcatttctttgggctatgaaggagtcctcttaagtttgatagaaatgaatttcttgtaacattcttttttaaaagtggaagtcattaacagtgattattatatcacttatatcctgctaagatacacataaatcccattttgtactagtacctgtggattacagtcagttaaaatgaaatgcaacactgaagtctataacatgaaatgattattaaattgtttattaatttagagctataagaggaacttattttttctaatacggaagcattgcctaataattaagaacaaaaattgccaaaaatttctaccactttttactagattttaaaaagctactttcttttatattgcctatataagcaaaaaaccaaccactgtattaaagcaaactaagcctgcatttatatctgaattattacctccatattttaccaaacatttgaatgtcccccttcccccttttttgttttctgcttttatgactgtatttattcctttactgtaaaagaatatgaagaactcatacatgttgaaagctcctttgttgactgggtcaaagtgaaggaatttcaatctccaaaaatgtact

SEQ ID NO: 276981 - DNA, 3718 bp, Homo sapiens
gtgcggcggccgcgacttccccgacgcggggcgctgagaagcactatgaccaccaaagattatccatcattgtggggctttggaacaacaaaaacattcaaaattcccattgaacatctagatttcaaatacattgaaaaatgttcagatgttaaacatctggaaaaaattctttgcgtgctcagatctggtgaggaaggatattatcctgaacttacagaattttgtgaaaagcatcttcaagccttggcccctgaaagcagagctttgaggaaagataaaccagcagcaacagcagccagttttacagctgaagaatgggaaaaaattgatggtgatataaagagttgggtatcagaaattaaaaaagaagaagataaaatgcactttcatgaaactgagacatttccagcaatgaaagataatttgcctccagttcgtggttcaaacagctgtcttcatgtaggcaaggaaaaatattctaaaagaccaactaaaaagaaaactccaagggattacgcggaatgggataaatttgacgtggagaaggaatgtttaaaaattgatgaagattacaaagaaaagacggtaatagacaagtcacgcttgtctaaaattgagacaagaatagatacagcaggtctaactgagaaagaaaaggattttcttgccactcgtgaaaaggagaaaggaaatgaagctttcaactcaggggattatgaagaagcagtgatgtattataccaggagcatatcagcgcttcccactgtagttgcctataacaatcgagctcaagcagaaatcaaattacagaactggaatagtgcttttcaggattgtgaaaaggtcttggagttagaacctggaaacgtaaaggctcttctgcgtcgtgctactacatataaacatcaaaacaagctccgggaagctacagaagatttgagtaaagtactagatgttgagcctgataatgatttggccaagaaaaccttgtcagaggttgaaagagatctgaaaaattctgaagctgcatctgagactcaaaccaaagggaaaaggatggttattcaggaaatagaaaactccgaagatgaagaaggaaaaagcggaagaaaacatgaagatggcggtggagataagaagcccgcggagccggcgggagccgcgcgcgccgcccagccgtgcgtcatgggcaacatccagaagaagctgactggcaaagccgaaggcggcaagcggccggcaaggggcgcgccgcagcggggccagaccccggaggccggcgcggacaagcggagcccacggcgggcctctgcggcggcggcggcgggcggcggcgccaccgggcatccgggcggcgggcagggcgcggagaaccctgccggcctgaagagccagggcaacgagctgttccgaagcgggcagttcgccgaggcggccggcaagtactcggcggcaatcgcgctcctggagccagcaggaagtgaaattgcagatgatctaagtatcttatattcaaatagagcagcatgttacctaaaagaaggaaactgcagtggctgcattcaagattgtaacagggctctggaacttcatccattctctatgaaacctcttctgaggcgggcgatggcctatgaaactctagagcagtatgggaaagcttatgtggattataaaacagtgttgcagatagactgtggactccagctagcaaatgacagtgttaacaggctatcaagaattttaatggagctggatggaccaaattggcgggagaagctgtcacctattcctgctgtgcctgcttctgtgccactgcaagcttggcatccggcaaaagagatgatctcaaaacaagcaggagactccagcagccatcgccagcagggcatcacagatgaaaaaacatttaaagcccttaaggaagaaggaaatcaatgtgtaaatgacaaaaactataaagacgccctcagtaaatacagcgaatgcttaaagattaacaatacggaatgtgccatatatacaaacagagctctctgttacttgaagctgtgccagtttgaagaagcaaagcaggactgtgatcaggcacttcagctagctgatgggaacgtgaaagccttctatagacgagctctggctcataaaggactcaagaattatcagaaaagcttaattgatctcaataaagttatcctactagatccaagtattattgaggcaaagatggaactggaagaggtaactagactccttaatcttaaggataagacagcaccattcaacaaagaaaaggagagaaggaaaattgagattcaagaggtgaatgaaggcaaggaggagcctggaagacctgcaggggaggtctccacgggatgccttgcttctgagaagggaggcaaaagcagcaggtcaccagaagaccctgagaaacttccgatagccaagcctaataatgcctatgaatttggtcagattataaatgctctcagtaccaggaaggataaagaagcctgtgcacatcttttagccatcactgcaccaaaagatttgccgatgtttttaagtaacaaacttgaaggggatacattccttctcctcattcagtctctgaaaaataatcttattgaaaaagatccctcattggtgtatcagcatcttttatacctgagtaaagcagaaaggtttaagatgatgttgacactaattagcaagggccaaaaggagctaattgaacagctgtttgaggacctttcagacacaccaaacaaccattttactttagaagatatacaggccctaaaaaggcagtatgagctttaaatcaagataattgttagatttcttccatgcatgtatgtgttccaggaatgttaatgagatggtattgtaaaagagttgcatggataaaacttggcctagaaaagtttggtctgcactataaaacattttacttattttcctacatagaacatgtatattctacaatctgctttttattagttgtaaatattttcttatgtaccagaaccaaataagtatatttagaacttgttaaaaatacattttaatttatgatatacatattattttaattacttgttaaaattttgagttaagttgcatttctttgggctatgaaggagtcctcttaagtttgatagaaatgaatttcttgtaacattcttttttaaaagtggaagtcattaacagtgattattatatcacttatatcctgctaagatacacataaatcccattttgtactagtacctgtggattacagtcagttaaaatgaaatgcaacactgaagtctataacatgaaatgattattaaattgtttattaatttagagctataagaggaacttattttttctaatacggaagcattgcctaataattaagaacaaaaattgccaaaaatttctaccactttttactagattttaaaaagctactttcttttatattgcctatataagcaaaaaaccaaccactgtattaaagcaaactaagcctgcatttatatctgaattattacctccatattttaccaaacatttgaatgtcccccttcccccttttttgttttctgcttttatgactgtatttattcctttactgtaaaagaatatgaagaactcatacatgttgaaagctcctttgttgactgggtcaaagtgaaggaatttcaatctccaaaaatgtact

SEQ ID NO: 276982 - DNA, 3546 bp, Homo sapiens
gtgcggcggccgcgacttccccgacgcggggcgctgagaagcactatgaccaccaaagattatccatcattgtggggctttggaacaacaaaaacattcaaaattcccattgaacatctagatttcaaatacattgaaaaatgttcagatgttaaacatctggaaaaaattctttgcgtgctcagatctggtgaggaaggatattatcctgaacttacagaattttgtgaaaagcatcttcaagccttggcccctgaaagcagagctttgaggaaagataaaccagcagcaacagcagccagttttacagctgaagaatgggaaaaaattgatggtgatataaagagttgggtatcagaaattaaaaaagaagaagataaaatgcactttcatgaaactgagacatttccagcaatgaaagataatttgcctccagttcgtggttcaaacagctgtcttcatgtaggcaaggaaaaatattctaaaagaccaactaaaaagaaaactccaagggattacgcggaatgggataaatttgacgtggagaaggaatgtttaaaaattgatgaagattacaaagaaaagacggtaatagacaagtcacgcttgtctaaaattgagacaagaatagatacagcaggtctaactgagaaagaaaaggattttcttgccactcgtgaaaaggagaaaggaaatgaagctttcaactcaggggattatgaagaagcagtgatgtattataccaggagcatatcagcgcttcccactgtagttgcctataacaatcgagctcaagcagaaatcaaattacagaactggaatagtgcttttcaggattgtgaaaaggtcttggagttagaacctggaaacgtaaaggctcttctgcgtcgtgctactacatataaacatcaaaacaagctccgggaagctacagaagatttgagtaaagtactagatgttgagcctgataatgatttggccaagaaaaccttgtcagaggttgaaagagatctgaaaaattctgaagctgcatctgagactcaaaccaaagggaaaaggatggttattcaggaaatagaaaactccgaagatgaagaaggaaaaagcggaagaaaacatgaagatggcggtggagataagatgcggcggcggcggcgggcggcggcgccaccgggcatccgggcggcgggcagggcgcggagaaccctgccggcctgaagagccagggcaacgagctgttccgaagcgggcagttcgccgaggcggccggcaagtactcggcggcaatcgcgctcctggagccagcaggaagtgaaattgcagatgatctaagtatcttatattcaaatagagcagcatgttacctaaaagaaggaaactgcagtggctgcattcaagattgtaacagggctctggaacttcatccattctctatgaaacctcttctgaggcgggcgatggcctatgaaactctagagcagtatgggaaagcttatgtggattataaaacagtgttgcagatagactgtggactccagctagcaaatgacagtgttaacaggctatcaagaattttaatggagctggatggaccaaattggcgggagaagctgtcacctattcctgctgtgcctgcttctgtgccactgcaagcttggcatccggcaaaagagatgatctcaaaacaagcaggagactccagcagccatcgccagcagggcatcacagatgaaaaaacatttaaagcccttaaggaagaaggaaatcaatgtgtaaatgacaaaaactataaagacgccctcagtaaatacagcgaatgcttaaagattaacaatacggaatgtgccatatatacaaacagagctctctgttacttgaagctgtgccagtttgaagaagcaaagcaggactgtgatcaggcacttcagctagctgatgggaacgtgaaagccttctatagacgagctctggctcataaaggactcaagaattatcagaaaagcttaattgatctcaataaagttatcctactagatccaagtattattgaggcaaagatggaactggaagaggtaactagactccttaatcttaaggataagacagcaccattcaacaaagaaaaggagagaaggaaaattgagattcaagaggtgaatgaaggcaaggaggagcctggaagacctgcaggggaggtctccacgggatgccttgcttctgagaagggaggcaaaagcagcaggtcaccagaagaccctgagaaacttccgatagccaagcctaataatgcctatgaatttggtcagattataaatgctctcagtaccaggaaggataaagaagcctgtgcacatcttttagccatcactgcaccaaaagatttgccgatgtttttaagtaacaaacttgaaggggatacattccttctcctcattcagtctctgaaaaataatcttattgaaaaagatccctcattggtgtatcagcatcttttatacctgagtaaagcagaaaggtttaagatgatgttgacactaattagcaagggccaaaaggagctaattgaacagctgtttgaggacctttcagacacaccaaacaaccattttactttagaagatatacaggccctaaaaaggcagtatgagctttaaatcaagataattgttagatttcttccatgcatgtatgtgttccaggaatgttaatgagatggtattgtaaaagagttgcatggataaaacttggcctagaaaagtttggtctgcactataaaacattttacttattttcctacatagaacatgtatattctacaatctgctttttattagttgtaaatattttcttatgtaccagaaccaaataagtatatttagaacttgttaaaaatacattttaatttatgatatacatattattttaattacttgttaaaattttgagttaagttgcatttctttgggctatgaaggagtcctcttaagtttgatagaaatgaatttcttgtaacattcttttttaaaagtggaagtcattaacagtgattattatatcacttatatcctgctaagatacacataaatcccattttgtactagtacctgtggattacagtcagttaaaatgaaatgcaacactgaagtctataacatgaaatgattattaaattgtttattaatttagagctataagaggaacttattttttctaatacggaagcattgcctaataattaagaacaaaaattgccaaaaatttctaccactttttactagattttaaaaagctactttcttttatattgcctatataagcaaaaaaccaaccactgtattaaagcaaactaagcctgcatttatatctgaattattacctccatattttaccaaacatttgaatgtcccccttcccccttttttgttttctgcttttatgactgtatttattcctttactgtaaaagaatatgaagaactcatacatgttgaaagctcctttgttgactgggtcaaagtgaaggaatttcaatctccaaaaatgtact

SEQ ID NO: 276983 - DNA, 3465 bp, Homo sapiens
gtgcggcggccgcgacttccccgacgcggggcgctgagaagcactatgaccaccaaagattatccatcattgtggggctttggaacaacaaaaacattcaaaattcccattgaacatctagatttcaaatacattgaaaaatgttcagatgttaaacatctggaaaaaattctttgcgtgctcagatctggtgaggaaggatattatcctgaacttacagaattttgtgaaaagcatcttcaagccttggcccctgaaagcagagctttgaggaaagataaaccagcagcaacagcagccagttttacagctgaagaatgggaaaaaattgatggtgatataaagagttgggtatcagaaattaaaaaagaagaagataaaatgcactttcatgaaactgagacatttccagcaatgaaagataatttgcctccagttcgtggttcaaacagctgtcttcatgtaggcaaggaaaaatattctaaaagaccaactaaaaagaaaactccaagggattacgcggaatgggataaatttgacgtggagaaggaatgtttaaaaattgatgaagattacaaagaaaagacggtaatagacaagtcacgcttgtctaaaattgagacaagaatagatacagcaggtctaactgagaaagaaaaggattttcttgccactcgtgaaaaggagaaaggaaatgaagctttcaactcaggggattatgaagaagcagtgatgtattataccaggagcatatcagcgcttcccactgtagttgcctataacaatcgagctcaagcagaaatcaaattacagaactggaatagtgcttttcaggattgtgaaaaggtcttggagttagaacctggaaacgtaaaggctcttctgcgtcgtgctactacatataaacatcaaaacaagctccgggaagctacagaagatttgagtaaagtactagatgttgagcctgataatgatttggccaagaaaaccttgtcagaggttgaaagagatctgaaaaattctgaagctgcatctgagactcaaaccaaagggaaaaggatggttattcaggaaatagaaaactccgaagatgaagaaggaaaaagcggaagaaaacatgaagatggcggtggagataagaagcccgcggagccggcgggagccgcgcgcgccgcccagccgtgcgtcatgggcaacatccagaagaagctgactggcaaagccgaaggcggcaagcggccggcaaggggcgcgccgcagcggggccagaccccggaggccggcgcggacaagcggagcccacggcgggcctctgcggcggcggcggcgggcggcggcgccaccgggcatccgggcggcgggcagggcgcggagaaccctgccggcctgaagagccagggcaacgagctgttccgaagcgggcagttcgccgaggcggccggcaagtactcggcggcaatcgcgctcctggagccagcaggctatcaagaattttaatggagctggatggaccaaattggcgggagaagctgtcacctattcctgctgtgcctgcttctgtgccactgcaagcttggcatccggcaaaagagatgatctcaaaacaagcaggagactccagcagccatcgccagcagggcatcacagatgaaaaaacatttaaagcccttaaggaagaaggaaatcaatgtgtaaatgacaaaaactataaagacgccctcagtaaatacagcgaatgcttaaagattaacaatacggaatgtgccatatatacaaacagagctctctgttacttgaagctgtgccagtttgaagaagcaaagcaggactgtgatcaggcacttcagctagctgatgggaacgtgaaagccttctatagacgagctctggctcataaaggactcaagaattatcagaaaagcttaattgatctcaataaagttatcctactagatccaagtattattgaggcaaagatggaactggaagaggtaactagactccttaatcttaaggataagacagcaccattcaacaaagaaaaggagagaaggaaaattgagattcaagaggtgaatgaaggcaaggaggagcctggaagacctgcaggggaggtctccacgggatgccttgcttctgagaagggaggcaaaagcagcaggtcaccagaagaccctgagaaacttccgatagccaagcctaataatgcctatgaatttggtcagattataaatgctctcagtaccaggaaggataaagaagcctgtgcacatcttttagccatcactgcaccaaaagatttgccgatgtttttaagtaacaaacttgaaggggatacattccttctcctcattcagtctctgaaaaataatcttattgaaaaagatccctcattggtgtatcagcatcttttatacctgagtaaagcagaaaggtttaagatgatgttgacactaattagcaagggccaaaaggagctaattgaacagctgtttgaggacctttcagacacaccaaacaaccattttactttagaagatatacaggccctaaaaaggcagtatgagctttaaatcaagataattgttagatttcttccatgcatgtatgtgttccaggaatgttaatgagatggtattgtaaaagagttgcatggataaaacttggcctagaaaagtttggtctgcactataaaacattttacttattttcctacatagaacatgtatattctacaatctgctttttattagttgtaaatattttcttatgtaccagaaccaaataagtatatttagaacttgttaaaaatacattttaatttatgatatacatattattttaattacttgttaaaattttgagttaagttgcatttctttgggctatgaaggagtcctcttaagtttgatagaaatgaatttcttgtaacattcttttttaaaagtggaagtcattaacagtgattattatatcacttatatcctgctaagatacacataaatcccattttgtactagtacctgtggattacagtcagttaaaatgaaatgcaacactgaagtctataacatgaaatgattattaaattgtttattaatttagagctataagaggaacttattttttctaatacggaagcattgcctaataattaagaacaaaaattgccaaaaatttctaccactttttactagattttaaaaagctactttcttttatattgcctatataagcaaaaaaccaaccactgtattaaagcaaactaagcctgcatttatatctgaattattacctccatattttaccaaacatttgaatgtcccccttcccccttttttgttttctgcttttatgactgtatttattcctttactgtaaaagaatatgaagaactcatacatgttgaaagctcctttgttgactgggtcaaagtgaaggaatttcaatctccaaaaatgtact

SEQ ID NO: 276984 - DNA, 2541 bp, Homo sapiens
atgcaacttttatggttctgtactttattattaaatacataggtgcaaataagaattttcattttaatctgtcaacgacaatctgttgaaaccctgctgtgtgccttgtgccatgctgctctgttaggggactggggaggccaggacatgctgccagggagctcccggctcagtgggaaagagtaaatgcagagtgctttgctactggtttaaaagaaaggaacacaaatatgattgctttcttactctgggtttgcctttctggcatgttgcctggttcccaagacgaagtctcggatgtgtacatatttgagagttcagtactgcagtatctattcagtgaagtataaacgaaagagcatttttcaaaacaaatggtatgtaatatttttgtcttctttagggctctggaacttcatccattctctatgaaacctcttctgaggcgggcgatggcctatgaaactctagagcagtatgggaaagcttatgtggattataaaacagtgttgcagatagactgtggactccagctagcaaatgacagtgttaacaggctatcaagaattttaatggagctggatggaccaaattggcgggagaagctgtcacctattcctgctgtgcctgcttctgtgccactgcaagcttggcatccggcaaaagagatgatctcaaaacaagcaggagactccagcagccatcgccagcagggcatcacagatgaaaaaacatttaaagcccttaaggaagaaggaaatcaatgtgtaaatgacaaaaactataaagacgccctcagtaaatacagcgaatgcttaaagattaacaatacggaatgtgccatatatacaaacagagctctctgttacttgaagctgtgccagtttgaagaagcaaagcaggactgtgatcaggcacttcagctagctgatgggaacgtgaaagccttctatagacgagctctggctcataaaggactcaagaattatcagaaaagcttaattgatctcaataaagttatcctactagatccaagtattattgaggcaaagatggaactggaagaggtaactagactccttaatcttaaggataagacagcaccattcaacaaagaaaaggagagaaggaaaattgagattcaagaggtgaatgaaggcaaggaggagcctggaagacctgcaggggaggtctccacgggatgccttgcttctgagaagggaggcaaaagcagcaggtcaccagaagaccctgagaaacttccgatagccaagcctaataatgcctatgaatttggtcagattataaatgctctcagtaccaggaaggataaagaagcctgtgcacatcttttagccatcactgcaccaaaagatttgccgatgtttttaagtaacaaacttgaaggggatacattccttctcctcattcagtctctgaaaaataatcttattgaaaaagatccctcattggtgtatcagcatcttttatacctgagtaaagcagaaaggtttaagatgatgttgacactaattagcaagggccaaaaggagctaattgaacagctgtttgaggacctttcagacacaccaaacaaccattttactttagaagatatacaggccctaaaaaggcagtatgagctttaaatcaagataattgttagatttcttccatgcatgtatgtgttccaggaatgttaatgagatggtattgtaaaagagttgcatggataaaacttggcctagaaaagtttggtctgcactataaaacattttacttattttcctacatagaacatgtatattctacaatctgctttttattagttgtaaatattttcttatgtaccagaaccaaataagtatatttagaacttgttaaaaatacattttaatttatgatatacatattattttaattacttgttaaaattttgagttaagttgcatttctttgggctatgaaggagtcctcttaagtttgatagaaatgaatttcttgtaacattcttttttaaaagtggaagtcattaacagtgattattatatcacttatatcctgctaagatacacataaatcccattttgtactagtacctgtggattacagtcagttaaaatgaaatgcaacactgaagtctataacatgaaatgattattaaattgtttattaatttagagctataagaggaacttattttttctaatacggaagcattgcctaataattaagaacaaaaattgccaaaaatttctaccactttttactagattttaaaaagctactttcttttatattgcctatataagcaaaaaaccaaccactgtattaaagcaaactaagcctgcatttatatctgaattattacctccatattttaccaaacatttgaatgtcccccttcccccttttttgttttctgcttttatgactgtatttattcctttactgtaaaagaatatgaagaactcatacatgttgaaagctcctttgttgactgggtcaaagtgaaggaatttcaatctccaaaaatgtact

SEQ ID NO: 276985 - DNA, 2762 bp, Homo sapiens
gtgcggcggccgcgacttccccgacgcggggcgctgagaagcactatgaccaccaaagattatccatcattgtggggctttggaacaacaaaaacattcaaaattcccattgaacatctagatttcaaatacattgaaaaatgttcagatgttaaacatctggaaaaaattctttgcgtgctcagatctggtgaggaaggatattatcctgaacttacagaattttgtgaaaagcatcttcaagccttggcccctgaaagcagagctttgaggaaagataaaccagcagcaacagcagccagttttacagctgaagaatgggaaaaaattgatggtgatataaagagttgggtatcagaaattaaaaaagaagaagataaaatgcactttcatgaaactgagacatttccagcaatgaaagataatttgcctccagttcgtggttcaaacagctgtcttcatgtaggcaaggaaaaatattctaaaagaccaactaaaaagaaaactccaagggattacgcggaatgggataaatttgacgtggagaaggaatgtttaaaaattgatgaagattacaaagaaaagacggtaatagacaagtcacgcttgtctaaaattgagacaagaatagatacagcaggtctaactgagaaagaaaaggattttcttgccactcgtgaaaaggagaaaggaaatgaagctttcaactcaggggattatgaagaagcagtgatgtattataccaggagcatatcagcgcttcccactgtagttgcctataacaatcgagctcaagcagaaatcaaattacagaactggaatagtgcttttcaggattgtgaaaaggtcttggagttagaacctggaaacgtaaaggctcttctgcgtcgtgctactacatataaacatcaaaacaagctccgggaagctacagaagatttgagtaaagtactagatgttgagcctgataatgatttggccaagaaaaccttgtcagaggttgaaagagatctgaaaaattctgaagctgcatctgagactcaaaccaaagggaaaaggatggttattcaggaaatagaaaactccgaagatgaagaaggaaaaagcggaagaaaacatgaagatggcggtggagataagatgcggcggcggcggcgggcggcggcgccaccgggcatccgggcggcgggcagggcgcggagaaccctgccggcctgaagagccagggcaacgagctgttccgaagcgggcagttcgccgaggcggccggcaagtactcggcggcaatcgcgctcctggagccagcaggaagtgaaattgcagatgatctaagtatcttatattcaaatagagcagcatgttacctaaaagaaggaaactgcagtggctgcattcaagattgtaacagggctctggaacttcatccattctctatgaaacctcttctgaggcgggcgatggcctatgaaactctagagcagtatgggaaagcttatgtggattataaaacagtgttgcagatagactgtggactccagctagcaaatgacagtgttaacaggctatcaagaattttaatggagctggatggaccaaattggcgggagaagctgtcacctattcctgctgtgcctgcttctgtgccactgcaagcttggcatccggcaaaagagatgatctcaaaacaagcaggagactccagcagccatcgccagcagggcatcacagatgaaaaaacatttaaagcccttaaggaagaaggaaatcaatgtgtaaatgacaaaaactataaagacgccctcagtaaatacagcgaatgcttaaagattaacaatacggaatgtgccatatatacaaacagagctctctgttacttgaagctgtgccagtttgaagaagcaaagcaggactgtgatcaggcacttcagctagctgatgggaacgtgaaagccttctatagacgagctctggctcataaaggactcaagaattatcagaaaagcttaattgatctcaataaagttatcctactagatccaagtattattgaggcaaagatggaactggaagaggtaactagactccttaatcttaaggataagacagcaccattcaacaaagaaaaggagagaaggaaaattgagattcaagaggtgaatgaaggcaaggaggagcctggaagacctgcaggggaggtctccacgggatgccttgcttctgagaagggaggcaaaagcagcaggtcaccagaagaccctgagaaacttccgatagccaagcctaataatgcctatgaatttggtcagattataaatgctctcagtaccaggaaggataaagaagcctgtgcacatcttttagccatcactgcaccaaaagatttgccgatgtttttaagtaacaaacttgaaggggatacattccttctcctcattcagtctctgaaaaataatcttattgaaaaagatccctcattggtgtatcagcatcttttatacctgagtaaagcagaaaggtttaagtttaccactttttgattttttccctgctgttgcttctttggaccacttggtggcactagatttaccttcaggcaagccactggatgaaccgccagcatgacttcgggtggcactgccatcatccacactactgcttccactgttgtgcctgaatttggatggctttgactcaatatctacttgcacctccatactgttgccttctctgaaatataagagtaacaaatacaaacataattg

SEQ ID NO: 276986 - DNA, 430 bp, Homo sapiens
caggaaagagggtgcctcggtgggagagacccagcttttcgcgttagtaggcccgagcagtttgaactggaggtattactaagctggctacgaaatatgggaggtggatgtggatcaggatgatggagaaattaaatccagctaggatcgaaggttttcccaattagaaacaaagactgcaaacagaggtggaagagttctaaagtattgtataacttgttttttggaacttgagatggacattcagtagtcttgagaaggtgtatcctacagaaagaaagaaaaaaagagaatccttttttttcaaaaaggattctcagagagacttggtccaaaggtagtgagttctctcacttgattgttcagttatagatccacctcctcgttgtactctttctccccttctcactactgcacttgattagtcaaa

SEQ ID NO: 276987 - DNA, 464 bp, Homo sapiens
acatttctctttactgtgaatggtgccatttatggtctgtaagtgtttgtgtgggtaagttttgataaattttaactttttataacttgtgtatactttatggtagtaaatgataaaacagactagtatctacatatattttatgcattcatgaaatacctaactttatcttaatttttttgatatttctaattcatctgtgagttttttcaaatcgtcacaaatctccaaaaatttttccaatatttttactgaaaaaaatccacatataagtggaccaatgcagttcaaacttatattgttcaagggtcaactatagttctttcttatgcttggttataattatttcaaactatatatttacccttttctctattctcagagttgggtatcagaaattaaaaaagaagaagataaaatgcactttcatgaaactgagacatttccagcaatgaaagataatt

SEQ ID NO: 276988 - DNA, 348 bp, Homo sapiens
cttagtagagacgggggggtttcaccatgttggccgggatggtctcgatctcttgaccttgtgatccgcctgcctcagcctcccaaagtgctgggattacaggcatgagccaccgtgcccggccaaaagggaagattttataaaaatctagacaagtaagatgcaagacaaaaaaaaagaaaagaaaagaaaagaaaattagaccatcaaagattatgacttacaggctgatccaaaggtagtgggttacctcaactgattgttcacagtcagttatagattgaactccttgttctacttttttccccattccttactactgcacttgactagtcttaaagaaaaaaa

SEQ ID NO: 276989 - DNA, 256 bp, Homo sapiens
tccacaatatttgtatgaaagaaaaacagcatttttctctagcagagaaattggaactcaattggaagatgaagactagtcagttcaagctagcaacaatggcaatggtttggtggggtgggaggatcccatggtgtgatgcaggtctgagccctggccgtgctggatgtggtcatgagcttcgtctagtcatcagtctgtctcctacatgccagggatcccaccaggaggcatgtgagtttggatggggaggcaa

SEQ ID NO: 276990 - DNA, 631 bp, Homo sapiens
aaatcattgttgctgcaaatggtaattgcatggcaatcttcttacttagttctttgattatcattctatatatcattctaatatatacattatatattgtattatataagattatcattttattttatattattattctattatatattactctattattttactcccacatcctcttttcttgccatgtttttaatgaatccttctggatatttaaaaattacataaattagccaggcgtggtggcttatgcctgtaatctcagcactttgggacagcaaggctggaagatgcttgagcccaggagtttgagaccaacctggccaacatagtgagaccctgtctctactaaagatgtaaagattttaaaatttaaagtgatggctcacttctatagtcctggctattcaggaggctgagatgagagattgcctgaatccaggagttccaggttacagtgactatggttgtgccactgaactccagcctgggtgacagagcaagaccctgtttctaaaaataaataaatacaataaaataaatttaaaaagagtaaagaaagattaagcttgaaaagctaacttggagtcagaacctgcccatatgacttttcctcaggccattgtttccc

SEQ ID NO: 276991 - DNA, 428 bp, Homo sapiens
gggcctctcgagcctggtgggtgtgacatgggggttggccatcttcaccccgttgggcctctccaccgtctacatctttgcacttttcaactccttgcaaggtgtcttcatctgctgctggttcaccatcctttacctcccaagtcagagcaccacagtctcctcctctactgcaagattggaccaggcccactccgcatctcaagaataggaaggcacggccctgcaatatggactcagctctggctctctgtgtgaccttgggcagctccgtgcctctctctgtactccctcagtttccttctctgtacaatgtggctggggagggagaggatgggaccaggttggaccacgtggcatcagaggtcccatccagatccaactataggtccaagagtccacgtaagcaggtttgcaaggctctaaag

SEQ ID NO: 276992 - DNA, 1923 bp, Homo sapiens
ggcattgacccatagcctggtcctgcattacggtctctataagaagatgatcgtcttcaagccataccaggcctcccagcatgacatgtgccgcttccactacggagctggacaccctatgaagccccatcgcctggcattgacccatagcctggtcctgcattacggtctctataagaagatgatcgtcttcaagccataccaggcctcccagcatgacatgtgccgcttccactccgaggactacattgacttcctgcagagagtcagccccaccaatatgcaaggcttcaccaagagtcttaatgccttcaacgtaggcgatgactgcccagtgtttcccgggctctttgagttctgctcgcgttacacaggcgcatctctgcaaggagcaacccagctgaacaacaagatctgtgatattgccattaactgggctggtggtctgcaccatgccaagaagtttgaggcctctggcttctgctatgtcaacgacattgtgattggcatcctggagctgctcaagtaccaccctcgggtgctctacattgacattgacatccaccatggtgacggggttcaagaagctttctacctcactgaccgggtcatgacggtgtccttccacaaatacggaaattacttcttccctggcacaggtgacatgtatgaagtcggggcagagagtggccgctactactgtctgaacgtgcccctgcgggatggcattgatgaccagagttacaagcaccttttccagccggttatcaaccaggtagtggacttctaccaacccacgtgcattgtgctccagtgtggagctgactctctgggctgtgatcgattgggctgctttaacctcagcatccgagggcatggggaatgcgttgaatatgtcaagagcttcaatatccctctactcgtgctgggtggtggtggttatactgtccgaaatgttgcccgctgctggacatatgagacatcgctgctggtagaagaggccattagtgaggagcttccctatagtgaatacttcgagtactttgccccagacttcacacttcatccagatgtcagcacccgcatcgagaatcagaactcacgccagtatctggaccagatccgccagacaatctttgaaaacctgaagatgctgaaccatgcacctagtgtccagattcatgacgtgcctgcagacctcctgacctatgacaggactgatgaggctgatgcagaggagaggggtcctgaggagaactatagcaggccagaggcacccaatgagttctatgatggagaccatgacaatgacaaggaaagcgatgtggagatttaagagtggcttgggatgctgtgtcccaaggaatttcttttcacctcttggttgggctggagggaaaaggagtggctcctagagtcctgggggtcaccccagggcttttgctgactctgggaaagagtctggagaccacatttggttctcgaaccatctacctgcttttcctctctctcccaaggcctgacaatggtacctattagggatgagatacagacaaggatagctatctgggacattattggcagtgggccctggaggccagtccctagccccccttgccccttatttcttccctgcttccctcgaacccagagatttttgagggatgaacgggtagacaaggactgagattgcctctgacttcctcctcccctgggttctgacttcttcctccccttgcttccagggaagatgaagagagagagatttggaaggggctctggctccctaacacctgaatcccagatgatgggaagtatgttttcaagtgtggggaggatatgaaaatgttctgttctcacttttggctttatgtccattttaccactgtttttatccaataaactaagtcggtattttttgta

SEQ ID NO: 276993 - DNA, 1583 bp, Homo sapiens
ggacatctcttccacagacctcaacgtgagaactgctctagtttctataaactgtaaacctgtggtggtctgattatcctgatattggattttcttgttttctgttacaccttgagtcatttgcctttaggattctagacagacctaagggaaaaagaactgaaaacatattttgcccccacccccacaaaaaaaaatactgaaaactcccccccgcctcagttacacatccaaactctacatttacaaaacgaattcagggtgaggaagtaaaaacaggtcatctattcacaaaactgaaatacttcttccctggcacgtgacatgtatgaagtcggggcagagagtggccgctactactgtctgaacgtgcccctgcgggatggcattgatgaccagagttacaagcaccttttccagccggttatcaaccaggtagtggacttctaccaacccacgtgcattgtgctccagtgtggagctgactctctgggctgtgatcgattgggctgctttaacctcagcatccgagggcatggggaatgcgttgaatatgtcaagagcttcaatatccctctactcgtgctgggtggtggtggttatactgtccgaaatgttgcccgctgctggacatatgagacatcgctgctggtagaagaggccattagtgaggagcttccctatagtgaatacttcgagtactttgccccagacttcacacttcatccagatgtcagcacccgcatcgagaatcagaactcacgccagtatctggaccagatccgccagacaatctttgaaaacctgaagatgctgaaccatgcacctagtgtccagattcatgacgtgcctgcagacctcctgacctatgacaggactgatgaggctgatgcagaggagaggggtcctgaggagaactatagcaggccagaggcacccaatgagttctatgatggagaccatgacaatgacaaggaaagcgatgtggagatttaagagtggcttgggatgctgtgtcccaaggaatttcttttcacctcttggttgggctggagggaaaaggagtggctcctagagtcctgggggtcaccccagggcttttgctgactctgggaaagagtctggagaccacatttggttctcgaaccatctacctgcttttcctctctctcccaaggcctgacaatggtacctattagggatgagatacagacaaggatagctatctgggacattattggcagtgggccctggaggccagtccctagccccccttgccccttatttcttccctgcttccctcgaacccagagatttttgagggatgaacgggtagacaaggactgagattgcctctgacttcctcctcccctgggttctgacttcttcctccccttgcttccagggaagatgaagagagagagatttggaaggggctctggctccctaacacctgaatcccagatgatgggaagtatgttttcaagtgtggggaggatatgaaaatgttctgttctcacttttggctttatgtccattttaccactgtttttatccaataaactaagtcggtattttttgta

SEQ ID NO: 276994 - DNA, 2171 bp, Homo sapiens
gggggaggagatgagcatggagagaactgggaataggagattccaaggaacagggcaggtggatcagggctcaaagttgagaaggtacgataggctgagctggaggtggaaaggaaaagaagtggtcttcagggggctcatttgtaataacttacctggttaatcggagtctctctactgacttaaggattgtgggatgaggggaatgctatgtttggcttcatatagtctccaggactgggttcagtatgggtggtctgagcctgtggagtggggctgaccctgcctgggttcatcttgtgtctccatcccgaggtcttcaagccataccaggcctcccagcatgacatgtgccgcttccactccgaggactacattgacttcctgcagagagtcagccccaccaatatgcaaggcttcaccaagagtcttaatgccttcaacgtaggcgatgactgcccagtgtttcccgggctctttgagttctgctcgcgttacacaggcgcatctctgcaaggagcaacccagctgaacaacaagatctgtgatattgccattaactgggctggtggtctgcaccatgccaagaagtttgaggcctctggcttctgctatgtcaacgacattgtgattggcatcctggagctgctcaagtaccaccctcgggtgctctacattgacattgacatccaccatggtgacggggttcaagaagctttctacctcactgaccgggtcatgacggtgtccttccacaaatacggaaattacttcttccctggcacaggtgacatgtatgaagtcggggcagagagtggccgctactactgtctgaacgtgcccctgcgggatggcattgatgaccagagttacaagcaccttttccagccggttatcaaccaggtagtggacttctaccaacccacgtgcattgtgctccagtgtggagctgactctctgggctgtgatcgattgggctgctttaacctcagcatccgagggcatggggaatgcgttgaatatgtcaagagcttcaatatccctctactcgtgctgggtggtggtggttatactgtccgaaatgttgcccgctgctggacatatgagacatcgctgctggtagaagaggccattagtgaggagcttccctatagtgaatacttcgagtactttgccccagacttcacacttcatccagatgtcagcacccgcatcgagaatcagaactcacgccagtatctggaccagatccgccagacaatctttgaaaacctgaagatgctgaaccatgcacctagtgtccagattcatgacgtgcctgcagacctcctgacctatgacaggactgatgaggctgatgcagaggagaggggtcctgaggagaactatagcaggccagaggcacccaatgagttctatgatggagaccatgacaatgacaaggaaagcgatgtggagatttaagagtggcttgggatgctgtgtcccaaggaatttcttttcacctcttggttgggctggagggaaaaggagtggctcctagagtcctgggggtcaccccagggcttttgctgactctgggaaagagtctggagaccacatttggttctcgaaccatctacctgcttttcctctctctcccaaggcctgacaatggtacctattagggatgagatacagacaaggatagctatctgggacattattggcagtgggccctggaggccagtccctagccccccttgccccttatttcttccctgcttccctcgaacccagagatttttgagggatgaacgggtagacaaggactgagattgcctctgacttcctcctcccctgggttctgacttcttcctccccttgcttccagggaagatgaagagagagagatttggaaggggctctggctccctaacacctgaatcccagatgatgggaagtatgttttcaagtgtggggaggatatgaaaatgttctgttctcacttttggctttatgtccattttaccactgtttttatccaataaactaagtcggtattttttgtacctttcgcctttctaggaatgttaattcttgctagtttcctatttatgaaaggagagggaaatgggcatgatgatgcatgtaataaaagcatagttaacattcattcagcacttatccta

SEQ ID NO: 276995 - DNA, 934 bp, Homo sapiens
attttaaaatttttattgagacacagcatataaagtatacccaaatcttaagggtataacataatgaatttcactatcaagataaagatttagaacatttatagttttcttgtgctcctttcaggcaatacctaaaggtatttaccttgtcttttgataacctcctccacatcttcctctggttccttttaacagggaatgcgttgaatatgtcaagagcttcaatatccctctactcgtgctgggtggtggtggttatactgtccgaaatgttgcccgctgctggacatatgagacatcgctgctggtagaagaggccattagtgaggagcttccctatagtgaatacttcgagtactttgccccagacttcacacttcatccagatgtcagcacccgcatcgagaatcagaactcacgccagtatctggaccagatccgccagacaatctttgaaaacctgaagatgctgaaccatgcacctagtgtccagattcatgacgtgcctgcagacctcctgacctatgacaggactgatgaggctgatgcagaggagaggggtcctgaggagaactatagcaggtctgggagcagggacttcagcctactttcaataggcttgctggggaggtttaaaagggaaaaagtaaatgggaaggtattagtttaattgcctctggcttacctcctttagtctgctacaatttcctcactcttttctttgttatttttaatgacaaaagtaacacgtatttattgcaaaattttaaaacagcaccaaaatatggtgttggcgttcacacaatcccagacctattccacaggagtaaccactgttaatagtttttattgttttggatagacctttttctatagattgcaaatatactattctgtatgtacatataaacaaacacatatacactcatttaca

SEQ ID NO: 276996 - DNA, 859 bp, Homo sapiens
cagcacgcacggcacggggtggggctggcggcggccgcgggcggcgggcggcggaggtgcggggcctgctcccgccggcaccatggccaagaccgtggcctatttctacgaccccgacgtgggcaacttccactacggagctggacaccctatgaagccccatcgcctggcattgacccatagcctggtcctgcattacggtctctataagaagatgatcgtgagttccgccgcctcggccgggggttggggggtggggcgagctgtggccgtagggataggtgggctggactgagtgcatgaagtgcgacccgcccctagagtatcggggagctggatagaagtcaccaggagtaccttgaaagtgcagggtgttgggggtggcgtcctctgcttaatggaaagtactttctcacctcaggtcggccaccctctgactgtaggcacactagcccttggcctagggttagcgtgatgtggggctggtttgaagacagaaggtgtgttcctcctctgcattttagagtgtggatagggccttggcctcaggaattagggttaggggagcggatatcactgtatcagggtgtgaggtttaccctcagttcccactcctcttttaccacctttctttacctccaaggagctagggctccagggtggaacgatgctgccgtctttgtaaatgtgtatgtgcgtgtggaacagaggcgatattttagatattcctttttcagcctggaatacctctacatggttctgcttaatcgctatccagtttttcatctaccagacatacacatgctgtcttcccagcttggaatttatggctgtgatatgggatagtaacagttaagcc

SEQ ID NO: 276997 - DNA, 211 bp, Homo sapiens
tagccatgtgcggtgggtgtgcctgtagtcccaactacttgggaggccgaggcgagaggatggcttgggcccaggagtttaaagttacagtgatctatgatcagcagcctgagttgacagggaggatatgaaaatgttctgttctcacttttggctttatgtccattttaccactgtttttatccaataaactaagtcggtattttttgta

SEQ ID NO: 276998 - DNA, 1936 bp, Homo sapiens
cgaggcagactgcttagtagagccgggttaggggcgggcgggcggggattgggggctgtccgcggacatggcaagacgtggctatttctacgaccgacgtgggcagattccactacggagctggacaccctatgaagccccatcgcctggcattgacccatagcctggtcctgcattacggtctctataagaagatgatcgtcttcaagccataccaggcctcccagcatgacatgtgccgcttccactccgaggactacattgacttcctgcagagagtcagccccaccaatatgcaaggcttcaccaagagtcttaatgccttcaacgtaggcgatgactgcccagtgtttcccgggctctttgagttctgctcgcgttacacaggcgcatctctgcaaggagcaacccagctgaacaacaagatctgtgatattgccattaactgggctggtggtctgcaccatgccaagaagtttgaggcctctggcttctgctatgtcaacgacattgtgattggcatcctggagctgctcaagtaccaccctcgggtgctctacattgacattgacatccaccatggtgacggggttcaagaagctttctacctcactgaccgggtcatgacggtgtccttccacaaatacggaaattacttcttccctggcacaggtgacatgtatgaagtcggggcagagagtggccgctactactgtctgaacgtgcccctgcgggatggcattgatgaccagagttacaagcaccttttccagccggttatcaaccaggtagtggacttctaccaacccacgtgcattgtgctccagtgtggagctgactctctgggctgtgatcgattgggctgctttaacctcagcatccgagggcatggggaatgcgttgaatatgtcaagagcttcaatatccctctactcgtgctgggtggtggtggttatactgtccgaaatgttgcccgctgctggacatatgagacatcgctgctggtagaagaggccattagtgaggagcttccctatagtgaatacttcgagtactttgccccagacttcacacttcatccagatgtcagcacccgcatcgagaatcagaactcacgccagtatctggaccagatccgccagacaatctttgaaaacctgaagatgctgaaccatgcacctagtgtccagattcatgacgtgcctgcagacctcctgacctatgacaggactgatgaggctgatgcagaggagaggggtcctgaggagaactatagcaggccagaggcacccaatgagttctatgatggagaccatgacaatgacaaggaaagcgatgtggagatttaagagtggcttgggatgctgtgtcccaaggaatttcttttcacctcttggttgggctggagggaaaaggagtggctcctagagtcctgggggtcaccccagggcttttgctgactctgggaaagagtctggagaccacatttggttctcgaaccatctacctgcttttcctctctctcccaaggcctgacaatggtacctattagggatgagatacagacaaggatagctatctgggacattattggcagtgggccctggaggccagtccctagccccccttgccccttatttcttccctgcttccctcgaacccagagatttttgagggatgaacgggtagacaaggactgagattgcctctgacttcctcctcccctgggttctgacttcttcctccccttgcttccagggaagatgaagagagagagatttggaaggggctctggctccctaacacctgaatcccagatgatgggaagtatgttttcaagtgtggggaggatatgaaaatgttctgttctcacttttggctttatgtccattttaccactgtttttatccaataaactaagtcggtattttttgta

SEQ ID NO: 276999 - DNA, 2919 bp, Homo sapiens
cagcacgcacggcacggggtggggctggcggcggccgcgggcggcgggcggcggaggtgcggggcctgctcccgccggcaccatggccaagaccgtggcctatttctacgaccccgacgtgggcaacttccactacggagctggacaccctatgaagccccatcgcctggcattgacccatagcctggtcctgcattacggtctctataagaagatgatcgtcttcaagccataccaggcctcccagcatgacatgtgccgcttccactccgaggactacattgacttcctgcagagagtcagccccaccaatatgcaaggcttcaccaagagtcttaatgccttcaacgtaggcgatgactgcccagtgtttcccgggctctttgagttctgctcgcgttacacaggcgcatctctgcaaggagcaacccagctgaacaacaagatctgtgatattgccattaactgggctggtggtctgcaccatgccaagaagtttgaggcctctggcttctgctatgtcaacgacattgtgattggcatcctggagctgctcaagtaccaccctcgggtgctctacattgacattgacatccaccatggtgacggggttcaagaagctttctacctcactgaccgggtcatgacggtgtccttccacaaatacggaaattacttcttccctggcacaggtgacatgtatgaagtcggggcagagagtggccgctactactgtctgaacgtgcccctgcgggatggcattgatgaccagagttacaagcaccttttccagccggttatcaaccaggtagtggacttctaccaacccacgtgcattgtgctccagtgtggagctgactctctgggctgtgatcgattgggctgctttaacctcagcatccgagggcatggggaatgcgttgaatatgtcaagagcttcaatatccctctactcgtgctgggtggtggtggttatactgtccgaaatgttgcccgctgctggacatatgagacatcgctgctggtagaagaggccattagtgaggagcttccctatagtgaatacttcgagtactttgccccagacttcacacttcatccagatgtcagcacccgcatcgagaatcagaactcacgccagtatctggaccagatccgccagacaatctttgaaaacctgaagatgctgaaccatgcacctagtgtccagattcatgacgtgcctgcagacctcctgacctatgacaggactgatgaggctgatgcagaggagaggggtcctgaggagaactatagcaggccagaggcacccaatgagttctatgatggagaccatgacaatgacaaggaaagcgatgtggagatttaagagtggcttgggatgctgtgtcccaaggaatttcttttcacctcttggttgggctggagggaaaaggagtggctcctagagtcctgggggtcaccccagggcttttgctgactctgggaaagagtctggagaccacatttggttctcgaaccatctacctgcttttcctctctctcccaaggcctgacaatggtacctattagggatgagatacagacaaggatagctatctgggacattattggcagtgggccctggaggccagtccctagccccccttgccccttatttcttccctgcttccctcgaacccagagatttttgagggatgaacgggtagacaaggactgagattgcctctgacttcctcctcccctgggttctgacttcttcctccccttgcttccagggaagatgaagagagagagatttggaaggggctctggctccctaacacctgaatcccagatgatgggaagtatgttttcaagtgtggggaggatatgaaaatgttctgttctcacttttggctttatgtccattttaccactgtttttatccaataaactaagtcggtattttttgtaaaaaaacaaaaaaaaaaaaaaaaacaaaaacacaaaaaaacaaaaaaaaaaaacaacaacaacaaaaagaaaaaacaaaacaagcaaacaaaagaagagagagggggcgcgcgcgcgccgcagcgactactctctcctcccgggaggcggcgcccccggccgccgcgcgcgcgcacccccacgctttgttgcgcgaacggacggcggcggcgccctcagggggagcggcgcggtatattatattgaccgcgtgggcgcgcgcgcgggcgccgcgatttatttatacaaagagacatacgagatggtgcggaggaaaaagaggggaacaccgagggaggatcatcattgctagtacgagcacgacgacctccttctctgtgcgttgcgggggcggcggagacagcaaaacgcgcgtggggagcaacagtcacccctccgacgagcgcgcgagggagattatatagagcggcgcctcgcgagggggggatctatacttccacagcagatcttattgcagcgagcggatgtaaagaggggcgtggggacaaaacaaacacagggcagcccattacttagcggtgccgccgcgcgcgagtgcgagacaactctattgtgagagcttcagtagtggtgaattatataatctagttcttgcgcctaccttactgtctatctcttacctcaccgagggacccactcaatcgacccccacaaacatccacccccaccccacacgacaacactccacaccacacaaccaaacagcgaagaacgaagggagcggtgagggagtaaaaggggagagggaggagagcagggggagggacgggatgagatggtagtggatgcggaggcggagatggagcggcgggacgagggagttccgagtagggtcgggggaagggagagcggggaggtggtaagggagcagacgaggccagaaggccgaaacataaagcggaa

SEQ ID NO: 277000 - DNA, 1813 bp, Homo sapiens
cagcacgcacggcacggggtggggctggcggcggccgcgggcggcgggcggcggaggtgcggggcctgctcccgccggcaccatggccaagaccgtggcctatttctacgaccccgacgtgggcaacttccactacggagctggacaccctatgaagccccatcgcctggcattgacccatagcctggtcctgcattacggtctctataagaagatgatccccagtgtttcccgggctctttgagttctgctcgcgttacacaggcgcatctctgcaaggagcaacccagctgaacaacaagatctgtgatattgccattaactgggctggtggtctgcaccatgccaagaagtttgaggcctctggcttctgctatgtcaacgacattgtgattggcatcctggagctgctcaagtaccaccctcgggtgctctacattgacattgacatccaccatggtgacggggttcaagaagctttctacctcactgaccgggtcatgacggtgtccttccacaaatacggaaattacttcttccctggcacaggtgacatgtatgaagtcggggcagagagtggccgctactactgtctgaacgtgcccctgcgggatggcattgatgaccagagttacaagcaccttttccagccggttatcaaccaggtagtggacttctaccaacccacgtgcattgtgctccagtgtggagctgactctctgggctgtgatcgattgggctgctttaacctcagcatccgagggcatggggaatgcgttgaatatgtcaagagcttcaatatccctctactcgtgctgggtggtggtggttatactgtccgaaatgttgcccgctgctggacatatgagacatcgctgctggtagaagaggccattagtgaggagcttccctatagtgaatacttcgagtactttgccccagacttcacacttcatccagatgtcagcacccgcatcgagaatcagaactcacgccagtatctggaccagatccgccagacaatctttgaaaacctgaagatgctgaaccatgcacctagtgtccagattcatgacgtgcctgcagacctcctgacctatgacaggactgatgaggctgatgcagaggagaggggtcctgaggagaactatagcaggccagaggcacccaatgagttctatgatggagaccatgacaatgacaaggaaagcgatgtggagatttaagagtggcttgggatgctgtgtcccaaggaatttcttttcacctcttggttgggctggagggaaaaggagtggctcctagagtcctgggggtcaccccagggcttttgctgactctgggaaagagtctggagaccacatttggttctcgaaccatctacctgcttttcctctctctcccaaggcctgacaatggtacctattagggatgagatacagacaaggatagctatctgggacattattggcagtgggccctggaggccagtccctagccccccttgccccttatttcttccctgcttccctcgaacccagagatttttgagggatgaacgggtagacaaggactgagattgcctctgacttcctcctcccctgggttctgacttcttcctccccttgcttccagggaagatgaagagagagagatttggaaggggctctggctccctaacacctgaatcccagatgatgggaagtatgttttcaagtgtggggaggatatgaaaatgttctgttctcacttttggctttatgtccattttaccactgtttttatccaataaactaagtcggtattttttgta

SEQ ID NO: 277001 - DNA, 2327 bp, Homo sapiens
cagcacgcacggcacggggtggggctggcggcggccgcgggcggcgggcggcggaggtgcggggcctgctcccgccggcaccatggccaagaccgtggcctatttctacgaccccgacgtgggcaacttccactacggagctggacaccctatgaagccccatcgcctggcattgacccatagcctggtcctgcattacggtctctataagaagatgatcgtcttcaagccataccaggcctcccagcatgacatgtgccgcttccactccgaggactacattgacttcctgcagagagtcagccccaccaatatgcaaggcttcaccaagagtcttaatgccttcaacgtaggcgatgactgcccagtgtttcccgggctctttgagttctgctcgcgttacacaggcgcatctctgcaaggagcaacccagctgaacaacaagatctgtgatattgccattaactgggctggtggtctgcaccatgccaagaagtttgaggcctctggcttctgctatgtcaacgacattgtgattggcatcctggagctgctcaagtaccaccctcgggtgctctacattgacattgacatccaccatggtgacggggttcaagaagctttctacctcactgaccgggtcatgacggtgtccttccacaaatacggaaattacttcttccctggcacaggtgacatgtatgaagtcggggcagagagtggccgctactactgtctgaacgtgcccctgcgggatggcattgatgaccagagtaagtaccgaagtcttccctctgttccctaggccccttctttttctccttgaaataacctcttctgcctggtattgtctgctgttgggccagttgtccttaaggatgaatggccttcagagggaccatgaatctctggaaattgtatgcaacatatcatgtgtatgtgcatttttctgggaaaagtcattggctttcatcagtcactcatagcagtctgggatcccttccagaagtttcagaccagtgatttgattcttttgggtggcccctttcctgggctacatgctcgctcaaccccctttttccttttgttccctgtctccccatccccttggggtgccaggtgcccatctttggccctctcccaggttacaagcaccttttccagccggttatcaaccaggtagtggacttctaccaacccacgtgcattgtgctccagtgtggagctgactctctgggctgtgatcgattgggctgctttaacctcagcatccgagggcatggggaatgcgttgaatatgtcaagagcttcaatatccctctactcgtgctgggtggtggtggttatactgtccgaaatgttgcccgctgctggacatatgagacatcgctgctggtagaagaggccattagtgaggagcttccctatagtgaatacttcgagtactttgccccagacttcacacttcatccagatgtcagcacccgcatcgagaatcagaactcacgccagtatctggaccagatccgccagacaatctttgaaaacctgaagatgctgaaccatgcacctagtgtccagattcatgacgtgcctgcagacctcctgacctatgacaggactgatgaggctgatgcagaggagaggggtcctgaggagaactatagcaggccagaggcacccaatgagttctatgatggagaccatgacaatgacaaggaaagcgatgtggagatttaagagtggcttgggatgctgtgtcccaaggaatttcttttcacctcttggttgggctggagggaaaaggagtggctcctagagtcctgggggtcaccccagggcttttgctgactctgggaaagagtctggagaccacatttggttctcgaaccatctacctgcttttcctctctctcccaaggcctgacaatggtacctattagggatgagatacagacaaggatagctatctgggacattattggcagtgggccctggaggccagtccctagccccccttgccccttatttcttccctgcttccctcgaacccagagatttttgagggatgaacgggtagacaaggactgagattgcctctgacttcctcctcccctgggttctgacttcttcctccccttgcttccagggaagatgaagagagagagatttggaaggggctctggctccctaacacctgaatcccagatgatgggaagtatgttttcaagtgtggggaggatatgaaaatgttctgttctcacttttggctttatgtccattttaccactgtttttatccaataaactaagtcggtattttttgta

SEQ ID NO: 277002 - DNA, 1651 bp, Homo sapiens
cagcacgcacggcacggggtggggctggcggcggccgcgggcggcgggcggcggaggtgcggggcctgctcccgccggcaccatggccaagaccgtggcctatttctacgaccccgacgtgggcaacttccactacggagctggacaccctatgaagccccatcgcctggcattgacccatagcctggtcctgcattacggtctctataagaagatgatcgtcttcaagccataccaggcctcccagcatgacatgtgccgcttccactccgaggactacattgacttcctgcagagagtcagccccaccaatatgcaaggcttcaccaagagtcttaatgccttcaacgtaggcgatgactgcccagtgtttcccgggctctttgagttctgctcgcgttacacaggcgcatctctgcaaggagcaacccagctgaacaacaagatctgtgatattgccattaactgggctggtggtctgcaccatgccaagaagtttgaggcctctggcttctgctatgtcaacgacattgtgattggcatcctggagctgctcaagtaccaccctcgggtgctctacattgacattgacatccaccatggtgacggggttcaagaagctttctacctcactgaccgggtcatgacggtgtccttccacaaatacggaaattacttcttccctggcacaggtgacatgtatgaagtcggggcagagagtggccgctactactgtctgaacgtgcccctgcgggatggcattgatgaccagagttacaagcaccttttccagccggttatcaaccaggtagtggacttctaccaacccacgtgcattgtgctccagtgtggagctgactctctgggctgtgatcgattgggctgctttaacctcagcatccgagggcatggggaatgcgttgaatatgtcaagagcttcaatatccctctactcgtgctgggtggtggtggttatactgtccgaaatgttgcccgctgctggacatatgagacatcgctgctggtagaagaggccattagtgaggagcttccctatagtgaatacttcgagtactttgccccagacttcacacttcatccagatgtcagcacccgcatcgagaatcagaactcacgccagtatctggaccagatccgccagacaatctttgaaaacctgaagatgctgaaccatgcacctagtgtccagattcatgacgtgcctgcagacctcctgacctatgacaggactgatgaggctgatgcagaggagaggggtcctgaggagaactatagcaggtctgggagcagggacttcagcctactttcaataggcttgctggggaggtttaaaagggaaaaagtaaatgggaaggtattagtttaattgcctctggcttacctcctttagtctgctacaatttcctcactcttttctttgttatttttaatgacaaaagtaacacgtatttattgcaaaattttaaaacagcaccaaaatatggtgttggcgttcacacaatcccagacctattccacaggagtaaccactgttaatagtttttattgttttggatagacctttttctatagattgcaaatatactattctgtatgtacatataaacaaacacatatacactcatttaca

SEQ ID NO: 277003 - DNA, 1394 bp, Homo sapiens
cagcacgcacggcacggggtggggctggcggcggccgcgggcggcgggcggcggaggtgcggggcctgctcccgccggcaccatggccaagaccgtggcctatttctacgaccccgacgtgggcaacttccactacggagctggacaccctatgaagccccatcgcctggcattgacccatagcctggtcctgcattacggtctctataagaagatgatcgtcttcaagccataccaggcctcccagcatgacatgtgccgcttccactccgaggactacattgatgtggagctgactctctgggctgtgatcgattgggctgctttaacctcagcatccgagggcatggggaatgcgttgaatatgtcaagagcttcaatatccctctactcgtgctgggtggtggtggttatactgtccgaaatgttgcccgctgctggacatatgagacatcgctgctggtagaagaggccattagtgaggagcttccctatagtgaatacttcgagtactttgccccagacttcacacttcatccagatgtcagcacccgcatcgagaatcagaactcacgccagtatctggaccagatccgccagacaatctttgaaaacctgaagatgctgaaccatgcacctagtgtccagattcatgacgtgcctgcagacctcctgacctatgacaggactgatgaggctgatgcagaggagaggggtcctgaggagaactatagcaggccagaggcacccaatgagttctatgatggagaccatgacaatgacaaggaaagcgatgtggagatttaagagtggcttgggatgctgtgtcccaaggaatttcttttcacctcttggttgggctggagggaaaaggagtggctcctagagtcctgggggtcaccccagggcttttgctgactctgggaaagagtctggagaccacatttggttctcgaaccatctacctgcttttcctctctctcccaaggcctgacaatggtacctattagggatgagatacagacaaggatagctatctgggacattattggcagtgggccctggaggccagtccctagccccccttgccccttatttcttccctgcttccctcgaacccagagatttttgagggatgaacgggtagacaaggactgagattgcctctgacttcctcctcccctgggttctgacttcttcctccccttgcttccagggaagatgaagagagagagatttggaaggggctctggctccctaacacctgaatcccagatgatgggaagtatgttttcaagtgtggggaggatatgaaaatgttctgttctcacttttggctttatgtccattttaccactgtttttatccaataaactaagtcggtattttttgta

SEQ ID NO: 277004 - DNA, 1239 bp, Homo sapiens
attttaaaatttttattgagacacagcatataaagtatacccaaatcttaagggtataacataatgaatttcactatcaagataaagatttagaacatttatagttttcttgtgctcctttcaggcaatacctaaaggtatttaccttgtcttttgataacctcctccacatcttcctctggttccttttaacagggaatgcgttgaatatgtcaagagcttcaatatccctctactcgtgctgggtggtggtggttatactgtccgaaatgttgcccgctgctggacatatgagacatcgctgctggtagaagaggccattagtgaggagcttccctatagtgaatacttcgagtactttgccccagacttcacacttcatccagatgtcagcacccgcatcgagaatcagaactcacgccagtatctggaccagatccgccagacaatctttgaaaacctgaagatgctgaaccatgcacctagtgtccagattcatgacgtgcctgcagacctcctgacctatgacaggactgatgaggctgatgcagaggagaggggtcctgaggagaactatagcaggccagaggcacccaatgagttctatgatggagaccatgacaatgacaaggaaagcgatgtggagatttaagagtggcttgggatgctgtgtcccaaggaatttcttttcacctcttggttgggctggagggaaaaggagtggctcctagagtcctgggggtcaccccagggcttttgctgactctgggaaagagtctggagaccacatttggttctcgaaccatctacctgcttttcctctctctcccaaggcctgacaatggtacctattagggatgagatacagacaaggatagctatctgggacattattggcagtgggccctggaggccagtccctagccccccttgccccttatttcttccctgcttccctcgaacccagagatttttgagggatgaacgggtagacaaggactgagattgcctctgacttcctcctcccctgggttctgacttcttcctccccttgcttccagggaagatgaagagagagagatttggaaggggctctggctccctaacacctgaatcccagatgatgggaagtatgttttcaagtgtggggaggatatgaaaatgttctgttctcacttttggctttatgtccattttaccactgtttttatccaataaactaagtcggtattttttgta

SEQ ID NO: 277005 - DNA, 1487 bp, Homo sapiens
gcttgaggggtgggcaggaaggactgtgacttaggtgtttgtctttcagatctgtgatattgccattaactgggctggtggtctgcaccatgccaagaagtttgaggtgagtgaggaggtgatgggaaagacagtggccatcctagggtaggtgtttaggatgatggtggggggcagctgggaggggaattgctcttctctttatgagaccactgtcttgccataggcctctggcttctgctatgtcaacgacattgtgattggcatcctggagctgctcaagtgacatgtatgaagtcggggcagagagtggccgctactactgtctgaacgtgcccctgcgggatggcattgatgaccagagttacaagcaccttttccagccggttatcaaccaggtagtggacttctaccaacccacgtgcattgtgctccagtgtggagctgactctctgggctgtgatcgattgggctgctttaacctcagcatccgagggcatggggaatgcgttgaatatgtcaagagcttcaatatccctctactcgtgctgggtggtggtggttatactgtccgaaatgttgcccgctgctgaatacttcgagtactttgccccagacttcacacttcatccagatgtcagcacccgcatcgagaatcagaactcacgccagtatctggaccagatccgccagacaatctttgaaaacctgaagatgctgaaccatgcacctagtgtccagattcatgacgtgcctgcagacctcctgacctatgacaggactgatgaggctgatgcagaggagaggggtcctgaggagaactatagcaggccagaggcacccaatgagttctatgatggagaccatgacaatgacaaggaaagcgatgtggagatttaagagtggcttgggatgctgtgtcccaaggaatttcttttcacctcttggttgggctggagggaaaaggagtggctcctagagtcctgggggtcaccccagggcttttgctgactctgggaaagagtctggagaccacatttggttctcgaaccatctacctgcttttcctctctctcccaaggcctgacaatggtacctattagggatgagatacagacaaggatagctatctgggacattattggcagtgggccctggaggccagtccctagccccccttgccccttatttcttccctgcttccctcgaacccagagatttttgagggatgaacgggtagacaaggactgagattgcctctgacttcctcctcccctgggttctgacttcttcctccccttgcttccagggaagatgaagagagagagatttggaaggggctctggctccctaacacctgaatcccagatgatgggaagtatgttttcaagtgtggggaggatatgaaaatgttctgttctcacttttggctttatgtccattttaccactgtttttatccaataaactaagtcggtattttttgta

SEQ ID NO: 277006 - DNA, 845 bp, Homo sapiens
tgacagtgtctgtatagagtagttccttaatgtttatttgatacgtgaatgggtgaatgaatagcagtctctaccaacaagaggaggagtggttctcaacggggcctgagaaatggctttggaaaagggtgctgggagaagattagaacttagagtgagatcctgacctctctccccttgctttgcaggccagaggcacccaatgagttctatgatggagaccatgacaatgacaaggaaagcgatgtggagatttaagagtggcttgggatgctgtgtcccaaggaatttcttttcacctcttggttgggctggagggaaaaggagtggctcctagagtcctgggggtcaccccagggcttttgctgactctgggaaagagtctggagaccacatttggttctcgaaccatctacctgcttttcctctctctcccaaggcctgacaatggtacctattagggatgagatacagacaaggatagctatctgggacattattggcagtgggccctggaggccagtccctagccccccttgccccttatttcttccctgcttccctcgaacccagagatttttgagggatgaacgggtagacaaggactgagattgcctctgacttcctcctcccctgggttctgacttcttcctccccttgcttccagggaagatgaagagagagagatttggaaggggctctggctccctaacacctgaatcccagatgatgggaagtatgttttcaagtgtggggaggatatgaaaatgttctgttctcacttttggctttatgtccattttaccactgtttttatccaataaactaagtcggtattttttgta

SEQ ID NO: 277007 - DNA, 1679 bp, Homo sapiens
cagcacgcacggcacggggtggggctggcggcggccgcgggcggcgggcggcggaggtgcggggcctgctcccgccggcaccatggccaagaccgtggcctatttctacgaccccgacgtgggcaacttccactacggagctggacaccctatgaagccccatcgcctggcattgacccatagcctggtcctgcattacggtctctataagaagatgatcgtcttcaagccataccaggcctcccagcatgacatgtgccgcttccactccgaggactacattgacttcctgcagagagtcagccccaccaatatgcaaggcttcaccaagagtcttaatgccttcaacgtaggcgatgactgcccagtgtttcccgggctctttgagttctgctcgcgttacacaggcgcatctctgcaaggagcaacccagctgaacaacaagatctgtgatattgccattaactgggctggtggtctgcaccatgccaagaagtttgaggcctctggcttctgctatgtcaacgacattgtgattggcatcctggagctgctcaagtaccaccctcgggtgctctacattgacattgacatccaccatggtgacggggttcaagaagctttctacctcactgaccgggtcatgacggtgtccttccacaaatacggaaattacttcttccctggcacaggtgacatgtatgaagtcggggcagagagtggccgctactactgtctgaacgtgcccctgcgggatggcattgatgaccagagttacaagcaccttttccagccggttatcaaccaggtagtggacttctaccaacccacgtgcattgtgctccaggtaatactgtcagttcctcctcaggagtgttctgcctgggcttggggaaagagagcaagggaagaggaggttctttaggttggtggtggaaggggtatctgtgatgttctgatcagttctgatcactgcactttcctggggttttgctttttgcagtgtgtggagctgactctctgggctgtgatcgattgggctgctttaacctcagcatccgagggcatgggtgagacttgctctccttcttctccccaaggtttttaagtggccttggacttcagtacgtgggtgggggtagttggggaatgggcctcacctcttcttggaaatcaaaaatagctacaaattgtacttgaactagaaatgtcatcttgaacagggttccctagatggtcattcattcacgatatatttttattaagcacctgttatgttccaggcatcataccacatcatggggatggaataaggagtctcccatggagtttacagtttaggaaacagacaaaaaataaataatcaaatgaaataaatagattcttataaattctgtgaaagaaaaaaagaaagctgagacacaggatacaatgggggacctacttgagatagcatggtttcggaaagtttttctgaggaagtaaaatttgagttgagacctggagactaagaaggagtgagtcataagaggagcagagagaagcctgacccaagcatggacaaaggcccacaaaaggctctgagggctgggcccagtggcacacacctataatcccaacacttccagaggccaaggtgggagaatcgcctgaggctaggagtttgaggccagcctggg

SEQ ID NO: 277008 - DNA, 359 bp, Homo sapiens
ctgttattgactaggaggcagtccagtttaaagtagaggcagttggggttggtggggagggagagctatcagttgggggacctgaactagaggtaccactgagatgaaaaccagtatggtaggggtaaaaggcagctaggagattccatgtcctgggaatctctggaaactgctcactctgtattcctcatttccaaccagtatctggaccagatccgccagacaatctttgaaaacctgaagatgctgaaccatgcacctagtgtccagattcatgacgtgcctgcagacctcctgacctatgacaggactgatgaggctgatgcagaggagaggggtcctgaggagaactatagcag

SEQ ID NO: 277009 - DNA, 354 bp, Homo sapiens
ctggtggtctgcaccatgccaagaagtttgaggtgagtgaggaggtgatgggaaagacagtggccatcctagggtaggtgtttaggatgatggtggggggcagctgggaggggaattgctcttctctttatgagaccactgtcttgccataggcctctggcttctgctatgtcaacgacattgtgattggcatcctggagctgctcaagtaagtagcccaggaggagatgggggcagttacgggattcttggctgaggaggtctctcagtctcaaccctgaccttgacctccctcctccctgattagcttctcccaagttcttgatgctttattcaggctgcctcttccactgc

SEQ ID NO: 277010 - DNA, 432 bp, Homo sapiens
ttaagtgcttctttacttcccatccagtgccttgcacagggcttggtacatggtttggtccaaaatatttgttgaataaatttgcagatagcccacgtgtgtaggagagggagagaaggttcttgaaaaatggagattggaggaatctaggatggggagggagatatgggaagggcccagacagaggcaggagggttccaacttgttcctcttccctgcagcccagtgtttcccgggctctttgagttctgctcgcgttacacaggcgcatctctgcaaggagcaacccagctgaacaacaaggtgacatagtcccgagtcctgttcttcctttcctctggatccctggactcgggatttaaccctgatcctgggctcccagcttgaggggtgggcaggaaggactgtgacttaggtgtttgtctttcagat

SEQ ID NO: 277011 - DNA, 1956 bp, Homo sapiens
cagcacgcacggcacggggtggggctggcggcggccgcgggcggcgggcggcggaggtgcggggcctgctcccgccggcaccatggccaagaccgtggcctatttctacgaccccgacgtgggcaacttccactacggagctggacaccctatgaagccccatcgcctggcattgacccatagcctggtcctgcattacggtctctataagaagatgatcgtcttcaagccataccaggcctcccagcatgacatgtgccgcttccactccgaggactacattgacttcctgcagagagtcagccccaccaatatgcaaggcttcaccaagagtcttaatgccttcaacgtaggcgatgactgcccagtgtttcccgggctctttgagttctgctcgcgttacacaggcgcatctctgcaaggagcaacccagctgaacaacaagatctgtgatattgccattaactgggctggtggtctgcaccatgccaagaagtttgaggcctctggcttctgctatgtcaacgacattgtgattggcatcctggagctgctcaagtaccaccctcgggtgctctacattgacattgacatccaccatggtgacggggttcaagaagctttctacctcactgaccgggtcatgacggtgtccttccacaaatacggaaattacttcttccctggcacaggtgacatgtatgaagtcggggcagagagtggccgctactactgtctgaacgtgcccctgcgggatggcattgatgaccagagttacaagcaccttttccagccggttatcaaccaggtagtggacttctaccaacccacgtgcattgtgctccagtgtggagctgactctctgggctgtgatcgattgggctgctttaacctcagcatccgagggcatggggaatgcgttgaatatgtcaagagcttcaatatccctctactcgtgctgggtggtggtggttatactgtccgaaatgttgcccgctgctggacatatgagacatcgctgctggtagaagaggccattagtgaggagcttccctatagtgaatacttcgagtactttgccccagacttcacacttcatccagatgtcagcacccgcatcgagaatcagaactcacgccagtatctggaccagatccgccagacaatctttgaaaacctgaagatgctgaaccatgcacctagtgtccagattcatgacgtgcctgcagacctcctgacctatgacaggactgatgaggctgatgcagaggagaggggtcctgaggagaactatagcaggccagaggcacccaatgagttctatgatggagaccatgacaatgacaaggaaagcgatgtggagatttaagagtggcttgggatgctgtgtcccaaggaatttcttttcacctcttggttgggctggagggaaaaggagtggctcctagagtcctgggggtcaccccagggcttttgctgactctgggaaagagtctggagaccacatttggttctcgaaccatctacctgcttttcctctctctcccaaggcctgacaatggtacctattagggatgagatacagacaaggatagctatctgggacattattggcagtgggccctggaggccagtccctagccccccttgccccttatttcttccctgcttccctcgaacccagagatttttgagggatgaacgggtagacaaggactgagattgcctctgacttcctcctcccctgggttctgacttcttcctccccttgcttccagggaagatgaagagagagagatttggaaggggctctggctccctaacacctgaatcccagatgatgggaagtatgttttcaagtgtggggaggatatgaaaatgttctgttctcacttttggctttatgtccattttaccactgtttttatccaataaactaagtcggtattttttgta

SEQ ID NO: 277012 - DNA, 2076 bp, Homo sapiens
cagcacgcacggcacggggtggggctggcggcggccgcgggcggcgggcggcggaggtgcggggcctgctcccgccggcaccatggccaagaccgtggcctatttctacgaccccgacgtgggcaacttccactacggagctggacaccctatgaagccccatcgcctggcattgacccatagcctggtcctgcattacggtctctataagaagatgatcgtcttcaagccataccaggcctcccagcatgacatgtgccgcttccactccgaggactacattgacttcctgcagagagtcagccccaccaatatgcaaggcttcaccaagagtcttaatgccttcaacgtaggcgatgactgcccagtgtttcccgggctctttgagttctgctcgcgttacacaggcgcatctctgcaaggagcaacccagctgaacaacaagatctgtgatattgccattaactgggctggtggtctgcaccatgccaagaagtttgaggcctctggcttctgctatgtcaacgacattgtgattggcatcctggagctgctcaagtaccaccctcgggtgctctacattgacattgacatccaccatggtgacggggttcaagaagctttctacctcactgaccgggtcatgacggtgtccttccacaaatacggaaattacttcttccctggcacaggtgacatgtatgaagtcggggcagagagtggccgctactactgtctgaacgtgcccctgcgggatggcattgatgaccagagttacaagcaccttttccagccggttatcaaccaggtagtggacttctaccaacccacgtgcattgtgctccagtgtggagctgactctctgggctgtgatcgattgggctgctttaacctcagcatccgagggcatggggaatgcgttgaatatgtcaagagcttcaatatccctctactcgtgctgggtggtggtggttatactgtccgaaatgttgcccgctgctggacatatgagacatcgctgctggtagaagaggccattagtgaggagcttccctatagtgaatacttcgagtactttgccccagacttcacacttcatccagatgtcagcacccgcatcgagaatcagaactcacgccagtatctggaccagatccgccagacaatctttgaaaacctgaagatgctgaaccatgcacctagtgtccagattcatgacgtgcctgcagacctcctgacctatgacaggactgatgaggctgatgcagaggagaggggtcctgaggagaactatagcaggccagaggcacccaatgagttctatgatggagaccatgacaatgacaaggaaagcgatgtggagatttaagagtggcttgggatgctgtgtcccaaggaatttcttttcacctcttggttgggctggagggaaaaggagtggctcctagagtcctgggggtcaccccagggcttttgctgactctgggaaagagtctggagaccacatttggttctcgaaccatctacctgcttttcctctctctcccaaggcctgacaatggtacctattagggatgagatacagacaaggatagctatctgggacattattggcagtgggccctggaggccagtccctagccccccttgccccttatttcttccctgcttccctcgaacccagagatttttgagggatgaacgggtagacaaggactgagattgcctctgacttcctcctcccctgggttctgacttcttcctccccttgcttccagggaagatgaagagagagagatttggaaggggctctggctccctaacacctgaatcccagatgatgggaagtatgttttcaagtgtggggaggatatgaaaatgttctgttctcacttttggctttatgtccattttaccactgtttttatccaataaactaagtcggtattttttgtacctttcgcctttctaggaatgttaattcttgctagtttcctatttatgaaaggagagggaaatgggcatgatgatgcatgtaataaaagcatagttaacattcattcagcacttatccta

SEQ ID NO: 277013 - DNA, 758 bp, Homo sapiens
cagcacgcacggcacggggtggggctggcggcggccgcgggcggcgggcggcggaggtgcggggcctgctcccgccggcaccatggccaagaccgtggcctatttctacgaccccgacgtgggcaacttccactacggagctggacaccctatgaagccccatcgcctggcattgacccatagcctggtcctgcattacggtctctataagaagatgatcgtcttcaagccataccaggcctcccagcatgacatgtgccgcttccactccgaggactacattgacttcctgcagagagtcagccccaccaatatgcaaggcttcaccaagagtcttaatgccttcaacgtaggcgatgactgcccagtgtttcccgggctctttgagttctgctcgcgttacacaggcgcatctctgcaaggagcaacccagctgaacaacaagatctgtgatattgccattaactgggctggtggtctgcaccatgccaagaagtttgaggcctctggcttctgctatgtcaacgacattgtgattggcatcctggagctgctcaagtaccaccctcgggtgctctacattgacattgacatccaccatggtgacggggttcaagaagctttctacctcactgaccgggtcatgacggtgtccttccacaaatacggaaattacttcttccctggcacaggacatgttgaagtcggggcagagagtggcaatatcacagatcttgtgctcagctggggatcctcga

SEQ ID NO: 277014 - DNA, 1996 bp, Homo sapiens
cagcacgcacggcacggggtggggctggcggcggccgcgggcggcgggcggcggaggtgcggggcctgctcccgccggcaccatggccaagaccgtggcctatttctacgaccccgacgtgggcaacttccactacggagctggacaccctatgaagccccatcgcctggcattgacccatagcctggtcctgcattacggtctctataagaagatgatcgtcttcaagccataccaggcctcccagcatgacatgtgccgcttccactccgaggactacattgacttcctgcagagagtcagccccaccaatatgcaaggcttcaccaagagtcttaatgccttcaacgtaggcgatgactgcccagtgtttcccgggctctttgagttctgctcgcgttacacaggcgcatctctgcaaggagcaacccagctgaacaacaagatctgtgatattgccattaactgggctggtggtctgcaccatgccaagaagtttgaggcctctggcttctgctatgtcaacgacattgtgattggcatcctggagctgctcaagtaccaccctcgggtgctctacattgacattgacatccaccatggtgacggggttcaagaagctttctacctcactgaccgggtcatgacggtgtccttccacaaatacggaaattacttcttccctggcacaggtgacatgtatgaagtcggggcagagagtggccgctactactgtctgaacgtgcccctgcgggatggcattgatgaccagagttacaagcaccttttccagccggttatcaaccaggtagtggacttctaccaacccacgtgcattgtgctccagtgtggagctgactctctgggctgtgatcgattgggctgctttaacctcagcatccgagggcatggggaatgcgttgaatatgtcaagagcttcaatatccctctactcgtgctgggtggtggtggttatactgtccgaaatgttgcccgctgctggacatatgagacatcgctgctggtagaagaggccattagtgaggagcttccctatagtgaatacttcgagtactttgccccagacttcacacttcatccagatgtcagcacccgcatcgagaatcagaactcacgccagtatctggaccagatccgccagacaatctttgaaaacctgaagatgctgaaccatgcacctagtgtccagattcatgacgtgcctgcagacctcctgacctatgacaggactgatgaggctgatgcagaggagaggggtcctgaggagaactatagcaggccagaggcacccaatgagttctatgatggagaccatgacaatgacaaggaaagcgatgtggagatttaagagtggcttgggatgctgtgtcccaaggaatttcttttcacctcttggttgggctggagggaaaaggagtggctcctagagtcctgggggtcaccccagggcttttgctgactctgggaaagagtctggagaccacatttggttctcgaaccatctacctgcttttcctctctctcccaaggcctgacaatggtacctattagggatgagatacagacaaggatagctatctgggacattattggcagtgggccctggaggccagtccctagccccccttgccccttatttcttccctgcttccctcgaacccagagatttttgagggatgaacgggtagacaaggactgagattgcctctgacttcctcctcccctgggttctgacttcttcctccccttgcttccagggaagatgaagagagagagatttggaaggggctctggctccctaacacctgaatcccagatgatgggaagtatgttttcaagtgtggggaggatatgaaaatgttctgttctcacttttggctttatgtccattttaccactgtttttatccaataaactaagtcggtattttttgtaaaaaaaaaaaaaaggacgccgctcgcgatctagaactagt

SEQ ID NO: 277015 - DNA, 2051 bp, Homo sapiens
gggggaggagatgagcatggagagaactgggaataggagattccaaggaacagggcaggtggatcagggctcaaagttgagaaggtacgataggctgagctggaggtggaaaggaaaagaagtggtcttcagggggctcatttgtaataacttacctggttaatcggagtctctctactgacttaaggattgtgggatgaggggaatgctatgtttggcttcatatagtctccaggactgggttcagtatgggtggtctgagcctgtggagtggggctgaccctgcctgggttcatcttgtgtctccatcccgaggtcttcaagccataccaggcctcccagcatgacatgtgccgcttccactccgaggactacattgacttcctgcagagagtcagccccaccaatatgcaaggcttcaccaagagtcttaatgccttcaacgtaggcgatgactgcccagtgtttcccgggctctttgagttctgctcgcgttacacaggcgcatctctgcaaggagcaacccagctgaacaacaagatctgtgatattgccattaactgggctggtggtctgcaccatgccaagaagtttgaggcctctggcttctgctatgtcaacgacattgtgattggcatcctggagctgctcaagtaccaccctcgggtgctctacattgacattgacatccaccatggtgacggggttcaagaagctttctacctcactgaccgggtcatgacggtgtccttccacaaatacggaaattacttcttccctggcacaggtgacatgtatgaagtcggggcagagagtggccgctactactgtctgaacgtgcccctgcgggatggcattgatgaccagagttacaagcaccttttccagccggttatcaaccaggtagtggacttctaccaacccacgtgcattgtgctccagtgtggagctgactctctgggctgtgatcgattgggctgctttaacctcagcatccgagggcatggggaatgcgttgaatatgtcaagagcttcaatatccctctactcgtgctgggtggtggtggttatactgtccgaaatgttgcccgctgctggacatatgagacatcgctgctggtagaagaggccattagtgaggagcttccctatagtgaatacttcgagtactttgccccagacttcacacttcatccagatgtcagcacccgcatcgagaatcagaactcacgccagtatctggaccagatccgccagacaatctttgaaaacctgaagatgctgaaccatgcacctagtgtccagattcatgacgtgcctgcagacctcctgacctatgacaggactgatgaggctgatgcagaggagaggggtcctgaggagaactatagcaggccagaggcacccaatgagttctatgatggagaccatgacaatgacaaggaaagcgatgtggagatttaagagtggcttgggatgctgtgtcccaaggaatttcttttcacctcttggttgggctggagggaaaaggagtggctcctagagtcctgggggtcaccccagggcttttgctgactctgggaaagagtctggagaccacatttggttctcgaaccatctacctgcttttcctctctctcccaaggcctgacaatggtacctattagggatgagatacagacaaggatagctatctgggacattattggcagtgggccctggaggccagtccctagccccccttgccccttatttcttccctgcttccctcgaacccagagatttttgagggatgaacgggtagacaaggactgagattgcctctgacttcctcctcccctgggttctgacttcttcctccccttgcttccagggaagatgaagagagagagatttggaaggggctctggctccctaacacctgaatcccagatgatgggaagtatgttttcaagtgtggggaggatatgaaaatgttctgttctcacttttggctttatgtccattttaccactgtttttatccaataaactaagtcggtattttttgta

SEQ ID NO: 277016 - DNA, 2114 bp, Homo sapiens
cagcacgcacggcacggggtggggctggcggcggccgcgggcggcgggcggcggaggtgcggggcctgctcccgccggcaccatggccaagaccgtggcctatttctacgaccccgacgtgggcaacttccactacggagctggacaccctatgaagccccatcgcctggcattgacccatagcctggtcctgcattacggtctctataagaagatgatcgtcttcaagccataccaggcctcccagcatgacatgtgccgcttccactccgaggactacattgacttcctgcagagagtcagccccaccaatatgcaaggcttcaccaagagtcttaatgccttcaacgtaggcgatgactgcccagtgtttcccgggctctttgagttctgctcgcgttacacaggcgcatctctgcaaggagcaacccagctgaacaacaagatctgtgatattgccattaactgggctggtggtctgcaccatgccaagaagtttgaggcctctggcttctgctatgtcaacgacattgtgattggcatcctggagctgctcaagtaccaccctcgggtgctctacattgacattgacatccaccatggtgacggggttcaagaagctttctacctcactgaccgggtcatgacggtgtccttccacaaatacggaaattacttcttccctggcacaggtgacatgtatgaagtcggggcagagagtggccgctactactgtctgaacgtgcccctgcgggatggcattgatgaccagagttacaagcaccttttccagccggttatcaaccaggtagtggacttctaccaacccacgtgcattgtgctccaggtaatactgtcagttcctcctcaggagtgttctgcctgggcttggggaaagagagcaagggaagaggaggttctttaggttggtggtggaaggggtatctgtgatgttctgatcagttctgatcactgcactttcctggggttttgctttttgcagtgtgtggagctgactctctgggctgtgatcgattgggctgctttaacctcagcatccgagggcatggggaatgcgttgaatatgtcaagagcttcaatatccctctactcgtgctgggtggtggtggttatactgtccgaaatgttgcccgctgctggacatatgagacatcgctgctggtagaagaggccattagtgaggagcttccctatagtgaatacttcgagtactttgccccagacttcacacttcatccagatgtcagcacccgcatcgagaatcagaactcacgccagtatctggaccagatccgccagacaatctttgaaaacctgaagatgctgaaccatgcacctagtgtccagattcatgacgtgcctgcagacctcctgacctatgacaggactgatgaggctgatgcagaggagaggggtcctgaggagaactatagcaggccagaggcacccaatgagttctatgatggagaccatgacaatgacaaggaaagcgatgtggagatttaagagtggcttgggatgctgtgtcccaaggaatttcttttcacctcttggttgggctggagggaaaaggagtggctcctagagtcctgggggtcaccccagggcttttgctgactctgggaaagagtctggagaccacatttggttctcgaaccatctacctgcttttcctctctctcccaaggcctgacaatggtacctattagggatgagatacagacaaggatagctatctgggacattattggcagtgggccctggaggccagtccctagccccccttgccccttatttcttccctgcttccctcgaacccagagatttttgagggatgaacgggtagacaaggactgagattgcctctgacttcctcctcccctgggttctgacttcttcctccccttgcttccagggaagatgaagagagagagatttggaaggggctctggctccctaacacctgaatcccagatgatgggaagtatgttttcaagtgtggggaggatatgaaaatgttctgttctcacttttggctttatgtccattttaccactgtttttatccaataaactaagtcggtattttttgta

SEQ ID NO: 277017 - DNA, 1897 bp, Homo sapiens
cagcacgcacggcacggggtggggctggcggcggccgcgggcggcgggcggcggaggtgcggggcctgctcccgccggcaccatggccaagaccgtggcctatttctacgaccccgacgtgggcaacttccactacggagctggacaccctatgaagccccatcgcctggcattgacccatagcctggtcctgcattacggtctctataagaagatgatcgtcttcaagccataccaggcctcccagcatgacatgtgccgcttccactccgaggactacattgacttcctgcagagagtcagccccaccaatatgcaaggcttcaccaagagtcttaatgccttcaacgtaggcgatgactgcccagtgtttcccgggctctttgagttctgctcgcgttacacaggcgcatctctgcaaggagcaacccagctgaacaacaagatctgtgatattgccattaactgggctggtggtctgcaccatgccaagaagtttgaggcctctggcttctgctatgtcaacgacattgtgattggcatcctggagctgctcaagtaccaccctcgggtgctctacattgacattgacatccaccatggtgacggggttcaagaagctttctacctcactgaccgggtcatgacggtgtccttccacaaatacggaaattacttcttccctggcacaggtgacatgtatgaagtcggggcagagagtggccgctactactgtctgaacgtgcccctgcgggatggcattgatgaccagagttacaagcaccttttccagccggttatcaaccaggtagtggacttctaccaacccacgtgcattgtgctccagtgtggagctgactctctgggctgtgatcgattgggctgctttaacctcagcatccgagggcatggggaatgcgttgaatatgtcaagagcttcaatatccctctactcgtgctgggtggtggtggttatactgtccgaaatgttgcccgctgctgaatacttcgagtactttgccccagacttcacacttcatccagatgtcagcacccgcatcgagaatcagaactcacgccagtatctggaccagatccgccagacaatctttgaaaacctgaagatgctgaaccatgcacctagtgtccagattcatgacgtgcctgcagacctcctgacctatgacaggactgatgaggctgatgcagaggagaggggtcctgaggagaactatagcaggccagaggcacccaatgagttctatgatggagaccatgacaatgacaaggaaagcgatgtggagatttaagagtggcttgggatgctgtgtcccaaggaatttcttttcacctcttggttgggctggagggaaaaggagtggctcctagagtcctgggggtcaccccagggcttttgctgactctgggaaagagtctggagaccacatttggttctcgaaccatctacctgcttttcctctctctcccaaggcctgacaatggtacctattagggatgagatacagacaaggatagctatctgggacattattggcagtgggccctggaggccagtccctagccccccttgccccttatttcttccctgcttccctcgaacccagagatttttgagggatgaacgggtagacaaggactgagattgcctctgacttcctcctcccctgggttctgacttcttcctccccttgcttccagggaagatgaagagagagagatttggaaggggctctggctccctaacacctgaatcccagatgatgggaagtatgttttcaagtgtggggaggatatgaaaatgttctgttctcacttttggctttatgtccattttaccactgtttttatccaataaactaagtcggtattttttgta

SEQ ID NO: 277018 - DNA, 1649 bp, Homo sapiens
gggggaggagatgagcatggagagaactgggaataggagattccaaggaacagggcaggtggatcagggctcaaagttgagaaggtacgataggctgagctggaggtggaaaggaaaagaagtggtcttcagggggctcatttgtaataacttacctggttaatcggagtctctctactgacttaaggattgtgggatgaggggaatgctatgtttggcttcatatagtctccaggactgggttcagtatgggtggtctgagcctgtggagtggggctgaccctgcctgggttcatcttgtgtctccatcccgaggtcttcaagccataccaggcctcccagcatgacatgtgccgcttccactccgaggactacattgacttcctgcagagagtcagccccaccaatatgcaaggcttcaccaagagtcttaatgccttcaacgtaggcgatgactgcccagtgtttcccgggctctttgagttctgctcgcgttacacaggcgcatctctgcaaggagcaacccagctgaacaacaagtgtggagctgactctctgggctgtgatcgattgggctgctttaacctcagcatccgagggcatggggaatgcgttgaatatgtcaagagcttcaatatccctctactcgtgctgggtggtggtggttatactgtccgaaatgttgcccgctgctggacatatgagacatcgctgctggtagaagaggccattagtgaggagcttccctatagtgaatacttcgagtactttgccccagacttcacacttcatccagatgtcagcacccgcatcgagaatcagaactcacgccagtatctggaccagatccgccagacaatctttgaaaacctgaagatgctgaaccatgcacctagtgtccagattcatgacgtgcctgcagacctcctgacctatgacaggactgatgaggctgatgcagaggagaggggtcctgaggagaactatagcaggccagaggcacccaatgagttctatgatggagaccatgacaatgacaaggaaagcgatgtggagatttaagagtggcttgggatgctgtgtcccaaggaatttcttttcacctcttggttgggctggagggaaaaggagtggctcctagagtcctgggggtcaccccagggcttttgctgactctgggaaagagtctggagaccacatttggttctcgaaccatctacctgcttttcctctctctcccaaggcctgacaatggtacctattagggatgagatacagacaaggatagctatctgggacattattggcagtgggccctggaggccagtccctagccccccttgccccttatttcttccctgcttccctcgaacccagagatttttgagggatgaacgggtagacaaggactgagattgcctctgacttcctcctcccctgggttctgacttcttcctccccttgcttccagggaagatgaagagagagagatttggaaggggctctggctccctaacacctgaatcccagatgatgggaagtatgttttcaagtgtggggaggatatgaaaatgttctgttctcacttttggctttatgtccattttaccactgtttttatccaataaactaagtcggtattttttgta

SEQ ID NO: 277019 - DNA, 1060 bp, Homo sapiens
agccccagaccccaactgcgtcactgtgacggggctcccagagaatgtggaggaagccatcgaccacatcctcaatctggaggaggaatacctagctgacgtgctggacatatgagacatcgctgctggtagaagaggccattagtgaggagcttccctatagtgaatacttcgagtactttgccccagacttcacacttcatccagatgtcagcacccgcatcgagaatcagaactcacgccagtatctggaccagatccgccagacaatctttgaaaacctgaagatgctgaaccatgcacctagtgtccagattcatgacgtgcctgcagacctcctgacctatgacaggactgatgaggctgatgcagaggagaggggtcctgaggagaactatagcaggccagaggcacccaatgagttctatgatggagaccatgacaatgacaaggaaagcgatgtggagatttaagagtggcttgggatgctgtgtcccaaggaatttcttttcacctcttggttgggctggagggaaaaggagtggctcctagagtcctgggggtcaccccagggcttttgctgactctgggaaagagtctggagaccacatttggttctcgaaccatctacctgcttttcctctctctcccaaggcctgacaatggtacctattagggatgagatacagacaaggatagctatctgggacattattggcagtgggccctggaggccagtccctagccccccttgccccttatttcttccctgcttccctcgaacccagagatttttgagggatgaacgggtagacaaggactgagattgcctctgacttcctcctcccctgggttctgacttcttcctccccttgcttccagggaagatgaagagagagagatttggaaggggctctggctccctaacacctgaatcccagatgatgggaagtatgttttcaagtgtggggaggatatgaaaatgttctgttctcacttttggctttatgtccattttaccactgtttttatccaataaactaagtcggtattttttgta

SEQ ID NO: 277020 - DNA, 1077 bp, Homo sapiens
  misc_feature (983)..(983): n is a, c, g, or t
  misc_feature (986)..(986): n is a, c, g, or t
  misc_feature (988)..(988): n is a, c, g, or t
  misc_feature (998)..(998): n is a, c, g, or t
  misc_feature (1001)..(1001): n is a, c, g, or t
  misc_feature (1010)..(1010): n is a, c, g, or t
  misc_feature (1012)..(1012): n is a, c, g, or t
  misc_feature (1066)..(1066): n is a, c, g, or t
cagcacgcacggcacggggtggggctggcggcggccgcgggcggcgggcggcggaggtgcggggcctgctcccgccggcaccatggccaagaccgtggcctatttctacgaccccgacgtgggcaacttccactacggagctggacaccctatgaagccccatcgcctggcattgacccatagcctggtcctgcattacggtctctataagaagatgatcgtcttcaagccataccaggcctcccagcatgacatgtgccgcttccactccgaggactacattgacttcctgcagagagtcagccccaccaatatgcaaggcttcaccaagagtcttaatgccttcaacgtaggcgatgactgcccagtgtttcccgggctctttgagttctgctcgcgttacacaggcgcatctctgcaaggagcaacccagctgaacaacaagatctgtgatattgccattaactgggctggtggtctgcaccatgccaagaagtttgaggcctctggcttctgctatgtcaacgacattgtgattggcatcctggagctgctcaagtaccaccctcgggtgctctacattgacattgacatccaccatggtgacggggttcaagaagctttctacctcactgaccgggtcatgacggtgtccttccacaaatacggaaattacttcttccctggcacaggtgacatgtatgaagtcggggcagagagtggccgctactactgtctgaacgtgcccctgcgggatggcattgatgaccagagttacaagcaccttttccagccggttatcaaccaggtagtggacttctaccaacccacgtgcattgtgctccagtgtggagctgactctctgggctgtgatcgattgggctgctttaacctcagcatccgagggcatggggaatgcgttgaatatgtcaagagcttcaatatccctctactcgtgctgggtggtggtggttatactatanganantaggcaggtnaanacgctctanancagagttgttatctcctcatggcttctttcatcagtgggtcatctttcctcttntcttcattatg

SEQ ID NO: 277021 - DNA, 2050 bp, Homo sapiens
cagcacgcacggcacggggtggggctggcggcggccgcgggcggcgggcggcggaggtgcggggcctgctcccgccggcaccatggccaagaccgtggcctatttctacgaccccgacgtgggcaacttccactacggagctggacaccctatgaagccccatcgcctggcattgacccatagcctggtcctgcattacggtctctataagaagatgatcgtcttcaagccataccaggcctcccagcatgacatgtgccgcttccactccgaggactacattgacttcctgcagagagtcagccccaccaatatgcaaggcttcaccaagagtcttaatgccttcaacgtaggcgatgactgcccagtgtttcccgggctctttgagttctgctcgcgttacacaggcgcatctctgcaaggagcaacccagctgaacaacaagatctgtgatattgccattaactgggctggtggtctgcaccatgccaagaagtttgaggcctctggcttctgctatgtcaacgacattgtgattggcatcctggagctgctcaagtaccaccctcgggtgctctacattgacattgacatccaccatggtgacggggttcaagaagctttctacctcactgaccgggtcatgacggtgtccttccacaaatacggaaattacttcttccctggcacaggtgacatgtatgaagtcggggcagagagtggccgctactactgtctgaacgtgcccctgcgggatggcattgatgaccagagtaagtaccgaagtcttccctctgttccctaggccccttctttttctccttgaaataacctcttctgcctggtattgtctgctgttgggccagttgtccttaaggatgaatggccttcagagggaccatgaatctctggaaattgtatgcaacatatcatgtgtatgtgcatttttctgggaaaagtcattggctttcatcagtcactcatagcagtctgggatcccttccagaagtttcagaccagtgatttgattcttttgggtggcccctttcctgggctacatgctcgctcaaccccctttttccttttgttccctgtctccccatccccttggggtgccaggtgcccatctttggccctctcccaggttacaagcaccttttccagccggttatcaaccaggtagtggacttctaccaacccacgtgcattgtgctccaggtaatactgtcagttcctcctcaggagtgttctgcctgggcttggggaaagagagcaagggaagaggaggttctttaggttggtggtggaaggggtatctgtgatgttctgatcagttctgatcactgcactttcctggggttttgctttttgcagtgtgtggagctgactctctgggctgtgatcgattgggctgctttaacctcagcatccgagggcatgggtgagacttgctctccttcttctccccaaggtttttaagtggccttggacttcagtacgtgggtgggggtagttggggaatgggcctcacctcttcttggaaatcaaaaatagctacaaattgtacttgaactagaaatgtcatcttgaacagggttccctagatggtcattcattcacgatatatttttattaagcacctgttatgttccaggcatcataccacatcatggggatggaataaggagtctcccatggagtttacagtttaggaaacagacaaaaaataaataatcaaatgaaataaatagattcttataaattctgtgaaagaaaaaaagaaagctgagacacaggatacaatgggggacctacttgagatagcatggtttcggaaagtttttctgaggaagtaaaatttgagttgagacctggagactaagaaggagtgagtcataagaggagcagagagaagcctgacccaagcatggacaaaggcccacaaaaggctctgagggctgggcccagtggcacacacctataatcccaacacttccagaggccaaggtgggagaatcgcctgaggctaggagtttgaggccagcctggg

SEQ ID NO: 277022 - DNA, 356 bp, Homo sapiens
ggatttagaaaactcataccttaactgataagctagggttgtaaccttatgccagtgacatcaatgttcacaataggtgaatatgttgtaaaaataagagccaataagtattatttcacagcctaaattaaaaagtccctgatctgtttttccaggaacaatcttgtcttagtgatttggtaaggtcttggtaacatctggaaatctactttataaatcactttatgattcactttccttattctgcatattatgttaacataacaagttatgcaatgttagcattcctataaatatatttataggtttctaaagggatcttaattgtaaatatttatcctcattagagggtaagt

SEQ ID NO: 277023 - DNA, 554 bp, Homo sapiens
aaaggtgtgcatgatgagataccaacttatcagtatattatcttggacaaacttactcttcatttggctgttaaatgcaggaaataatagtacagattaattctcccccttccacaaatacatacatatatgcatgcaaagaagtgtatgcagaggccatggctgttgcttagtctggaaagctttttcaatctgaaggctctgtcttctcttgctatggtggtgtttacctctagctctctcttcaattcaattttttgctcatgcagggagcactggtcagagcacaaggatggagaactgctttatttcaccctcaggtttgtttcttgatttatttatagtatttttgagtgtatctctttgggtagttttcttagtggttgctataggtattacagtattcatatgtgacatcacagtttatttttatcaacattttactactctgagtaaatgtcaggtagtaaactctccatttacaccctctgccttccccacttttaagtatcattgtctttgaatattggatggtgttctaattattgcttcaa

SEQ ID NO: 277024 - DNA, 743 bp, Homo sapiens
gctcccgccgcccagccggtgatcgctctccggccgtccccggcaccctcggccccccacggcggttggtccgggcgggggaaggagaaagtgagactcggtgtcatcaccaatccgtcgccagaaggggaggaaactggaatccagcagcggcgagcagcagctgggcggtcacatctggaaatggaaagccgacctccccctcctcctccacctcctcctcctcctcctccttctcctcctctcacccaggatcacttccgaaaccacttggccttcagcccctgcctcggccagaggtttcatttttaactgaatatttacgaaagctgaaagcgtgcgaggggggtggggtggaaatagcggctgcttcttttccaaggatttatttaatggggatgtgttcaaggcaagaccgaattcagaaggatatcgacgtcgtgatccagaagtccagagctgaggactgcctgtttgcaggtgagttcttgcttttccagaacctcggaccccgcgcccccttcccagttctctgaccgcgacgtgtgtgtctggggcagctactagctttgagggcagaacccgcgtggcccgagcgggggtctaggcgaaggggcagtgcgtggtatttccagccccgcgtagtgcccgaagcctgcaagcacgcctcctgggttccagcagcggcggcagagcggggttggttggacccgccaggtttgcgtaatgggctgagccgccgg

SEQ ID NO: 277025 - DNA, 996 bp, Homo sapiens
gctcccgccgcccagccggtgatcgctctccggccgtccccggcaccctcggccccccacggcggttggtccgggcgggggaaggagaaagtgagactcggtgtcatcaccaatccgtcgccagaaggggaggaaactggaatccagcagcggcgagcagcagctgggcggtcacatctggaaatggaaagccgacctccccctcctcctccacctcctcctcctcctcctccttctcctcctctcacccaggatcacttccgaaaccacttggccttcagcccctgcctcggccagaggtttcatttttaactgaatatttacgaaagctgaaagcgtgcgaggggggtggggtggaaatagcggctgcttcttttccaaggatttatttaatggggatgtgttcaaggcaagaccgaattcagaaggatatcgacgtcgtgatccagaagtccagagctgaggactgcctgtttgcaggagtgaaggcaattttgaaggcatgactacgacctgctctggccacaagagctaagagttgccaggtgtggtggctcaaacactttgagatgccaatcccaacactttgagaggccaaggcaggaggattgcttgaggctaggagcttgaaaccagcctgggcaacacagtgagaccccatctctacaaaaaataaaaaaacaggccaggcgcagtggcacttagggaggccaaggtgggtggatcacctgaggtcaggagttcgagaccagcctgaccaacatggagaaaccccgtctctacaaaaaatacaaagtttgccagtgtggtggcacatgcctgttatcccagctactcaggaggctgaggcaggagaatcgcttgaacccgaaaggcagaggttgcagtgagtggagatcacgccattgcactccagcctgcgcaacaagagtgaaactccatctcaaataaataaataaaataaagttttaaaaagtcaaaattatccaggcgtga

SEQ ID NO: 277026 - DNA, 516 bp, Homo sapiens
gctcccgccgcccagccggtgatcgctctccggccgtccccggcaccctcggccccccacggcggttggtccgggcgggggaaggagaaagtgagactcggtgtcatcaccaatccgtcgccagaaggggaggaaactggaatccagcagcggcgagcagcagctgggcggtcacatctggaaatggaaagccgacctccccctcctcctccacctcctcctcctcctcctccttctcctcctctcacccaggatcacttccgaaaccacttggccttcagcccctgcctcggccagaggtttcatttttaactgaatatttacgaaagctgaaagcgtgcgaggggggtggggtggaaatagcggctgcttcttttccaaggatttatttaatggggatgtgttcaaggcaagaccgaattcagaaggatatcgacgtcgtgatccagaagtccagagctgaggactgcctgtttgcagatttcagatactcagactccacctttacttttacct

SEQ ID NO: 277027 - DNA, 1256 bp, Homo sapiens
ttaggctaggtacgaggccgggtgtgaatcggccgagggaatatatttgtatgctgggtggcctggctgatgctcagaggcctccttagagaggacactcactcccctcccaccagctggatgcccatttctgagctcagtcactgaagtgagagtgtgctcccccaagggaggcttctctccatcaggatggtactttgggggaacaaaatagtcagggatattggttcccctttgaggaggtgctgctgtttgcttttaggtatgagtgctcaggggccctcactgaaagagcccatgcctgccttcctcctttcatcgcctctctagagcccccaaagtcaggcagcagctggagtagttacattgtcatcatctttttttttgagacagtttcgctctgttgcccaggctggagtgcagtggtgtgatcttggctttctgcaacgtctgccttccaggttgaagaggttctcctgcctcagcctccttagtagtgggattacaggtgcccgctactatgcccggctaatttttcttttggtatttttagtagaaatggggtttcaccatgttggccaggctggtctcaaactcctgacctcaagtgagctgactgccttggcctcccagagtgctgggattagtcgtcatcttttgttaaaccaggatttgatttttttcttttcttttcttttcttttttttttttttgagacagagtctctctctgttgcccaggctggagtgcagtggcacaatctcggctcactgcagcctccgcctgccgggtcaagcgattctcctacctcagcctcctcagtagctgagattacaggcatgcaccaccatgcccggctaatttttttgtgtttttagtagagatggggtttcaccgtgctggccaggctggtctagaactcctgactgcaaatgatcagcccgcctcagccacccaaagtgttgggattacaggtgtgagccactgtgcccagcgtgatttttttttttttttaaagcaaacttgtcctttggttttgcagaacaggcctgctccctctcatctagcccatcatttcttggggcctgaaccccagtggtccaaagtattgcttgtgaaatttaaaaaatgtgaatatgatgtggggatgggcctcttctacattaccttggcccagggggatcagctggctgggaggattagtgagcacctctgtattttgaggtctgagtcttctggagctgtgtagttaatct

SEQ ID NO: 277028 - DNA, 2783 bp, Homo sapiens
tgcgcagttgctgttattgtgacttgtcgggccacggccccggatgttgtggctgccgcggggagatggctgaggccgaaggggttcccacgaccccaggcccggcttcggggtcgactttcaggggccgccgagatgtgtcaggctcctgggagcgggaccagcaggttgaggcggcgcagcgggccctggtggaggtgctggggccttacgagcctctgctgagtcgggtgcaggcagccctggtgtgggagcggccagctaggagcgctctgtggtgcctggggctgaacgcggctttctggttttttgccctgacatctcttcgtcttgtgtttttacttgcatttggcttgatgatcattgtgtgtattgatcaatggaagaacaaaatctggcctgaaataaaagtgccaagacccgacgcattagacaatgagagctggggctttgtgcaccctcggttgctcagcgtgcccgagctctgccaccatgtagctgaagtctgggttagtgggaccattttcataaggaatgttttgcttttcaaaaagcaaaacccaggcaagttctgcttgctgagctgtgggatactgacctttttggctgtcttgggccgctacgtccctgggcttctgctgtcctacttgatgcttgtcactgtcatgatgtggccccttgctgtgtaccaccgactgtgggatcgagcatatgtgcggctgaagccagctctgcagcggctagacttcagtgtccgtggctacatgatgtccaagcagagagagagacaattacgccgcagagctctccacccagaacgagccatggacaaccacagtgacagcgaagaggagcttgctgccttctgtcctcagctggacgattctactgttgccagggaattggccatcacagactctgagcactcagacgctgaagtctcctgtacagacaatggcacattcaatctttcaaggggccaaacacctctaacggaaggctctgaagacctagatggtcacagtgatccagaggaatcctttgccagagaccttccagacttcccttccattaatatggatcctgctggcctggatgatgaggacgacactagcattggcatgcccagcttgatgtaccgttctccgccaggggctgaggagccccaggccccacctgccagccgggacgaggctgcgctgccggagctcctgcttggtgctcttcctgtaggatccaacctcaccagcaaccttgccagcctggtctcccagggtatgattcagctggccttgtcaggggcctcccaaccaggcccttctggagcacctgcccagagagcaacgagaggcttcctccggtcccccagttcagacctggacactgatgctgagggggatgactttgaacttctggaccagtcggagctgagtcagctggaccctgccagttctaggagccactgaggcagagactccttttgggagtcactgtggtttaggtttttttctccccatcccacttaaggtgatggggcaagggaagaactcagctcccctcccctgaattatatttgtatgctgggtggcctggctgatgctcagaggcctccttagagaggacactcactcccctcccaccagctggatgcccatttctgagctcagtcactgaagtgagagtgtgctcccccaagggaggcttctctccatcaggatggtactttgggggaacaaaatagtcagggatattggttcccctttgaggaggtgctgctgtttgcttttaggtatgagtgctcaggggccctcactgaaagagcccatgcctgccttcctcctttcatcgcctctctagagcccccaaagtcaggcagcagctggagtagttacattgtcatcatctttttttttgagacagtttcgctctgttgcccaggctggagtgcagtggtgtgatcttggctttctgcaacgtctgccttccaggttgaagaggttctcctgcctcagcctccttagtagtgggattacaggtgcccgctactatgcccggctaatttttcttttggtatttttagtagaaatggggtttcaccatgttggccaggctggtctcaaactcctgacctcaagtgagctgactgccttggcctcccagagtgctgggattagtcgtcatcttttgttaaaccaggatttgatttttttcttttcttttcttttcttttttttttttttgagacagagtctctctctgttgcccaggctggagtgcagtggcacaatctcggctcactgcagcctccgcctgccgggtcaagcgattctcctacctcagcctcctcagtagctgagattacaggcatgcaccaccatgcccggctaatttttttgtgtttttagtagagatggggtttcaccgtgctggccaggctggtctagaactcctgactgcaaatgatcagcccgcctcagccacccaaagtgttgggattacaggtgtgagccactgtgcccagcgtgatttttttttttttttaaagcaaacttgtcctttggttttgcagaacaggcctgctccctctcatctagcccatcatttcttggggcctgaaccccagtggtccaaagtattgcttgtgaaatttaaaaaatgtgaatatgatgtggggatgggcctcttctacattaccttggcccagggggatcagctggctgggaggattagtgagcacctctgtattttgaggtctgagtcttctggagctgtgtagttaatct

SEQ ID NO: 277029 - DNA, 2565 bp, Homo sapiens
  misc_feature (28)..(28): n is a, c, g, or t
ctttccgggaatcaaagcgtcaaggacnaagtttgtcctccttgtacctaaattcagatttcaacctggtgagccaagaagaaagtcatgcttcacctccaaagcacctgggcctagtcactccccaaaccccatttaaaaccggaagcactggctgcctgcacagcaagatggggggaccctcaacaccctcctttcacagctcccccttctctctcccatagctggggctttgtgcaccctcggttgctcagcgtgcccgagctctgccaccatgtagctgaagtctgggttagtgggaccattttcataaggaatgttttgcttttcaaaaagcaaaacccaggcaagttctgcttgctgagctgtgggatactgacctttttggctgtcttgggccgctacgtccctgggcttctgctgtcctacttgatgcttgtcactgtcatgatgtggccccttgctgtgtaccaccgactgtgggatcgagcatatgtgcggctgaagccagctctgcagcggctagacttcagtgtccgtggctacatgatgtccaagcagagagagagacaattacgccgcagagctctccacccagaacgagccatggacaaccacagtgacagcgaagaggagcttgctgccttctgtcctcagctggacgattctactgttgccagggaattggccatcacagactctgagcactcagacgctgaagtctcctgtacagacaatggcacattcaatctttcaaggggccaaacacctctaacggaaggctctgaagacctagatggtcacagtgatccagaggaatcctttgccagagaccttccagacttcccttccattaatatggatcctgctggcctggatgatgaggacgacactagcattggcatgcccagcttgatgtaccgttctccgccaggggctgaggagccccaggccccacctgccagccgggacgaggctgcgctgccggagctcctgcttggtgctcttcctgtaggatccaacctcaccagcaaccttgccagcctggtctcccagggtatgattcagctggccttgtcaggggcctcccaaccaggcccttctggagcacctgcccagagagcaacgagaggcttcctccggtcccccagttcagacctggacactgatgctgagggggatgactttgaacttctggaccagtcggagctgagtcagctggaccctgccagttctaggagccactgaggcagagactccttttgggagtcactgtggtttaggtttttttctccccatcccacttaaggtgatggggcaagggaagaactcagctcccctcccctgaattatatttgtatgctgggtggcctggctgatgctcagaggcctccttagagaggacactcactcccctcccaccagctggatgcccatttctgagctcagtcactgaagtgagagtgtgctcccccaagggaggcttctctccatcaggatggtactttgggggaacaaaatagtcagggatattggttcccctttgaggaggtgctgctgtttgcttttaggtatgagtgctcaggggccctcactgaaagagcccatgcctgccttcctcctttcatcgcctctctagagcccccaaagtcaggcagcagctggagtagttacattgtcatcatctttttttttgagacagtttcgctctgttgcccaggctggagtgcagtggtgtgatcttggctttctgcaacgtctgccttccaggttgaagaggttctcctgcctcagcctccttagtagtgggattacaggtgcccgctactatgcccggctaatttttcttttggtatttttagtagaaatggggtttcaccatgttggccaggctggtctcaaactcctgacctcaagtgagctgactgccttggcctcccagagtgctgggattagtcgtcatcttttgttaaaccaggatttgatttttttcttttcttttcttttcttttttttttttttgagacagagtctctctctgttgcccaggctggagtgcagtggcacaatctcggctcactgcagcctccgcctgccgggtcaagcgattctcctacctcagcctcctcagtagctgagattacaggcatgcaccaccatgcccggctaatttttttgtgtttttagtagagatggggtttcaccgtgctggccaggctggtctagaactcctgactgcaaatgatcagcccgcctcagccacccaaagtgttgggattacaggtgtgagccactgtgcccagcgtgatttttttttttttttaaagcaaacttgtcctttggttttgcagaacaggcctgctccctctcatctagcccatcatttcttggggcctgaaccccagtggtccaaagtattgcttgtgaaatttaaaaaatgtgaatatgatgtggggatgggcctcttctacattaccttggcccagggggatcagctggctgggaggattagtgagcacctctgtattttgaggtctgagtcttctggagctgtgtagttaatct

SEQ ID NO: 277030 - DNA, 1396 bp, Homo sapiens
tgcgcagttgctgttattgtgacttgtcgggccacggccccggatgttgtggctgccgcggggagatggctgaggccgaaggggttcccacgaccccaggcccggcttcggggtcgactttcaggggccgccgagatgtgtcaggctcctgggagcgggaccagcaggttgaggcggcgcagcgggccctggtggaggtgctggggccttacgagcctctgctgagtcgggtgcaggcagccctggtgtgggagcggccagctaggagcgctctgtggtgcctggggctgaacgcggctttctggttttttgccctgacatctcttcgtcttgtgtttttacttgcatttggcttgatgatcattgtgtgtattgatcaatggaagaacaaaatctggcctgaaataaaagtgccaagacccgacgcattagacaatgagagctggggctttgtgcaccctcggttgctcagcgtgcccgagctctgccaccatgtagctgaagtctgggttagtgggaccattttcataaggaatgttttgcttttcaaaaagcaaaacccaggcaagttctgcttgctgagctgtgggatactgacctttttggctgtcttgggccgctacgtccctgggcttctgctgtcctacttgatgcttgtcactgtcatgatgtggccccttgctgtgtaccaccgactgtgggatcgagcatatgtgcggctgaagccagctctgcagcggctagacttcagtgtccgtggctacatgatgtccaagcagagagagagacaattacgccgcagagctctccacccagaacgagccatggacaaccacagtgacagcgaagaggagcttgctgccttctgtcctcaggtatcttgagtgtgggagctgcttcactgtccagttttctttagctaccttttaaccatccgacagctcacatttaggccataaccaggtttgaggccttagactccccttgttcccaagacaaggagagaagtgagactttgttcctagatctcaatttttttctttatcatatcattcctgtaatcaacctaggtctcaattagagcctgatgcccagcaccgctcttccgtatctctttttaccctaccattatggaagaacttctggagctagtatgatcatcttttaaacagcccagttcacccttgggtctgtgcagtatgtgtatcctcctaccactttgaaaaattatctctggatcaattatttgccttaaagtaagtgggtaattgactcccccaagactgcttttcttcctgtgcttaagaggttatgaatgagtgttttctttgggagagcagcctaaaaggggtcaagattttttttgttgttgttactttcacatgtattgattaaa

SEQ ID NO: 277031 - DNA, 948 bp, Homo sapiens
tgcgcagttgctgttattgtgacttgtcgggccacggccccggatgttgtggctgccgcggggagatggctgaggccgaaggggttcccacgaccccaggcccggcttcggggtcgactttcaggggccgccgagatgtgtcaggctcctgggagcgggaccagcaggttgaggcggcgcagcgggccctggtggaggtgctggggccttacgagcctctgctgagtcgggtgcaggcagccctggtgtgggagcggccagctaggagcgctctgtggtgcctggggctgaacgcggctttctggttttttgccctgacatctcttcgtcttgtgtttttacttgcatttggcttgatgatcattgtgtgtattgatcaatggaagaacaaaatctggcctgaaataaaagtgccaagacccgacgcattagacaatgagaggtatggaacactaattaaatccctttttgttgctctgattcattctcttgtaatattctggttacatgttgttaaccccatgttctggacacacagtgtaaactgagaacctaggctgttccaaatgatcattttaacacatcctaaagttcaggcagcaatatgttgagatggcctgtgtcctctgatctttacaagagaagtttctgaaaaagaagcattacagtgccccataacctgacatgccagggaatcagctgcattattcagtcccagtgagaaaacttaaaggcagctaacttcatttgtctcctggcttttataccaggtcatttagtgttttctgtgacctctggctatttaaagttcccggtcagaaaacacattggttcctggcatcagcaagtcaaagccaaagattcctcttgtgtcttacagctcaagtattaataggttggggaaaagacaacagtaatagccgataaaaaaggcgacactgtgtcata

SEQ ID NO: 277032 - DNA, 3725 bp, Homo sapiens
tgcgcagttgctgttattgtgacttgtcgggccacggccccggatgttgtggctgccgcggggagatggctgaggccgaaggggttcccacgaccccaggcccggcttcggggtcgactttcaggggccgccgagatgtgtcaggctcctgggagcgggaccagcaggttgaggcggcgcagcgggccctggtggaggtgctggggccttacgagcctctgctgagtcgggtgcaggcagccctggtgtgggagcggccagctaggagcgctctgtggtgcctggggctgaacgcggctttctggttttttgccctgacatctcttcgtcttgtgtttttacttgcatttggcttgatgatcattgtgtgtattgatcaatggaagaacaaaatctggcctgaaataaaagtgccaagacccgacgcattagacaatgagaggtatggaacactaattaaatccctttttgttgctctgattcattctcttgtaatattctggttacatgttgttaaccccatgttctggacacacagtgtaaactgagaacctaggctgttccaaatgatcattttaacacatcctaaagttcaggcagcaatatgttgagatggcctgtgtcctctgatctttacaagagaagtttctgaaaaagaagcattacagtgccccataacctgacatgccagggaatcagctgcattattcagtcccagtgagaaaacttaaaggcagctaacttcatttgtctcctggcttttataccaggtcatttagtgttttctgtgacctctggctatttaaagttcccggtcagaaaacacattggttcctggcatcagcaagtcaaagccaaagattcctcttgtgtcttacagctcctgctttcatttctcagttcatccactccatttgtttgatccaaagaattttctctgctgtggtttattttggttttgctttatttattttctttctaaggggcacatccaccatttcctcccccttagcagcagtggtgtcagtcagactatgctcacttttatccctggattgcaatcacagggaattggaatggtctgagtgcaaggaagaaaacgtttctaagcacaaagggccttggagctggggacaggtttacacacgtggattgggctgcttgctcatagggtggagttgtcagaacaagtttgtcctccttgtacctaaattcagatttcaacctggtgagccaagaagaaagtcatgcttcacctccaaagcacctgggcctagtcactccccaaaccccatttaaaaccggaagcactggctgcctgcacagcaagatggggggaccctcaacaccctcctttcacagctcccccttctctctcccatagctggggctttgtgcaccctcggttgctcagcgtgcccgagctctgccaccatgtagctgaagtctgggttagtgggaccattttcataaggaatgttttgcttttcaaaaagcaaaacccaggcaagttctgcttgctgagctgtgggatactgacctttttggctgtcttgggccgctacgtccctgggcttctgctgtcctacttgatgcttgtcactgtcatgatgtggccccttgctgtgtaccaccgactgtgggatcgagcatatgtgcggctgaagccagctctgcagcggctagacttcagtgtccgtggctacatgatgtccaagcagagagagagacaattacgccgcagagctctccacccagaacgagccatggacaaccacagtgacagcgaagaggagcttgctgccttctgtcctcagctggacgattctactgttgccagggaattggccatcacagactctgagcactcagacgctgaagtctcctgtacagacaatggcacattcaatctttcaaggggccaaacacctctaacggaaggctctgaagacctagatggtcacagtgatccagaggaatcctttgccagagaccttccagacttcccttccattaatatggatcctgctggcctggatgatgaggacgacactagcattggcatgcccagcttgatgtaccgttctccgccaggggctgaggagccccaggccccacctgccagccgggacgaggctgcgctgccggagctcctgcttggtgctcttcctgtaggatccaacctcaccagcaaccttgccagcctggtctcccagggtatgattcagctggccttgtcaggggcctcccaaccaggcccttctggagcacctgcccagagagcaacgagaggcttcctccggtcccccagttcagacctggacactgatgctgagggggatgactttgaacttctggaccagtcggagctgagtcagctggaccctgccagttctaggagccactgaggcagagactccttttgggagtcactgtggtttaggtttttttctccccatcccacttaaggtgatggggcaagggaagaactcagctcccctcccctgaattatatttgtatgctgggtggcctggctgatgctcagaggcctccttagagaggacactcactcccctcccaccagctggatgcccatttctgagctcagtcactgaagtgagagtgtgctcccccaagggaggcttctctccatcaggatggtactttgggggaacaaaatagtcagggatattggttcccctttgaggaggtgctgctgtttgcttttaggtatgagtgctcaggggccctcactgaaagagcccatgcctgccttcctcctttcatcgcctctctagagcccccaaagtcaggcagcagctggagtagttacattgtcatcatctttttttttgagacagtttcgctctgttgcccaggctggagtgcagtggtgtgatcttggctttctgcaacgtctgccttccaggttgaagaggttctcctgcctcagcctccttagtagtgggattacaggtgcccgctactatgcccggctaatttttcttttggtatttttagtagaaatggggtttcaccatgttggccaggctggtctcaaactcctgacctcaagtgagctgactgccttggcctcccagagtgctgggattagtcgtcatcttttgttaaaccaggatttgatttttttcttttcttttcttttcttttttttttttttgagacagagtctctctctgttgcccaggctggagtgcagtggcacaatctcggctcactgcagcctccgcctgccgggtcaagcgattctcctacctcagcctcctcagtagctgagattacaggcatgcaccaccatgcccggctaatttttttgtgtttttagtagagatggggtttcaccgtgctggccaggctggtctagaactcctgactgcaaatgatcagcccgcctcagccacccaaagtgttgggattacaggtgtgagccactgtgcccagcgtgatttttttttttttttaaagcaaacttgtcctttggttttgcagaacaggcctgctccctctcatctagcccatcatttcttggggcctgaaccccagtggtccaaagtattgcttgtgaaatttaaaaaatgtgaatatgatgtggggatgggcctcttctacattaccttggcccagggggatcagctggctgggaggattagtgagcacctctgtattttgaggtctgagtcttctggagctgtgtagttaatct

SEQ ID NO: 277033 - DNA, 1832 bp, Homo sapiens
gtgctctagaggatccttcgggagccttaccctcacctctaacggaaggctctgaagacctagatggtcacagtgatccagaggaatcctttgccagagaccttccagacttcccttccattaatatggatcctgctggcctggatgatgaggacgacactagcattggcatgcccagcttgatgtaccgttctccgccaggggctgaggagccccaggccccacctgccagccgggacgaggctgcgctgccggagctcctgcttggtgctcttcctgtaggatccaacctcaccagcaaccttgccagcctggtctcccagggtatgattcagctggccttgtcaggggcctcccaaccaggcccttctggagcacctgcccagagagcaacgagaggcttcctccggtcccccagttcagacctggacactgatgctgagggggatgactttgaacttctggaccagtcggagctgagtcagctggaccctgccagttctaggagccactgaggcagagactccttttgggagtcactgtggtttaggtttttttctccccatcccacttaaggtgatggggcaagggaagaactcagctcccctcccctgaattatatttgtatgctgggtggcctggctgatgctcagaggcctccttagagaggacactcactcccctcccaccagctggatgcccatttctgagctcagtcactgaagtgagagtgtgctcccccaagggaggcttctctccatcaggatggtactttgggggaacaaaatagtcagggatattggttcccctttgaggaggtgctgctgtttgcttttaggtatgagtgctcaggggccctcactgaaagagcccatgcctgccttcctcctttcatcgcctctctagagcccccaaagtcaggcagcagctggagtagttacattgtcatcatctttttttttgagacagtttcgctctgttgcccaggctggagtgcagtggtgtgatcttggctttctgcaacgtctgccttccaggttgaagaggttctcctgcctcagcctccttagtagtgggattacaggtgcccgctactatgcccggctaatttttcttttggtatttttagtagaaatggggtttcaccatgttggccaggctggtctcaaactcctgacctcaagtgagctgactgccttggcctcccagagtgctgggattagtcgtcatcttttgttaaaccaggatttgatttttttcttttcttttcttttcttttttttttttttgagacagagtctctctctgttgcccaggctggagtgcagtggcacaatctcggctcactgcagcctccgcctgccgggtcaagcgattctcctacctcagcctcctcagtagctgagattacaggcatgcaccaccatgcccggctaatttttttgtgtttttagtagagatggggtttcaccgtgctggccaggctggtctagaactcctgactgcaaatgatcagcccgcctcagccacccaaagtgttgggattacaggtgtgagccactgtgcccagcgtgatttttttttttttttaaagcaaacttgtcctttggttttgcagaacaggcctgctccctctcatctagcccatcatttcttggggcctgaaccccagtggtccaaagtattgcttgtgaaatttaaaaaatgtgaatatgatgtggggatgggcctcttctacattaccttggcccagggggatcagctggctgggaggattagtgagcacctctgtattttgaggtctgagtcttctggagctgtgtagttaatct

SEQ ID NO: 277034 - DNA, 599 bp, Homo sapiens
ttcgtccagcagcatcttgtactagtcctgactggttagtatagaaacagcactcctcttctaaaaagatacacaggccgcctttctcggcagtgaggagatctaaacctcgatggttttgaagtgtcactgctgcttaaagagtcttttggaattggagagcaagtctatttgggattggagaccccttcgtggggttttgggagggcctggtcggcttgttggcagaggagatagctcatgagggagactgttgggaggtattctcctagctgagagttagaagggggcctgttttgtaagaggaaagggcgtccgtatattaactcaaatggactgaggaaggagggtgcttttggactggctctaatgctctccagtgctatgggcaaaagggaggtccatggtttttggacttcaagagtgagtttggttaactgagccttaaggatcccattgccctttcgacttttccggatgtctggggccagcatgggatatggagacgccactggatgccaagggactgagaaacctgttgagtgatttgggagatgaagctaggggccattgtctgattgtatggagccagggagacc

SEQ ID NO: 277035 - DNA, 3570 bp, Homo sapiens
aatgaaatgacagaattgatcattaggatgcttgttactcaaaaagcccattttttaaagaaggatgtattaaaattattccagcatgctaatgtggcacactcctctgctgcctaacggcaggtgttgctattagcagaggaagccttgttctaagaattattctagagggccagaaagaacaggtattgctccacccgagtaaacgctgactcaactctgcagggctggcgcgctctttcctcacctcacccctcctgccaggcacaactgagatccagaaataagaggattagcgagagaaggggaaatatgcaggacggtagtgatgggtatgcacaaaggagtgccaagcagttttaaccgttaatgttcttcgtctattgctagagaaaatgtctttccttggaggaggcattggcacgagttactataaactccctctgaatctcaagacttctgggacgccgattccgctcctggcctggggcaaggcgtgggagcttggaagccagcgctgcgctccccgtgggaagcgatcgtctcctctgtcaactcgcgcctgggcacttagcccctcccgtttcagggcgccgcctccccggatggcaaacactataaagtggcggcgaataaggttcctcctgctgctctcggtttagtccaagatcagcgatatcacgcgtcccccggagcatcgcgtgcaggagccatggcgcgggagctataccacgaagagttcgcccgggcgggcaagcaggcggggctgcaggtctggaggattgagaagctggagctggtgcccgtgccccagagcgctcacggcgacttctacgtcggggatgcctacctggtgctgcacacggccaagacgagccgaggcttcacctaccgcctgcacttctggctcggaaaggagtgttcccaggatgaaagcacagctgctgccatcttcactgttcagatggatgactatttgggtggcaagccagtgcagaatagagaacttcaaggatatgagtctaatgactttgttagctatttcaaaggcggtctgaaatacaaggctggaggcgtggcatctggattaaatcatgttcttacgaacgacctgacagccaagaggctcctacatgtgaagggtcgtagagtggtgagagccacagaagttccccttagctgggacagtttcaacaagggtgactgcttcatcattgaccttggcaccgaaatttatcagtggtgtggttcctcgtgcaacaaatatgaacgtctgaaggcaaaccaggtagctactggcattcggtacaatgaaaggaaaggaaggtctgaactaattgtcgtggaagaaggaagtgaaccctcagaacttataaaggtcttaggggaaaagccagagcttccagatggaggtgatgatgatgacattatagcagacataagtaacaggaaaatggctaaactatacatggtttcagatgcaagtggctccatgagagtgactgtggtggcagaagaaaaccccttctcaatggcaatgctgctgtctgaagaatgctttattttggaccacggggctgccaaacaaattttcgtatggaaaggtaaagatgctaatccccaagagaggaaggctgcaatgaagacagctgaagaatttctacagcaaatgaattattccaagaatacccaaattcaagttcttccagaaggaggtgaaacaccaatcttcaaacagttttttaaggactggagagataaagatcagagtgatggcttcgggaaagtttatgtcacagagaaagtggctcaaataaaacaaattccctttgatgcctcaaaattacacagttctccgcagatggcagcccagcacaatatggtggatgatggttctggcaaagtggagatttggcgtgtagaaaacaatggtaggatccaagttgaccaaaactcatatggtgaattctatggtggtgactgctacatcatactctacacctatcccagaggacagattatctacacgtggcaaggagcaaatgccacacgagatgagctgacaacatctgcgttcctgactgttcagttggatcggtcccttggaggacaggctgtgcagatccgagtctcccaaggcaaagagcctgttcacctactgagtttgttcaaagacaaaccgctcattatttacaagaatggaacatcaaagaaaggaggtcaggcacctgctccccctacacgcctctttcaagtccggagaaacctggcatctatcaccagaattgtggagaggagttctggaattcccttggagggaaaaaagactaccagacctcaccactactggaaacccaggctgaagaccatccacctcggctttacggctgctctaacaaaactggaagatttgttattgaagagattccaggagagttcacccaggatgatttagctgaagatgatgtcatgttactagatgcttgggaacagatatttatttggattggcaaagatgctaatgaagttgagaaaaaagaatctctgaagtctgccaaaatgtaccttgagacagacccttctggaagagacaagaggacaccaattgtcatcataaaacagggccatgagccacccacattcacaggctggttcctgggctgggattccagcaagtggtaaattggtatttgtaaaaagcaaacaaacattacaaggcagttatctcattgctgttttgggagaggaacgggaaaagctttttgcttatttgtcttttgaaaattaaggctgggcgcggtggctcacacctgtaatcccagcactttgagaggatgaggtaggcggatcactggggtcaggatttcgagaccagcctggccaacatggcgaaacctcgcctctactaaaaatacaaaaaaattagctgcgcgtggtggtgcacgcctgtagtccctgctacttggaaggctgagacaggaaaattgcttgaacccaggaggctgaggttgcagtgagccaggattgcgccaccacactccagcctgggcaacagagactctgtctcaaaaaaaaaaaaaaaaaaaaattaacctcaaccaaacgcctattttttaatgcttagttttggcttgaaattcttcttcacctggagttttcttacgttaatacattaaaataacctgaaggaaactttcgttatgggccaatattagctcttatggaaactgatttatatcttttttatgacctttcaaaagtaaaatactatgcataatctagaaagatttgtcagataggaaattttataatgcattagccattagtcagagttgttttttaacatgccagagaaaaagttgtaatgccttggaagttattctcttttctatagattgtgttcaaaagatgtgtatacttgcaataaggtttatgttaaggtggctttaacaattggttgctattttccttctttagtcaatatgactttgatgtcattaactgctaagtgttattttctaagaggaattttatcttttttttaaccttattaaaagcctttgaaaacac

SEQ ID NO: 277036 - DNA, 3748 bp, Homo sapiens
aatgaaatgacagaattgatcattaggatgcttgttactcaaaaagcccattttttaaagaaggatgtattaaaattattccagcatgctaatgtggcacactcctctgctgcctaacggcaggtgttgctattagcagaggaagccttgttctaagaattattctagagggccagaaagaacaggtattgctccacccgagtaaacgctgactcaactctgcagggctggcgcgctctttcctcacctcacccctcctgccaggcacaactgagatccagaaataagaggattagcgagagaaggggaaatatgcaggacggtagtgatgggtatgcacaaaggagtgccaagcagttttaaccgttaatgttcttcgtctattgctagagaaaatgtctttccttggaggaggcattggcacgagttactataaactccctctgaatctcaagacttctgggacgccgattccgctcctggcctggggcaaggcgtgggagcttggaagccagcgctgcgctccccgtgggaagcgatcgtctcctctgtcaactcgcgcctgggcacttagcccctcccgtttcagggcgccgcctccccggatggcaaacactataaagtggcggcgaataaggttcctcctgctgctctcggtttagtccaagatcagcgatatcacgcgtcccccggagcatcgcgtgcaggagccatggcgcgggagctataccacgaagagttcgcccgggcgggcaagcaggcggggctgcaggtctggaggattgagaagctggagctggtgcccgtgccccagagcgctcacggcgacttctacgtcggggatgcctacctggtgctgcacacggccaagacgagccgaggcttcacctaccgcctgcacttctggctcggaaaggagtgttcccaggatgaaagcacagctgctgccatcttcactgttcagatggatgactatttgggtggcaagccagtgcagaatagagaacttcaaggatatgagtctaatgactttgttagctatttcaaaggcggtctgaaatacaaggctggaggcgtggcatctggattaaatcatgttcttacgaacgacctgacagccaagaggctcctacatgtgaagggtcgtagagtggtgagagccacagaagttccccttagctgggacagtttcaacaagggtgactgcttcatcattgaccttggcaccgaaatttatcagtggtgtggttcctcgtgcaacaaatatgaacgtctgaaggcaaaccaggtagctactggcattcggtacaatgaaaggaaaggaaggtctgaactaattgtcgtggaagaaggaagtgaaccctcagaacttataaaggtcttaggggaaaagccagagcttccagatggaggtgatgatgatgacattatagcagacataagtaacaggaaaatggctaaactatacatggtttcagatgcaagtggctccatgagagtgactgtggtggcagaagaaaaccccttctcaatggcaatgctgctgtctgaagaatgctttattttggaccacggggctgccaaacaaattttcgtatggaaaggtaaagatgctaatccccaagagaggaaggctgcaatgaagacagctgaagaatttctacagcaaatgaattattccaagaatacccaaattcaagttcttccagaaggaggtgaaacaccaatcttcaaacagttttttaaggactggagagataaagatcagagtgatggcttcgggaaagtttatgtcacagagaaagtggctcaaataaaacaaattccctttgatgcctcaaaattacacagttctccgcagatggcagcccagcacaatatggtggatgatggttctggcaaagtggagatttggcgtgtagaaaacaatggtaggatccaagttgaccaaaactcatatggtgaattctatggtggtgactgctacatcatactctacacctatcccagaggacagattatctacacgtggcaaggagcaaatgccacacgagatgagctgacaacatctgcgttcctgactgttcagttggatcggtcccttggaggacaggctgtgcagatccgagtctcccaaggcaaagagcctgttcacctactgagtttgttcaaagacaaaccgctcattatttacaagaatggaacatcaaagaaaggaggtcaggcacctgctccccctacacgcctctttcaagtccggagaaacctggcatctatcaccagaattgtggaggttgatgttgatgcaaattcactgaattctaacgatgtttttgtcctgaaactgccacaaaatagtggctacatctgggtaggaaaaggtgctagccaggaggaggagaaaggagcagagtatgtagcaagtgtcctaaagtgcaaaaccttaaggatccaagaaggcgaggagccagaggagttctggaattcccttggagggaaaaaagactaccagacctcaccactactggaaacccaggctgaagaccatccacctcggctttacggctgctctaacaaaactggaagatttgttattgaagagattccaggagagttcacccaggatgatttagctgaagatgatgtcatgttactagatgcttgggaacagatatttatttggattggcaaagatgctaatgaagttgagaaaaaagaatctctgaagtctgccaaaatgtaccttgagacagacccttctggaagagacaagaggacaccaattgtcatcataaaacagggccatgagccacccacattcacaggctggttcctgggctgggattccagcaagtggtaaattggtatttgtaaaaagcaaacaaacattacaaggcagttatctcattgctgttttgggagaggaacgggaaaagctttttgcttatttgtcttttgaaaattaaggctgggcgcggtggctcacacctgtaatcccagcactttgagaggatgaggtaggcggatcactggggtcaggatttcgagaccagcctggccaacatggcgaaacctcgcctctactaaaaatacaaaaaaattagctgcgcgtggtggtgcacgcctgtagtccctgctacttggaaggctgagacaggaaaattgcttgaacccaggaggctgaggttgcagtgagccaggattgcgccaccacactccagcctgggcaacagagactctgtctcaaaaaaaaaaaaaaaaaaaaattaacctcaaccaaacgcctattttttaatgcttagttttggcttgaaattcttcttcacctggagttttcttacgttaatacattaaaataacctgaaggaaactttcgttatgggccaatattagctcttatggaaactgatttatatcttttttatgacctttcaaaagtaaaatactatgcataatctagaaagatttgtcagataggaaattttataatgcattagccattagtcagagttgttttttaacatgccagagaaaaagttgtaatgccttggaagttattctcttttctatagattgtgttcaaaagatgtgtatacttgcaataaggtttatgttaaggtggctttaacaattggttgctattttccttctttagtcaatatgactttgatgtcattaactgctaagtgttattttctaagaggaattttatcttttttttaaccttattaaaagcctttgaaaacac

SEQ ID NO: 277037 - DNA, 3595 bp, Homo sapiens
  misc_feature (3143)..(3143): n is a, c, g, or t
aatgaaatgacagaattgatcattaggatgcttgttactcaaaaagcccattttttaaagaaggatgtattaaaattattccagcatgctaatgtggcacactcctctgctgcctaacggcaggtgttgctattagcagaggaagccttgttctaagaattattctagagggccagaaagaacaggtattgctccacccgagtaaacgctgactcaactctgcagggctggcgcgctctttcctcacctcacccctcctgccaggcacaactgagatccagaaataagaggattagcgagagaaggggaaatatgcaggacggtagtgatgggtatgcacaaaggagtgccaagcagttttaaccgttaatgttcttcgtctattgctagagaaaatgtctttccttggaggaggcattggcacgagttactataaactccctctgaatctcaagacttctgggacgccgattccgctcctggcctggggcaaggcgtgggagcttggaagccagcgctgcgctccccgtgggaagcgatcgtctcctctgtcaactcgcgcctgggcacttagcccctcccgtttcagggcgccgcctccccggatggcaaacactataaagtggcggcgaataaggttcctcctgctgctctcggtttagtccaagatcagcgatatcacgcgtcccccggagcatcgcgtgcaggagccatggcgcgggagctataccacgaagagttcgcccgggcgggcaagcaggcggggctgcaggtctggaggattgagaagctggagctggtgcccgtgccccagagcgctcacggcgacttctacgtcggggatgcctacctggtgctgcacacggccaagacgagccgaggcttcacctaccgcctgcacttctggctcggaaaggagtgttcccaggatgaaagcacagctgctgccatcttcactgttcagatggatgactatttgggtggcaagccagtgcagaatagagaacttcaaggatatgagtctaatgactttgttagctatttcaaaggcggtctgaaatacaaggctggaggcgtggcatctggattaaatcatgttcttacgaacgacctgacagccaagaggctcctacatgtgaagggtcgtagagtggtgagagccacagaagttccccttagctgggacagtttcaacaagggtgactgcttcatcattgaccttggcaccgaaatttatcagtggtgtggttcctcgtgcaacaaatatgaacgtctgaaggcaaaccaggtagctactggcattcggtacaatgaaaggaaaggaaggtctgaactaattgtcgtggaagaaggaagtgaaccctcagaacttataaaggtcttaggggaaaagccagagcttccagatggaggtgatgatgatgacattatagcagacataagtaacaggaaaatggctaaactatacatggtttcagatgcaagtggctccatgagagtgactgtggtggcagaagaaaaccccttctcaatggcaatgctgctgtctgaagaatgctttattttggaccacggggctgccaaacaaattttcgtatggaaaggtaaagatgctaatccccaagagaggaaggctgcaatgaagacagctgaagaatttctacagcaaatgaattattccaagaatacccaaattcaagttcttccagaaggaggtgaaacaccaatcttcaaacagttttttaaggactggagagataaagatcagagtgatggcttcgggaaagtttatgtcacagagaaagtggctcaaataaaacaaattccctttgatgcctcaaaattacacagttctccgcagatggcagcccagcacaatatggtggatgatggttctggcaaagtggagatttggcgtgtagaaaacaatggtaggatccaagttgaccaaaactcatatggtgaattctatggtggtgactgctacatcatactctacacctatcccagaggacagattatctacacgtggcaaggagcaaatgccacacgagatgagctgacaacatctgcgttcctgactgttcagttggatcggtcccttggaggacaggctgtgcagatccgagtctcccaaggcaaagagcctgttcacctactgagtttgttcaaagacaaaccgctcattatttacaagaatggaacatcaaagaaaggaggtcaggcacctgctccccctacacgcctctttcaagtccggagaaacctggcatctatcaccagaattgtggaggttgatgttgatgcaaattcactgaattctaacgatgtttttgtcctgaaactgccacaaaatagtggctacatctgggtaggaaaaggtgctagccaggaggaggagaaaggagcagagtatgtagcaagtgtcctaaagtgcaaaaccttaaggatccaagaaggcgaggagccagaggagttctggaattcccttggagggaaaaaagactaccagacctcaccactactggaaacccaggctgaagaccatccacctcggctttacggctgctctaacaaaactggaagatttgttattgaagagattccaggagagttcacccaggatgatttagctgaagatgatgtcatgttactagatgcttgggaacagatatttatttggattggcaaagatgctaatgaagttgagaaaaaagaatctctgaagtctgccaaaatgtaccttgagacagacccttctggaagagacaagaggacaccaattgtcatcataaaacagggccatgagccacccacattcacaggctggttcctgggctgggattccagcaagtggtaaattggtatttgtaaaaagcaaacaaacattacaaggcagttatctcattgctgttttgggagaggaacgggaaaagctttttgcttatttgtcttttgaaaattaaggctgggcgcggtggctcacacctgtaatcccagcactttgagaggatgaggtaggcggatcactggggtcaggatttcgagaccagcctggccaacatggcgaaacctcgcctctactaaaaatacaaaaaaattagctgcgcgtggtggtgcacgcctgtagtccctgctaccanaaaaaaaaaaaaaaaaaaaaaaaaaaattttttggggcgcccgggcccagaaaaaatttttaaaccctttgttggggggcggggccccttttgtttttgaacggggcaaaggtggcccaagggaactccgcgggcatattggggtgtggtttctccaccaaataaaaaaagcgccggggcaaaggggggtgtttgggaccaaacccggaaggagcttcgcgggccactacagggatcaaacacgggagtgcccaggggcggaataaatagccccgccggtcagaggaacacaaagaagacagcgaaacagtacagcgggacaagaggaccagcagacagcacttgcacaagagaccagaggacacaacacaagacaaagcagcacgacgagcacagaaccaaacacgtagaagaacaagagaagaagaggacaacgacaaaagagcggagaa

SEQ ID NO: 277038 - DNA, 2554 bp, Homo sapiens
ttcgtccagcagcatcttgtactagtcctgactggaaatttatcagtggtgtggttcctcgtgcaacaaatatgaacgtctgaaggcaaaccaggtagctactggcattcggtacaatgaaaggaaaggaaggtctgaactaattgtcgtggaagaaggaagtgaaccctcagaacttataaaggtcttaggggaaaagccagagcttccagatggaggtgatgatgatgacattatagcagacataagtaacaggaaaatggctaaactatacatggtttcagatgcaagtggctccatgagagtgactgtggtggcagaagaaaaccccttctcaatggcaatgctgctgtctgaagaatgctttattttggaccacggggctgccaaacaaattttcgtatggaaaggtaaagatgctaatccccaagagaggaaggctgcaatgaagacagctgaagaatttctacagcaaatgaattattccaagaatacccaaattcaagttcttccagaaggaggtgaaacaccaatcttcaaacagttttttaaggactggagagataaagatcagagtgatggcttcgggaaagtttatgtcacagagaaagtggctcaaataaaacaaattccctttgatgcctcaaaattacacagttctccgcagatggcagcccagcacaatatggtggatgatggttctggcaaagtggagatttggcgtgtagaaaacaatggtaggatccaagttgaccaaaactcatatggtgaattctatggtggtgactgctacatcatactctacacctatcccagaggacagattatctacacgtggcaaggagcaaatgccacacgagatgagctgacaacatctgcgttcctgactgttcagttggatcggtcccttggaggacaggctgtgcagatccgagtctcccaaggcaaagagcctgttcacctactgagtttgttcaaagacaaaccgctcattatttacaagaatggaacatcaaagaaaggaggtcaggcacctgctccccctacacgcctctttcaagtccggagaaacctggcatctatcaccagaattgtggaggttgatgttgatgcaaattcactgaattctaacgatgtttttgtcctgaaactgccacaaaatagtggctacatctgggtaggaaaaggtgctagccaggaggaggagaaaggagcagagtatgtagcaagtgtcctaaagtgcaaaaccttaaggatccaagaaggcgaggagccagaggagttctggaattcccttggagggaaaaaagactaccagacctcaccactactggaaacccaggctgaagaccatccacctcggctttacggctgctctaacaaaactggaagatttgttattgaagagattccaggagagttcacccaggatgatttagctgaagatgatgtcatgttactagatgcttgggaacagatatttatttggattggcaaagatgctaatgaagttgagaaaaaagaatctctgaagtctgccaaaatgtaccttgagacagacccttctggaagagacaagaggacaccaattgtcatcataaaacagggccatgagccacccacattcacaggctggttcctgggctgggattccagcaagtggtaaattggtatttgtaaaaagcaaacaaacattacaaggcagttatctcattgctgttttgggagaggaacgggaaaagctttttgcttatttgtcttttgaaaattaaggctgggcgcggtggctcacacctgtaatcccagcactttgagaggatgaggtaggcggatcactggggtcaggatttcgagaccagcctggccaacatggcgaaacctcgcctctactaaaaatacaaaaaaattagctgcgcgtggtggtgcacgcctgtagtccctgctacttggaaggctgagacaggaaaattgcttgaacccaggaggctgaggttgcagtgagccaggattgcgccaccacactccagcctgggcaacagagactctgtctcaaaaaaaaaaaaaaaaaaaaattaacctcaaccaaacgcctattttttaatgcttagttttggcttgaaattcttcttcacctggagttttcttacgttaatacattaaaataacctgaaggaaactttcgttatgggccaatattagctcttatggaaactgatttatatcttttttatgacctttcaaaagtaaaatactatgcataatctagaaagatttgtcagataggaaattttataatgcattagccattagtcagagttgttttttaacatgccagagaaaaagttgtaatgccttggaagttattctcttttctatagattgtgttcaaaagatgtgtatacttgcaataaggtttatgttaaggtggctttaacaattggttgctattttccttctttagtcaatatgactttgatgtcattaactgctaagtgttattttctaagaggaattttatcttttttttaaccttattaaaagcctttgaaaacac

SEQ ID NO: 277039 - DNA, 2217 bp, Homo sapiens
aatgaaatgacagaattgatcattaggatgcttgttactcaaaaagcccattttttaaagaaggatgtattaaaattattccagcatgctaatgtggcacactcctctgctgcctaacggcaggtgttgctattagcagaggaagccttgttctaagaattattctagagggccagaaagaacaggtattgctccacccgagtaaacgctgactcaactctgcagggctggcgcgctctttcctcacctcacccctcctgccaggcacaactgagatccagaaataagaggattagcgagagaaggggaaatatgcaggacggtagtgatgggtatgcacaaaggagtgccaagcagttttaaccgttaatgttcttcgtctattgctagagaaaatgtctttccttggaggaggcattggcacgagttactataaactccctctgaatctcaagacttctgggacgccgattccgctcctggcctggggcaaggcgtgggagcttggaagccagcgctgcgctccccgtgggaagcgatcgtctcctctgtcaactcgcgcctgggcacttagcccctcccgtttcagggcgccgcctccccggatggcaaacactataaagtggcggcgaataaggttcctcctgctgctctcggtttagtccaagatcagcgatatcacgcgtcccccggagcatcgcgtgcaggagccatggcgcgggagctataccacgaagagttcgcccgggcgggcaagcaggcggggctgcaggtctggaggattgagaagctggagctggtgcccgtgccccagagcgctcacggcgacttctacgtcggggatgcctacctggtgctgcacacggccaagacgagccgaggcttcacctaccgcctgcacttctggctcggaaaggagtgttcccaggatgaaagcacagctgctgccatcttcactgttcagatggatgactatttgggtggcaagccagtgcagaatagagaacttcaaggatatgagtctaatgactttgttagctatttcaaaggcggtctgaaatacaaggctggaggcgtggcatctggattaaatcatgttcttacgaacgacctgacagccaagaggctcctacatgtgaagggtcgtagagtggtgagagccacagaagttccccttagctgggacagtttcaacaagggtgactgcttcatcattgaccttggcaccgaaatttatcagtggtgtggttcctcgtgcaacaaatatgaacgtctgaaggcaaaccaggtagctactggcattcggtacaatgaaaggaaaggaaggtctgaactaattgtcgtggaagaaggaagtgaaccctcagaacttataaaggtcttaggggaaaagccagagcttccagatggaggtgatgatgatgacattatagcagacataagtaacaggaaaatggctaaactatacatggtttcagatgcaagtggctccatgagagtgactgtggtggcagaagaaaaccccttctcaatggcaatgctgctgtctgaagaatgctttattttggaccacggggctgccaaacaaattttcgtatggaaaggtaaagatgctaatccccaagagaggaaggctgcaatgaagacagctgaagaatttctacagcaaatgaattattccaagaatacccaagtatgtgtgaaactgaactggctagaaaaaaatagaaaacattggagctcatgacatctccacgaaactcatgaaaaagtttgggtcaaagtaacgtctgtatgtgaagtgattctccacctgcctgtctgctgcaatctggtgtccctcttctttatctgcgtgggggttagaattttttagaaactgcacatcagactttccatagagctgcccattcacttcctccacagcctttaattcaagatagtaaaccacagtaggtttagctaagagcacttaagagttattattccttagagcaagttgtgcagacttggcctgaaacccagatgatatttgtcttcatcgaaatcaatttagaccctggctagttactcctttcctttccgaatctctcagcctcatctactctcctcatttttatgtccctgcacaaggaacacaatgagatcatttcttccaggtcacagagctcttgtgaaccttatgtagaaagacaaacttattttactgcaggggta

SEQ ID NO: 277040 - DNA, 2278 bp, Homo sapiens
  misc_feature (1)..(1): n is a, c, g, or t
  misc_feature (671)..(671): n is a, c, g, or t
nggcacgagggacaggccttaccaagattagcggtgtcaattaaggccaaacgggtgccctctggtgcagtgcctggcccgcagtaagcgtgctctccaacaagctccctccagccctggtggtgagcatgacagcagcatgctctgaacctcatggagagtcccagcacgccttctccccatcccaaattatttctaacacaggtacgccagtgaggtgtgtgtttgctgcctgggtgacatgagctaccatcgtctacaagtctttgtttggtccttatgggaacaatgcattctgtggccatagtagggaatggaaagggcaaggtcattaaaggaaaatcagcatcccatgtgctagcccactctacaactcaaatgaattcagaacctcacagctgggccagaacaccccacgaccagtgcttcccattcagggtagagcatgggagagaaggagagccccgaagccagcctggggcacatgatgccactattagaagggtgtccaacagcactgatatttcttatctctcgcccctttgtctagggccttgcaccctgtggcaggaatcctggtaaaacatggcctttcttggtcaagttggaggggaccagttgtgaaagaaaaaaggaagagagtgtaggtgtgtgcccaggcaggtgcctcntgggaaagctgcctggacagtgagctctgcacgtgagtctcacccaagctgctgtgccaagtccccaggaagtgggcacaccaaagccacctgaggtcatggggttagcacctgccccagggcagcctccctccagcattcctgcagctctctggactttggcatcctcttttgacctctgaacacttccctttctttttaactttgtcatgtgcagccatctacatttctgaaatatagccagcattttaaacattacagagggagacagttttctgagttctctagacagccatgttgccagagatgatagtgatgggtagttttataaaaggttttgaatcactgctcattggagagggcatgaagaagccaaaagtggacaaggttgaatcctgaagcagcaaacgttagaaagagtcatatctatggaggcttcaggtatcagggatgattgtggtccaggcattgggtcaaggcaagtcccacatcagatggggaaattgaggctatagccctgtacccactcagactcctgagtaccccaggtcggggggatctgaggcagtggctggagccagcagcctgccctccagctagactgcatttctgctctttcctctgcccttccctcttttagttttccgctcttctttctctttttccattctcatcttcttctctgtcacatctcagacctgcccaaggagggctggtagcatctgaagcacttggggttgcaaaggacctgccatgtgtgaggggttgccacaggcccctactccaccacatcaagggctttgctgtccgcgaggatgttctgagacatggggctcaccctgcctcccttgggtcacaccttttggtgcatgtccatgacttatttggtgctcagttcgtggtcaggaatgcagcctcacagtgacacatcgttcttgtggaacaacatgatctgatctgtgattcagtttccaggagttcctggaaaaaaaagaaaaacagggactgcgtggaactcttcttctggactccaccaggggccctgagagcacagttttgacacaggtgcagtaagttcttagcaactgaagcccttacaaagtagcaaagcattccatgctgggaaacttcattttaaaaacatcttgtttgagaaacgagttaggagtgttcccaacttggcttccagctaatgtaaacactgaaaacaaattaatcatttggagaaagagaacaaggagtttaatgttttgaagtgtgggagccaacatttccagatggactcttcatgtgttggggtcagaaaggaaagaggaccagcctgggcattggaggatctgggtagccctgggctccgctactggccagctgaatggcctggggcaaaggaccactgcctctgtttcttcacctgcaataagaggagtgaggaacgccctctgaagtcccttccaccccagtgagccagcactcttggcctcagcgtcccttcccctcctgtaagctctgcctctggagcttacattgcctagtgtgcacttgggagagtgagcaaagtatctgggtatattttctcttttcatctattctgcagacaagccaaaaaa

SEQ ID NO: 277041 - DNA, 2408 bp, Homo sapiens
gagaagtaagtgggcgtttcaaggcgtgcttgccccaggtggtgcagctctcagaccctcccacttgtttacttcgtggcgagagggcgaacactgcgcctgcgcactctccgtagccggatccaccttcagcgtctgcgccacgtgactccgatccaccctcgaggttccagtggaataacccccttctgaaaaatggtttcacccgctccttctctagaacgggtcgggccgctaccactgtccggcccggaggggaactgttttctccggaagtgacaacacgctgactaggaaaaggaggaggcggggcagtggggccttcggcggcgactatggaaggagccggctacagggtggtgtttgagaagggcggagtgtacctgcacaccagcgctaagaagtatcaggaccgagactctctcatcgctggtgtcatccgtgtcgtggaaaaggacaatgacgtcctcctgcactgggctcctgtagaggaggctggagattccacccaaatcctcttctccaagaaggactccagtgggggtgactcatgtgcttctgaggaggaaccaacctttgaccccggctatgaacctgactgggctgtcatcagcactgtgcggccacagccctgccactcagagcccacgagaggtgcagagcccagctgcccccagggctcctgggccttctcagtgagtctgggggagctaaagtccatccgccgctccaagccaggcctcagctgggcctacctggttctggtgacccaggctggaggttccctgcccgcactgcacttccaccgcgggggcacccgcgccctgctccgcgtcctcagccgctacctgctgttggccagctccccgcaggactcccgcctctaccttgtcttcccccacgactcctctgctctctccaactccttccaccacctgcagctctttgaccaggacagctccaatgtggtgtcacgcttcctccaggatccctactccaccaccttcagcagcttctcccgagtgaccaacttcttccggggtgccctgcagccacagcctgagggagccgcctccgaccttcccccgccacccgacgatgagcccgagcctggattcgaggtcatttcctgtgtggagctggggcctcggccaaccgtggagcggggccctccagttacagaggaggagtgggcacgccacgtgggccctgaaggtcgcctgcagcaggtccctgagctgaagaaccggatcttctcggggggtctgagccccagcctgcggcgcgaggcctggaagttcctcctagggtacctcagctgggaaggcacagctgaggagcacaaggcccacatacgcaagaaaacggatgagtatttccgcatgaagctgcagtggaaatctgtgagccctgagcaggagcggagaaactcacttctgcatggataccgcagcctcatcgaaagggatgtgagccgcactgacaggaccaacaagttctacgagggtcccgagaacccggggctgggcctgctgaacgatatcctcctcacctactgcatgtatcacttcgacctcggctacgtccagggcatgagtgatcttctctccccgatcctctacgtcattcagaacgaggtggatgctttctggtgtttctgtggcttcatggagctcgtgcaagggaactttgaagagagccaggagaccatgaagcggcaactcgggcgactgctgctgctcctgagggtgctggaccccctgctctgcgacttcctggattcccaggactccggctctctctgcttctgtttccggtggctgctcatctggttcaagagggaattccccttcccggatgtccttcggctgtgggaggtgctgtggacagggctccctggccccaatctgcacctgctggtggcctgcgccatcctggacatggagagggacaccctcatgctgtccggcttcggctccaatgagatcctcaagcacatcaacgagctgactatgaagctgagcgtggaggacgtgctgacccgcgccgaggccctgcaccgccagctaaccgcctgccccgagctgccccacaacgtgcaggagatcctggggctggccccgcccgcagagccccacagcccctcgcccaccgcctccccgctgcctctgtcgcccacccgggccccgcccaccccgccgccctccacggacacagccccgcagcccgacagcagcctggagatcctgcccgaggaggaggacgagggcgccgactcctaaccccgccaggcagcctcgttctgcacaggcactttagcccgagccaggcacacctgcgagggggcaggtgtgctccgccgccctgctgataagctggcttcattaaactgacacttctcatgtgca

SEQ ID NO: 277042 - DNA, 468 bp, Homo sapiens
gagaagtaagtgggcgtttcaaggcgtgcttgccccaggtggtgcagctctcagaccctcccacttgtttacttcgtggcgagagggcgaacactgcgcctgcgcactctccgtagccggatccaccttcagcgtctgcgccacgtgactccgatccaccctcgaggttccagtggaataacccccttctgaaaaatggtttcacccgctccttctctagaacgggtcgggccgctaccactgtccggcccggaggggaactgttttctccggaagtgacaacacgctgactaggaaaaggaggaggcggggcagtggggccttcggcggcgactatggaaggagccggctacagggtaagcactgaggacgcattccctcgcttcagtgtatgcgaaacgccccgtctagtgatcagctcttctctcaggccttggctctcgagaatccggcacggccttggcaaac

SEQ ID NO: 277043 - DNA, 461 bp, Homo sapiens
cggtgatctagccgatccttaactgggtcgagtcctgacgggaaatggcatttcctctggtgccagaggacagggcctgacagcctactcacccacttcgtcactgctcccggctttcccttcgttatgtctcctgggacttcccatggctggaccccgtcctgggcaattctgagacccagagataagtcagatccagacccacctaagccctgacccttactcactttttgagaaactgatagatgaggtcgaaaacgctaggaagtgttggaactttttgcacccagacagtctgattccagatccccaacgcttcctgggagagcagacatttgagctgggactcccaggatatgaaaggacaagaaggtatttcagggacagcagaacaaccttcaaggcacacggagaagttggatgcctctgtaggggggttctttagtggggaatgagacctc

SEQ ID NO: 277044 - DNA, 519 bp, Homo sapiens
tgccaggttgaggaatagggcccttaccctgcaggtcgaggggtgcctaggaaggttctggaaaggtacatgtccactgggcccccttcccatcttactcatttgtgcttccaaggaatgtgaggccaggggcagaggggtggcttgtggcggggccctcaggagatgcctgtgccgaaggaacatcctgggttgtggttgataaggctgactctggcttcccacgcgcttcccccaacacagtgccgtctccctaggtgcagagcccagctgcccccagggctcctgggccttctcagtgagtctgggggagctaaagtccatccgccgctccaagccaggcctcagctgggcctacctggttctggtgacccaggctggaggttccctgcccgcactgcacttccaccgcgggggcacccgcgccctgctccgcgtcctcagccgctacctgctgttggccaggtgagctctctcccagtgctgggccttaaaccgggcccagtcccaccatggctg

SEQ ID NO: 277045 - DNA, 2980 bp, Homo sapiens
gagaagtaagtgggcgtttcaaggcgtgcttgccccaggtggtgcagctctcagaccctcccacttgtttacttcgtggcgagagggcgaacactgcgcctgcgcactctccgtagccggatccaccttcagcgtctgcgccacgtgactccgatccaccctcgaggttccagtggaataacccccttctgaaaaatggtttcacccgctccttctctagaacgggtcgggccgctaccactgtccggcccggaggggaactgttttctccggaagtgacaacacgctgactaggaaaaggaggaggcggggcagtggggccttcggcggcgactatggaaggagccggctacagggtggtgtttgagaagggcggagtgtacctgcacaccagcgctaagaagtatcaggaccgagactctctcatcgctggtgtcatccgtgtcgtggaaaaggacaatgacgtcctcctgcactgggctcctgtagaggaggctggagattccacccaaatcctcttctccaagaaggactccagtgggggtgactcatgtgcttctgaggaggaaccaacctttgaccccggctatgaacctgactgggctgtcatcagcactgtgcggccacagccctgccactcagagcccacgagaggtgcagagcccagctgcccccagggctcctgggccttctcagtgagtctgggggagctaaagtccatccgccgctccaagccaggcctcagctgggcctacctggttctggtgacccaggctggaggttccctgcccgcactgcacttccaccgcgggggcacccgcgccctgctccgcgtcctcagccgctacctgctgttggccagctccccgcaggactcccgcctctaccttgtcttcccccacgactcctctgctctctccaactccttccaccacctgcagctctttgaccaggacagctccaatgtggtgtcacgcttcctccaggatccctactccaccaccttcagcagcttctcccgagtgaccaacttcttccggggtgccctgcagccacagcctgagggagccgcctccgaccttcccccgccacccgacgatgagcccgagcctggattcgaggtcatttcctgtgtggagctggggcctcggccaaccgtggagcggggccctccagttacagaggaggagtgggcacgccacgtgggccctgaaggtcgcctgcagcaggtccctgagctgaagaaccggatcttctcggggggtctgagccccagcctgcggcgcgaggcctggaagttcctcctagggtacctcagctgggaaggcacagctgaggagcacaaggcccacatacgcaagaaaacggatgagtatttccgcatgaagctgcagtggaaatctgtgagccctgagcaggagcggagaaactcacttctgcatggataccgcagcctcatcgaaagggatgtgagccgcactgacaggaccaacaagttctacgagggtcccgagaacccggggctgggcctgctgaacgatatcctcctcacctactgcatgtatcacttcgacctcggctacgtccagggcatgagtgatcttctctccccgatcctctacgtcattcagaacgaggtggatgctttctggtgtttctgtggcttcatggagctcgtgcaagggaactttgaagagagccaggagaccatgaagcggcaactcgggcgactgctgctgctcctgagggtgctggaccccctgctctgcgacttcctggattcccaggactccggctctctctgcttctgtttccggtggctgctcatctggttcaagagggaattccccttcccggatgtccttcggctgtgggaggtgctgtggacagggctccctggccccaatctgcacctgctggtggcctgcgccatcctggacatggagagggacaccctcatgctgtccggcttcggctccaatgagatcctcaagcacatcaacgagctgactatgaagctgagcgtggaggacgtgctgacccgcgccgaggccctgcaccgccagctaaccgcctgccccgagctgccccacaacgtgcaggagatcctggggctggccccgcccgcagagccccacagcccctcgcccaccgcctccccgctgcctctgtcgcccacccgggccccgcccaccccgccgccctccacggacacagccccgcagcccgacagcagcctggagatcctgcccgaggaggaggacgagggcgccgactcctaaccccgccaggcagcctcgttctgcacaggcactttagcccgagccaggcacacctgcgagggggcaggtgtgctccgccgccctgctgataagctggcttcattaaactgacacttctcatgtgcaaaaaaaaaaaaaaaaaacaaaaaaaaaaaaaaacaaaagagggggcgcgcgccgctctctctgaagattattcccctcgcggaggggccccagagtttagacgcgcgtaccccggttttctctggctaccaaggtgggccccctaatgagggggaggcgcgttatttataaagctctaaggcatgtggggccgttcctgtttacaaccaagcgttccgagtgaaccgtgggaaccaaacgtgctctcacccgtgggggcatccttcggcgggaagaggaaaacccccttaatcttccgagggggggtgggagcacccataatgtggggcacacaacatcttacccttaccaggagaattttaaagggcccctcatagagggtaaacttattaacacattcttcaagacggggtctattactgtcgtgcttcaacaaccctagcccgtggacatatatttgccgtgcgccgagccatatgagagaatttgggccttctaccgcgagattatgtgaatttaatgcgaaacactttttttactaccccggggaccaatggtatgcaataaacaca

SEQ ID NO: 277046 - DNA, 2080 bp, Homo sapiens
cagccctcgctggttccccccaactcaggtggtgtttgagaagggcggagtgtacctgcacaccagcgctaagaagtatcaggaccgagactctctcatcgctggtgtcatccgtgtcgtggaaaaggacaatgacgtcctcctgcactgggctcctgtagaggaggctggagattccacccaaatcctcttctccaagaaggactccagtgggggtgactcatgtgcttctgaggaggaaccaacctttgaccccggctatgaacctgactgggctgtcatcagcactgtgcggccacagccctgccactcagagcccacgagaggtgcagagcccagctgcccccagggctcctgggccttctcagtgagtctgggggagctaaagtccatccgccgctccaagccaggcctcagctgggcctacctggttctggtgacccaggctggaggttccctgcccgcactgcacttccaccgcgggggcacccgcgccctgctccgcgtcctcagccgctacctgctgttggccagctccccgcaggactcccgcctctaccttgtcttcccccacgactcctctgctctctccaactccttccaccacctgcagctctttgaccaggacagctccaatgtggtgtcacgcttcctccaggatccctactccaccaccttcagcagcttctcccgagtgaccaacttcttccggggtgccctgcagccacagcctgagggagccgcctccgaccttcccccgccacccgacgatgagcccgagcctggattcgaggtcatttcctgtgtggagctggggcctcggccaaccgtggagcggggccctccagttacagaggaggagtgggcacgccacgtgggccctgaaggtcgcctgcagcaggtccctgagctgaagaaccggatcttctcggggggtctgagccccagcctgcggcgcgaggcctggaagttcctcctagggtacctcagctgggaaggcacagctgaggagcacaaggcccacatacgcaagaaaacggatgagtatttccgcatgaagctgcagtggaaatctgtgagccctgagcaggagcggagaaactcacttctgcatggataccgcagcctcatcgaaagggatgtgagccgcactgacaggaccaacaagttctacgagggtcccgagaacccggggctgggcctgctgaacgatatcctcctcacctactgcatgtatcacttcgacctcggctacgtccagggcatgagtgatcttctctccccgatcctctacgtcattcagaacgaggtggatgctttctggtgtttctgtggcttcatggagctcgtgcaagggaactttgaagagagccaggagaccatgaagcggcaactcgggcgactgctgctgctcctgagggtgctggaccccctgctctgcgacttcctggattcccaggactccggctctctctgcttctgtttccggtggctgctcatctggttcaagagggaattccccttcccggatgtccttcggctgtgggaggtgctgtggacagggctccctggccccaatctgcacctgctggtggcctgcgccatcctggacatggagagggacaccctcatgctgtccggcttcggctccaatgagatcctcaagcacatcaacgagctgactatgaagctgagcgtggaggacgtgctgacccgcgccgaggccctgcaccgccagctaaccgcctgccccgagctgccccacaacgtgcaggagatcctggggctggccccgcccgcagagccccacagcccctcgcccaccgcctccccgctgcctctgtcgcccacccgggccccgcccaccccgccgccctccacggacacagccccgcagcccgacagcagcctggagatcctgcccgaggaggaggacgagggcgccgactcctaaccccgccaggcagcctcgttctgcacaggcactttagcccgagccaggcacacctgcgagggggcaggtgtgctccgccgccctgctgataagctggcttcattaaactgacacttctcatgtgca

SEQ ID NO: 277047 - DNA, 2104 bp, Homo sapiens
  misc_feature (26)..(26): n is a, c, g, or t
tactactactaaattcgcggccgcgncgactatggaaggagccggctacagggtggtgtttgagaagggcggagtgtacctgcacaccagcgctaagaagtatcaggaccgagactctctcatcgctggtgtcatccgtgtcgtggaaaaggacaatgacgtcctcctgcactgggctcctgtagaggaggctggagattccacccaaatcctcttctccaagaaggactccagtgggggtgactcatgtgcttctgaggaggaaccaacctttgaccccggctatgaacctgactgggctgtcatcagcactgtgcggccacagccctgccactcagagcccacgagaggtgcagagcccagctgcccccagggctcctgggccttctcagtgagtctgggggagctaaagtccatccgccgctccaagccaggcctcagctgggcctacctggttctggtgacccaggctggaggttccctgcccgcactgcacttccaccgcgggggcacccgcgccctgctccgcgtcctcagccgctacctgctgttggccagctccccgcaggactcccgcctctaccttgtcttcccccacgactcctctgctctctccaactccttccaccacctgcagctctttgaccaggacagctccaatgtggtgtcacgcttcctccaggatccctactccaccaccttcagcagcttctcccgagtgaccaacttcttccggggtgccctgcagccacagcctgagggagccgcctccgaccttcccccgccacccgacgatgagcccgagcctggattcgaggtcatttcctgtgtggagctggggcctcggccaaccgtggagcggggccctccagttacagaggaggagtgggcacgccacgtgggccctgaaggtcgcctgcagcaggtccctgagctgaagaaccggatcttctcggggggtctgagccccagcctgcggcgcgaggcctggaagttcctcctagggtacctcagctgggaaggcacagctgaggagcacaaggcccacatacgcaagaaaacggatgagtatttccgcatgaagctgcagtggaaatctgtgagccctgagcaggagcggagaaactcacttctgcatggataccgcagcctcatcgaaagggatgtgagccgcactgacaggaccaacaagttctacgagggtcccgagaacccggggctgggcctgctgaacgatatcctcctcacctactgcatgtatcacttcgacctcggctacgtccagggcatgagtgatcttctctccccgatcctctacgtcattcagaacgaggtggatgctttctggtgtttctgtggcttcatggagctcgtgcaagggaactttgaagagagccaggagaccatgaagcggcaactcgggcgactgctgctgctcctgagggtgctggaccccctgctctgcgacttcctggattcccaggactccggctctctctgcttctgtttccggtggctgctcatctggttcaagagggaattccccttcccggatgtccttcggctgtgggaggtgctgtggacagggctccctggccccaatctgcacctgctggtggcctgcgccatcctggacatggagagggacaccctcatgctgtccggcttcggctccaatgagatcctcaagcacatcaacgagctgactatgaagctgagcgtggaggacgtgctgacccgcgccgaggccctgcaccgccagctaaccgcctgccccgagctgccccacaacgtgcaggagatcctggggctggccccgcccgcagagccccacagcccctcgcccaccgcctccccgctgcctctgtcgcccacccgggccccgcccaccccgccgccctccacggacacagccccgcagcccgacagcagcctggagatcctgcccgaggaggaggacgagggcgccgactcctaaccccgccaggcagcctcgttctgcacaggcactttagcccgagccaggcacacctgcgagggggcaggtgtgctccgccgccctgctgataagctggcttcattaaactgacacttctcatgtgca

SEQ ID NO: 277048 - DNA, 1997 bp, Homo sapiens
gagaagtaagtgggcgtttcaaggcgtgcttgccccaggtggtgcagctctcagaccctcccacttgtttacttcgtggcgagagggcgaacactgcgcctgcgcactctccgtagccggatccaccttcagcgtctgcgccacgtgactccgatccaccctcgaggttccagtggaataacccccttctgaaaaatggtttcacccgctccttctctagaacgggtcgggccgctaccactgtccggcccggaggggaactgttttctccggaagtgacaacacgctgactaggaaaaggaggaggcggggcagtggggccttcggcggcgactatggaaggagccggctacagggtggtgtttgagaagggcggagtgtacctgcacaccagcgctaagaagtatcaggaccgagactctctcatcgctggtgtcatccgtgtcgtggaaaaggacaatgacgtcctcctgcactgggctcctgtagaggaggctggagattccacccaaatcctcttctccaagaaggactccagtgggggtgactcatgtgcttctgaggaggaaccaacctttgaccccggctatgaacctgactgggctgtcatcagcactgtgcggccacagccctgccactcagagcccacgagaggtgcagagcccagctgcccccagggctcctgggccttctcagtgagtctgggggagctaaagtccatccgccgctccaagccaggcctcagctgggcctacctggttctggtgacccaggctggaggttccctgcccgcactgcacttccaccgcgggggcacccgcgccctgctccgcgtcctcagccgctacctgctgttggccagctccccgcaggactcccgcctctaccttgtcttcccccacgactcctctgctctctccaactccttccaccacctgcagctctttgaccaggacagctccaatgtggtgtcacgcttcctccaggatccctactccaccaccttcagcagcttctcccgagtgaccaacttcttccggggtgccctgcagccacagcctgagggagccgcctccgaccttcccccgccacccgacgatgagcccgagcctggattcgaggtcatttcctgtgtggagctggggcctcggccaaccgtggagcggggccctccagttacagaggaggagtgggcacgccacgtgggccctgaaggtcgcctgcagcaggtccctgagctgaagaaccggatcttctcggggggtctgagccccagcctgcggcgcgaggcctggaagttcctcctagggtacctcagctgggaaggcacagctgaggagcacaaggcccacatacgcaagaaaacggatgagtatttccgcatgaagctgcagtggaaatctgtgagccctgagcaggagcggagaaactcacttctgcatggataccgcagcctcatcgaaagggatgtgagccgcactgacaggaccaacaagttctacgagggtcccgagaacccggggctgggcctgctgaacgatatcctcctcacctactgcatgtatcacttcgacctcggctacgtccagggcatgagtgatcttctctccccgatcctctacgtcattcagaacgaggtggatgctttctggtgtttctgtggcttcatggagctcgtgcaagggaactttgaagagagccaggagaccatgaagcggcaactcgggcgactgctgctgctcctgagggtgctggaccccctgctctgcgacttcctggattcccaggactccggctctctctgcttctgtttccggtggctgctcatctggttcaagagggaattccccttcccggatgtccttcggctgtgggaggtgggccagccagtttgggcgagaggcctgaaggggtgggctcacctgccctgggaggttgggcggagagggacagaccctggtgggacctcaggcccaggctgggctatgacctccctc

SEQ ID NO: 277049 - DNA, 2035 bp, Homo sapiens
tgctgggattacaggcgtgagccaccgcacccggcctgctgtaccttctttgtgcctcagtttccctctttattcaatggggctatcttccagggtagcctcgaggctaagatctgaatccatggccccttactgtctgctcctttcctctcctaaggactccagtgggggtgactcatgtgcttctgaggaggaaccaacctttgaccccggctatgaacctgactgggctgtcatcagcactgtgcggccacagccctgccactcagagcccacgagaggtgcagagcccagctgcccccagggctcctgggccttctcagtgagtctgggggagctaaagtccatccgccgctccaagccaggcctcagctgggcctacctggttctggtgacccaggctggaggttccctgcccgcactgcacttccaccgcgggggcacccgcgccctgctccgcgtcctcagccgctacctgctgttggccagctccccgcaggactcccgcctctaccttgtcttcccccacgactcctctgctctctccaactccttccaccacctgcagctctttgaccaggacagctccaatgtggtgtcacgcttcctccaggatccctactccaccaccttcagcagcttctcccgagtgaccaacttcttccggggtgccctgcagccacagcctgagggagccgcctccgaccttcccccgccacccgacgatgagcccgagcctggattcgaggtcatttcctgtgtggagctggggcctcggccaaccgtggagcggggccctccagttacagaggaggagtgggcacgccacgtgggccctgaaggtcgcctgcagcaggtccctgagctgaagaaccggatcttctcggggggtctgagccccagcctgcggcgcgaggcctggaagttcctcctagggtacctcagctgggaaggcacagctgaggagcacaaggcccacatacgcaagaaaacggatgagtatttccgcatgaagctgcagtggaaatctgtgagccctgagcaggagcggagaaactcacttctgcatggataccgcagcctcatcgaaagggatgtgagccgcactgacaggaccaacaagttctacgagggtcccgagaacccggggctgggcctgctgaacgatatcctcctcacctactgcatgtatcacttcgacctcggctacgtccagggcatgagtgatcttctctccccgatcctctacgtcattcagaacgaggtggatgctttctggtgtttctgtggcttcatggagctcgtgcaagggaactttgaagagagccaggagaccatgaagcggcaactcgggcgactgctgctgctcctgagggtgctggaccccctgctctgcgacttcctggattcccaggactccggctctctctgcttctgtttccggtggctgctcatctggttcaagagggaattccccttcccggatgtccttcggctgtgggaggtgctgtggacagggctccctggccccaatctgcacctgctggtggcctgcgccatcctggacatggagagggacaccctcatgctgtccggcttcggctccaatgagatcctcaagcacatcaacgagctgactatgaagctgagcgtggaggacgtgctgacccgcgccgaggccctgcaccgccagctaaccgcctgccccgagctgccccacaacgtgcaggagatcctggggctggccccgcccgcagagccccacagcccctcgcccaccgcctccccgctgcctctgtcgcccacccgggccccgcccaccccgccgccctccacggacacagccccgcagcccgacagcagcctggagatcctgcccgaggaggaggacgagggcgccgactcctaaccccgccaggcagcctcgttctgcacaggcactttagcccgagccaggcacacctgcgagggggcaggtgtgctccgccgccctgctgataagctggcttcattaaactgacacttctcatgtgca

SEQ ID NO: 277050 - DNA, 2450 bp, Homo sapiens
gagaagtaagtgggcgtttcaaggcgtgcttgccccaggtggtgcagctctcagaccctcccacttgtttacttcgtggcgagagggcgaacactgcgcctgcgcactctccgtagccggatccaccttcagcgtctgcgccacgtgactccgatccaccctcgaggttccagtggaataacccccttctgaaaaatggtttcacccgctccttctctagaacgggtcgggccgctaccactgtccggcccggaggggaactgttttctccggaagtgacaacacgctgactaggaaaaggaggaggcggggcagtggggccttcggcggcgactatggaaggagccggctacagggtggtgtttgagaagggcggagtgtacctgcacaccagcgctaagaagtatcaggaccgagactctctcatcgctggtgtcatccgtgtcgtggaaaaggacaatgacgtcctcctgcactgggctcctgtagaggaggctggagattccacccaaatcctcttctccaagaaggactccagtgggggtgactcatgtgcttctgaggaggaaccaacctttgaccccggctatgaacctgactgggctgtcatcagcactgtgcggccacagccctgccactcagagcccacgagaggtaggctgaggtggcggcccttgagaagcacgtgtgggccaggtgcagagcccagctgcccccagggctcctgggccttctcagtgagtctgggggagctaaagtccatccgccgctccaagccaggcctcagctgggcctacctggttctggtgacccaggctggaggttccctgcccgcactgcacttccaccgcgggggcacccgcgccctgctccgcgtcctcagccgctacctgctgttggccagctccccgcaggactcccgcctctaccttgtcttcccccacgactcctctgctctctccaactccttccaccacctgcagctctttgaccaggacagctccaatgtggtgtcacgcttcctccaggatccctactccaccaccttcagcagcttctcccgagtgaccaacttcttccggggtgccctgcagccacagcctgagggagccgcctccgaccttcccccgccacccgacgatgagcccgagcctggattcgaggtcatttcctgtgtggagctggggcctcggccaaccgtggagcggggccctccagttacagaggaggagtgggcacgccacgtgggccctgaaggtcgcctgcagcaggtccctgagctgaagaaccggatcttctcggggggtctgagccccagcctgcggcgcgaggcctggaagttcctcctagggtacctcagctgggaaggcacagctgaggagcacaaggcccacatacgcaagaaaacggatgagtatttccgcatgaagctgcagtggaaatctgtgagccctgagcaggagcggagaaactcacttctgcatggataccgcagcctcatcgaaagggatgtgagccgcactgacaggaccaacaagttctacgagggtcccgagaacccggggctgggcctgctgaacgatatcctcctcacctactgcatgtatcacttcgacctcggctacgtccagggcatgagtgatcttctctccccgatcctctacgtcattcagaacgaggtggatgctttctggtgtttctgtggcttcatggagctcgtgcaagggaactttgaagagagccaggagaccatgaagcggcaactcgggcgactgctgctgctcctgagggtgctggaccccctgctctgcgacttcctggattcccaggactccggctctctctgcttctgtttccggtggctgctcatctggttcaagagggaattccccttcccggatgtccttcggctgtgggaggtgctgtggacagggctccctggccccaatctgcacctgctggtggcctgcgccatcctggacatggagagggacaccctcatgctgtccggcttcggctccaatgagatcctcaagcacatcaacgagctgactatgaagctgagcgtggaggacgtgctgacccgcgccgaggccctgcaccgccagctaaccgcctgccccgagctgccccacaacgtgcaggagatcctggggctggccccgcccgcagagccccacagcccctcgcccaccgcctccccgctgcctctgtcgcccacccgggccccgcccaccccgccgccctccacggacacagccccgcagcccgacagcagcctggagatcctgcccgaggaggaggacgagggcgccgactcctaaccccgccaggcagcctcgttctgcacaggcactttagcccgagccaggcacacctgcgagggggcaggtgtgctccgccgccctgctgataagctggcttcattaaactgacacttctcatgtgca

SEQ ID NO: 277051 - DNA, 2001 bp, Homo sapiens
gagaagtaagtgggcgtttcaaggcgtgcttgccccaggtggtgcagctctcagaccctcccacttgtttacttcgtggcgagagggcgaacactgcgcctgcgcactctccgtagccggatccaccttcagcgtctgcgccacgtgactccgatccaccctcgaggttccagtggaataacccccttctgaaaaatggtttcacccgctccttctctagaacgggtcgggccgctaccactgtccggcccggaggggaactgttttctccggaagtgacaacacgctgactaggaaaaggaggaggcggggcagtggggccttcggcggcgactatggaaggagccggctacagggtggtgtttgagaagggcggagtgtacctgcacaccagcgctaagaagtatcaggaccgagactctctcatcgctggtgtcatccgtgtcgtggaaaagctccccgcaggactcccgcctctaccttgtcttcccccacgactcctctgctctctccaactccttccaccacctgcagctctttgaccaggacagctccaatgtggtgtcacgcttcctccaggatccctactccaccaccttcagcagcttctcccgagtgaccaacttcttccggggtgccctgcagccacagcctgagggagccgcctccgaccttcccccgccacccgacgatgagcccgagcctggattcgaggtcatttcctgtgtggagctggggcctcggccaaccgtggagcggggccctccagttacagaggaggagtgggcacgccacgtgggccctgaaggtcgcctgcagcaggtccctgagctgaagaaccggatcttctcggggggtctgagccccagcctgcggcgcgaggcctggaagttcctcctagggtacctcagctgggaaggcacagctgaggagcacaaggcccacatacgcaagaaaacggatgagtatttccgcatgaagctgcagtggaaatctgtgagccctgagcaggagcggagaaactcacttctgcatggataccgcagcctcatcgaaagggatgtgagccgcactgacaggaccaacaagttctacgagggtcccgagaacccggggctgggcctgctgaacgatatcctcctcacctactgcatgtatcacttcgacctcggctacgtccagggcatgagtgatcttctctccccgatcctctacgtcattcagaacgaggtggatgctttctggtgtttctgtggcttcatggagctcgtgcaagggaactttgaagagagccaggagaccatgaagcggcaactcgggcgactgctgctgctcctgagggtgctggaccccctgctctgcgacttcctggattcccaggactccggctctctctgcttctgtttccggtggctgctcatctggttcaagagggaattccccttcccggatgtccttcggctgtgggaggtgctgtggacagggctccctggccccaatctgcacctgctggtggcctgcgccatcctggacatggagagggacaccctcatgctgtccggcttcggctccaatgagatcctcaagcacatcaacgagctgactatgaagctgagcgtggaggacgtgctgacccgcgccgaggccctgcaccgccagctaaccgcctgccccgagctgccccacaacgtgcaggagatcctggggctggccccgcccgcagagccccacagcccctcgcccaccgcctccccgctgcctctgtcgcccacccgggccccgcccaccccgccgccctccacggacacagccccgcagcccgacagcagcctggagatcctgcccgaggaggaggacgagggcgccgactcctaaccccgccaggcagcctcgttctgcacaggcactttagcccgagccaggcacacctgcgagggggcaggtgtgctccgccgccctgctgataagctggcttcattaaactgacacttctcatgtgca

SEQ ID NO: 277052 - DNA, 1962 bp, Homo sapiens
gagtattgatttcaggcaggacccaggtcccaaaatgttagaaacagttatcctttttccctctgagttcgttattctctggggccccagtatccgtggcttaacaacccggctggatagaaggcacctctttccccacgttccaacgagatcccagagctgcttctcattggctcgtccctgagtcagtcacactggaccggaaggtgaaaggccctcattggccagccccgagtcatgtgcccacccctgggatccagctgtgggcctcctttaacagcattccctgaaatgaggggttgcccaggggtggttgggacgctgcagctggaaccgatgtcggccgagcacagacagcctgggacactgggcccctacctgtgcatcacctgtgcgtcacctcccgcctcccagctctccccgcaggactcccgcctctaccttgtcttcccccacgactcctctgctctctccaactccttccaccacctgcagctctttgaccaggacagctccaatgtggtgtcacgcttcctccaggatccctactccaccaccttcagcagcttctcccgagtgaccaacttcttccggggtgccctgcagccacagcctgagggagccgcctccgaccttcccccgccacccgacgatgagcccgagcctggattcgaggtcatttcctgtgtggagctggggcctcggccaaccgtggagcggggccctccagttacagaggaggagtgggcacgccacgtgggccctgaaggtcgcctgcagcaggtccctgagctgaagaaccggatcttctcggggggtctgagccccagcctgcggcgcgaggcctggaagttcctcctagggtacctcagctgggaaggcacagctgaggagcacaaggcccacatacgcaagaaaacggatgagtatttccgcatgaagctgcagtggaaatctgtgagccctgagcaggagcggagaaactcacttctgcatggataccgcagcctcatcgaaagggatgtgagccgcactgacaggaccaacaagttctacgagggtcccgagaacccggggctgggcctgctgaacgatatcctcctcacctactgcatgtatcacttcgacctcggctacgtccagggcatgagtgatcttctctccccgatcctctacgtcattcagaacgaggtggatgctttctggtgtttctgtggcttcatggagctcgtgcaagggaactttgaagagagccaggagaccatgaagcggcaactcgggcgactgctgctgctcctgagggtgctggaccccctgctctgcgacttcctggattcccaggactccggctctctctgcttctgtttccggtggctgctcatctggttcaagagggaattccccttcccggatgtccttcggctgtgggaggtgctgtggacagggctccctggccccaatctgcacctgctggtggcctgcgccatcctggacatggagagggacaccctcatgctgtccggcttcggctccaatgagatcctcaagcacatcaacgagctgactatgaagctgagcgtggaggacgtgctgacccgcgccgaggccctgcaccgccagctaaccgcctgccccgagctgccccacaacgtgcaggagatcctggggctggccccgcccgcagagccccacagcccctcgcccaccgcctccccgctgcctctgtcgcccacccgggccccgcccaccccgccgccctccacggacacagccccgcagcccgacagcagcctggagatcctgcccgaggaggaggacgagggcgccgactcctaaccccgccaggcagcctcgttctgcacaggcactttagcccgagccaggcacacctgcgagggggcaggtgtgctccgccgccctgctgataagctggcttcattaaactgacacttctcatgtgca

SEQ ID NO: 277053 - DNA, 2052 bp, Homo sapiens
gagtattgatttcaggcaggacccaggtcccaaaatgttagaaacagttatcctttttccctctgagttcgttattctctggggccccagtatccgtggcttaacaacccggctggatagaaggcacctctttccccacgttccaacgagatcccagagctgcttctcattggctcgtccctgagtcagtcacactggaccggaaggtgaaaggccctcattggccagccccgagtcatgtgcccacccctgggatccagctgtgggcctcctttaacagcattccctgaaatgaggggttgcccaggggtggttgggacgctgcagctggaaccgatgtcggccgagcacagacagcctgggacactgggcccctacctgtgcatcacctgtgcgtcacctcccgcctcccagctctccccgcaggactcccgcctctaccttgtcttcccccacgactcctctgctctctccaactccttccaccacctgcagctctttgaccaggacagctccaatgtggtgtcagtgagtgtcccccagcaggaggcctggcggttgtgggcagggagggacgagaaggggcgggtcgtgacctccctttgccctcgtccccagcgcttcctccaggatccctactccaccaccttcagcagcttctcccgagtgaccaacttcttccggggtgccctgcagccacagcctgagggagccgcctccgaccttcccccgccacccgacgatgagcccgagcctggattcgaggtcatttcctgtgtggagctggggcctcggccaaccgtggagcggggccctccagttacagaggaggagtgggcacgccacgtgggccctgaaggtcgcctgcagcaggtccctgagctgaagaaccggatcttctcggggggtctgagccccagcctgcggcgcgaggcctggaagttcctcctagggtacctcagctgggaaggcacagctgaggagcacaaggcccacatacgcaagaaaacggatgagtatttccgcatgaagctgcagtggaaatctgtgagccctgagcaggagcggagaaactcacttctgcatggataccgcagcctcatcgaaagggatgtgagccgcactgacaggaccaacaagttctacgagggtcccgagaacccggggctgggcctgctgaacgatatcctcctcacctactgcatgtatcacttcgacctcggctacgtccagggcatgagtgatcttctctccccgatcctctacgtcattcagaacgaggtggatgctttctggtgtttctgtggcttcatggagctcgtgcaagggaactttgaagagagccaggagaccatgaagcggcaactcgggcgactgctgctgctcctgagggtgctggaccccctgctctgcgacttcctggattcccaggactccggctctctctgcttctgtttccggtggctgctcatctggttcaagagggaattccccttcccggatgtccttcggctgtgggaggtgctgtggacagggctccctggccccaatctgcacctgctggtggcctgcgccatcctggacatggagagggacaccctcatgctgtccggcttcggctccaatgagatcctcaagcacatcaacgagctgactatgaagctgagcgtggaggacgtgctgacccgcgccgaggccctgcaccgccagctaaccgcctgccccgagctgccccacaacgtgcaggagatcctggggctggccccgcccgcagagccccacagcccctcgcccaccgcctccccgctgcctctgtcgcccacccgggccccgcccaccccgccgccctccacggacacagccccgcagcccgacagcagcctggagatcctgcccgaggaggaggacgagggcgccgactcctaaccccgccaggcagcctcgttctgcacaggcactttagcccgagccaggcacacctgcgagggggcaggtgtgctccgccgccctgctgataagctggcttcattaaactgacacttctcatgtgca

SEQ ID NO: 277054 - DNA, 2016 bp, Homo sapiens
gagaagtaagtgggcgtttcaaggcgtgcttgccccaggtggtgcagctctcagaccctcccacttgtttacttcgtggcgagagggcgaacactgcgcctgcgcactctccgtagccggatccaccttcagcgtctgcgccacgtgactccgatccaccctcgaggttccagtggaataacccccttctgaaaaatggtttcacccgctccttctctagaacgggtcgggccgctaccactgtccggcccggaggggaactgttttctccggaagtgacaacacgctgactaggaaaaggaggaggcggggcagtggggccttcggcggcgactatggaaggagccggctacagggtggtgtttgagaagggcggagtgtacctgcacaccagcgctaagaagtatcaggaccgagactctctcatcgctggtgtcatccgtgtcgtggaaaaggacaatgacgtcctcctgcactgggctcctgtagaggaggctggagattccacccaaatcctcttctccaagaaggactccagtgggggtgactcatgtgcttctgaggaggaaccaacctttgaccccggctatgaacctgactgggctgtcatcagcactgtgcggccacagccctgccactcagagcccacgagagctgcagccacagcctgagggagccgcctccgaccttcccccgccacccgacgatgagcccgagcctggattcgaggtcatttcctgtgtggagctggggcctcggccaaccgtggagcggggccctccagttacagaggaggagtgggcacgccacgtgggccctgaaggtcgcctgcagcaggtccctgagctgaagaaccggatcttctcggggggtctgagccccagcctgcggcgcgaggcctggaagttcctcctagggtacctcagctgggaaggcacagctgaggagcacaaggcccacatacgcaagaaaacggatgagtatttccgcatgaagctgcagtggaaatctgtgagccctgagcaggagcggagaaactcacttctgcatggataccgcagcctcatcgaaagggatgtgagccgcactgacaggaccaacaagttctacgagggtcccgagaacccggggctgggcctgctgaacgatatcctcctcacctactgcatgtatcacttcgacctcggctacgtccagggcatgagtgatcttctctccccgatcctctacgtcattcagaacgaggtggatgctttctggtgtttctgtggcttcatggagctcgtgcaagggaactttgaagagagccaggagaccatgaagcggcaactcgggcgactgctgctgctcctgagggtgctggaccccctgctctgcgacttcctggattcccaggactccggctctctctgcttctgtttccggtggctgctcatctggttcaagagggaattccccttcccggatgtccttcggctgtgggaggtgctgtggacagggctccctggccccaatctgcacctgctggtggcctgcgccatcctggacatggagagggacaccctcatgctgtccggcttcggctccaatgagatcctcaagcacatcaacgagctgactatgaagctgagcgtggaggacgtgctgacccgcgccgaggccctgcaccgccagctaaccgcctgccccgagctgccccacaacgtgcaggagatcctggggctggccccgcccgcagagccccacagcccctcgcccaccgcctccccgctgcctctgtcgcccacccgggccccgcccaccccgccgccctccacggacacagccccgcagcccgacagcagcctggagatcctgcccgaggaggaggacgagggcgccgactcctaaccccgccaggcagcctcgttctgcacaggcactttagcccgagccaggcacacctgcgagggggcaggtgtgctccgccgccctgctgataagctggcttcattaaactgacacttctcatgtgca

SEQ ID NO: 277055 - DNA, 1017 bp, Homo sapiens
accctcccaaagtgctggggttacaggcgtgcgccatcgcacccggccttcagcttaaatttttgctaacagcgtatctaggagtgtcagttcccttagcgctcaccagcagcgggcagaggtctgtttcgtcgggcgtgctgggcgtcctgcctcccttccatgtccatggcagatgtggaagtataatagcacacttcctctggagagtgggaggaaggaggggcagggcccgcgttcagggctgctcctgcctcacctccgaggttccccagccaggcataagtcacttgcctagacttggggaaggtcttccagtcaggatgacttctcaaactctcagtcccagcgctgggcaaggctgagtgggctccatgtcatcccccagattcccaggactccggctctctctgcttctgtttccggtggctgctcatctggttcaagagggaattccccttcccggatgtccttcggctgtgggaggtgctgtggacagggctccctggccccaatctgcacctgctggtggcctgcgccatcctggacatggagagggacaccctcatgctgtccggcttcggctccaatgagatcctcaagcacatcaacgagctgactatgaagctgagcgtggaggacgtgctgacccgcgccgaggccctgcaccgccagctaaccgcctgccccgagctgccccacaacgtgcaggagatcctggggctggccccgcccgcagagccccacagcccctcgcccaccgcctccccgctgcctctgtcgcccacccgggccccgcccaccccgccgccctccacggacacagccccgcagcccgacagcagcctggagatcctgcccgaggaggaggacgagggcgccgactcctaaccccgccaggcagcctcgttctgcacaggcactttagcccgagccaggcacacctgcgagggggcaggtgtgctccgccgccctgctgataagctggcttcattaaactgacacttctcatgtgca

SEQ ID NO: 277056 - DNA, 1254 bp, Homo sapiens
gagaagtaagtgggcgtttcaaggcgtgcttgccccaggtggtgcagctctcagaccctcccacttgtttacttcgtggcgagagggcgaacactgcgcctgcgcactctccgtagccggatccaccttcagcgtctgcgccacgtgactccgatccaccctcgaggttccagtggaataacccccttctgaaaaatggtttcacccgctccttctctagaacgggtcgggccgctaccactgtccggcccggaggggaactgttttctccggaagtgacaacacgctgactaggaaaaggaggaggcggggcagtggggccttcggcggcgactatggaaggagccggctacagggtggtgtttgagaagggcggagtgtacctgcacaccagcgctaagaagtatcaggaccgagactctctcatcgctggtgtcatccgtgtcgtggaaaaggacaatgacgtcctcctgcactgggctcctgtagaggaggctggagattccacccaaatcctcttctccaagaaggtaggctccacccgctttgcccttctccactcgctttttttctaggtccgtgctgttgtaagtcatttgagggacctgcgtacaatcccagacctactcgtggggcatgtgtgaccctgtttaggcttgggtactctgcctctccttttgctcctctctgtgaaatgggcagaggatgcccattcaaggaaaaagagcagggagcataagacgcacggtcgtggggacggctgacccctctctccctttgcttcttgggagatccctgccagggtgcaagatgtggattcgagttgcttgaagggaaatggcatttcctctggtgccagaggacagggcctgacagcctactcacccacttcgtcactgctcccggctttcccttcgttatgtctcctgggacttcccatggctggaccccgtcctgggcaattctgagacccagagataagtcagatccagacccacctaagccctgacccttactcactttttgagaaactgatagatgaggtcgaaaacgctaggaagtgttggaactttttgcacccagacagtctgattccagatccccaacgcttcctgggagagcagacatttgagctgggactcccaggatatgaaaggacaagaaggtatttcagggacagcagaacaaccttcaaggcacacggagaagttggatgcctctgtaggggggttctttagtggggaatgagacctc

SEQ ID NO: 277057 - DNA, 480 bp, Homo sapiens
gtatttttttagtagaaacgaggtttctccatattggtcaggctggtctcgaactcccgacctcaggtgatccgcccgcctcagcctcccaaagtgctgggattacaggcgtgagccaccgcacccggcctgctgtaccttctttgtgcctcagtttccctctttattcaatggggctatcttccagggtagcctcgaggctaagatctgaatccatggccccttactgtctgctcctttcctctcctaaggactccagtgggggtgactcatgtgcttctgaggaggaaccaacctttgaccccggctatgaacctgactgggctgtcatcagcactgtgcggccacagccctgccactcagagcccacgagaggtaggctgaggtggcggcccttgagaagcacgtgtgggccaggtaggacacatcttgccctcagtggtcacggtcccaagggctttgctgcccacaatcaagaag

SEQ ID NO: 277058 - DNA, 1121 bp, Homo sapiens
gagaagtaagtgggcgtttcaaggcgtgcttgccccaggtggtgcagctctcagaccctcccacttgtttacttcgtggcgagagggcgaacactgcgcctgcgcactctccgtagccggatccaccttcagcgtctgcgccacgtgactccgatccaccctcgaggttccagtggaataacccccttctgaaaaatggtttcacccgctccttctctagaacgggtcgggccgctaccactgtccggcccggaggggaactgttttctccggaagtgacaacacgctgactaggaaaaggaggaggcggggcagtggggccttcggcggcgactatggaaggagccggctacagggtggtgtttgagaagggcggagtgtacctgcacaccagcgctaagaagtatcaggaccgagactctctcatcgctggtgtcatccgtgtcgtggaaaaggacaatgacgtcctcctgcactgggctcctgtagaggaggctggagattccacccaaatcctcttctccaagaagattcccaggactccggctctctctgcttctgtttccggtggctgctcatctggttcaagagggaattccccttcccggatgtccttcggctgtgggaggtgctgtggacagggctccctggccccaatctgcacctgctggtggcctgcgccatcctggacatggagagggacaccctcatgctgtccggcttcggctccaatgagatcctcaagcacgaagcacagagtgggcgctcgggcggaggtggttgagtgccgactggcgcctgacccaccccctcccgcagcacatcaacgagctgactatgaagctgagcgtggaggacgtgctgacccgcgccgaggccctgcaccgccagctaaccgcctgccccgagctgcccacaacgtgcaggagatccttggggggcctggcccccgccgcggcaagaggcgccaatatgccccgtccgccaaaccggacttcggtcgcacaaccacagtctgccgggcctacccacatacggccggcctcaacactaacgcgaaccatcagcaggaccattcaaccataacaacgcacaaagaacagagaaaacatcagcatgac

SEQ ID NO: 277059 - DNA, 2482 bp, Homo sapiens
gagaagtaagtgggcgtttcaaggcgtgcttgccccaggtggtgcagctctcagaccctcccacttgtttacttcgtggcgagagggcgaacactgcgcctgcgcactctccgtagccggatccaccttcagcgtctgcgccacgtgactccgatccaccctcgaggttccagtggaataacccccttctgaaaaatggtttcacccgctccttctctagaacgggtcgggccgctaccactgtccggcccggaggggaactgttttctccggaagtgacaacacgctgactaggaaaaggaggaggcggggcagtggggccttcggcggcgactatggaaggagccggctacagggtggtgtttgagaagggcggagtgtacctgcacaccagcgctaagaagtatcaggaccgagactctctcatcgctggtgtcatccgtgtcgtggaaaaggacaatgacgtcctcctgcactgggctcctgtagaggaggctggagattccacccaaatcctcttctccaagaaggactccagtgggggtgactcatgtgcttctgaggaggaaccaacctttgaccccggctatgaacctgactgggctgtcatcagcactgtgcggccacagccctgccactcagagcccacgagaggtgcagagcccagctgcccccagggctcctgggccttctcagtgagtctgggggagctaaagtccatccgccgctccaagccaggcctcagctgggcctacctggttctggtgacccaggctggaggttccctgcccgcactgcacttccaccgcgggggcacccgcgccctgctccgcgtcctcagccgctacctgctgttggccagctccccgcaggactcccgcctctaccttgtcttcccccacgactcctctgctctctccaactccttccaccacctgcagctctttgaccaggacagctccaatgtggtgtcacgcttcctccaggatccctactccaccaccttcagcagcttctcccgagtgaccaacttcttccggggtgccctgcagccacagcctgagggagccgcctccgaccttcccccgccacccgacgatgagcccgagcctggattcgaggtcatttcctgtgtggagctggggcctcggccaaccgtggagcggggccctccagttacagaggaggagtgggcacgccacgtgggccctgaaggtcgcctgcagcaggtccctgagctgaagaaccggatcttctcggggggtctgagccccagcctgcggcgcgaggcctggaagttcctcctagggtacctcagctgggaaggcacagctgaggagcacaaggcccacatacgcaagaaaacggatgagtatttccgcatgaagctgcagtggaaatctgtgagccctgagcaggagcggagaaactcacttctgcatggataccgcagcctcatcgaaagggatgtgagccgcactgacaggaccaacaagttctacgagggtcccgagaacccggggctgggcctgctgaacgatatcctcctcacctactgcatgtatcacttcgacctcggctacgtccagggcatgagtgatcttctctccccgatcctctacgtcattcagaacgaggtggatgctttctggtgtttctgtggcttcatggagctcgtgcaagggaactttgaagagagccaggagaccatgaagcggcaactcgggcgactgctgctgctcctgagggtgctggaccccctgctctgcgacttcctggattcccaggactccggctctctctgcttctgtttccggtggctgctcatctggttcaagagggaattccccttcccggatgtccttcggctgtgggaggtgctgtggacagggctccctggccccaatctgcacctgctggtggcctgcgccatcctggacatggagagggacaccctcatgctgtccggcttcggctccaatgagatcctcaagcacgaagcacagagtgggcgctcgggcggaggtggttgagtgccgactggcgcctgacccaccccctcccgcagcacatcaacgagctgactatgaagctgagcgtggaggacgtgctgacccgcgccgaggccctgcaccgccagctaaccgcctgccccgagctgccccacaacgtgcaggagatcctggggctggccccgcccgcagagccccacagcccctcgcccaccgcctccccgctgcctctgtcgcccacccgggccccgcccaccccgccgccctccacggacacagccccgcagcccgacagcagcctggagatcctgcccgaggaggaggacgagggcgccgactcctaaccccgccaggcagcctcgttctgcacaggcactttagcccgagccaggcacacctgcgagggggcaggtgtgctccgccgccctgctgataagctggcttcattaaactgacacttctcatgtgca

SEQ ID NO: 277060 - DNA, 3226 bp, Homo sapiens
gagaagtaagtgggcgtttcaaggcgtgcttgccccaggtggtgcagctctcagaccctcccacttgtttacttcgtggcgagagggcgaacactgcgcctgcgcactctccgtagccggatccaccttcagcgtctgcgccacgtgactccgatccaccctcgaggttccagtggaataacccccttctgaaaaatggtttcacccgctccttctctagaacgggtcgggccgctaccactgtccggcccggaggggaactgttttctccggaagtgacaacacgctgactaggaaaaggaggaggcggggcagtggggccttcggcggcgactatggaaggagccggctacagggtggtgtttgagaagggcggagtgtacctgcacaccagcgctaagaagtatcaggaccgagactctctcatcgctggtgtcatccgtgtcgtggaaaaggacaatgacgtcctcctgcactgggctcctgtagaggaggctggagattccacccaaatcctcttctccaagaaggactccagtgggggtgactcatgtgcttctgaggaggaaccaacctttgaccccggctatgaacctgactgggctgtcatcagcactgtgcggccacagccctgccactcagagcccacgagaggtgcagagcccagctgcccccagggctcctgggccttctcagtgagtctgggggagctaaagtccatccgccgctccaagccaggcctcagctgggcctacctggttctggtgacccaggctggaggttccctgcccgcactgcacttccaccgcgggggcacccgcgccctgctccgcgtcctcagccgctacctgctgttggccagctccccgcaggactcccgcctctaccttgtcttcccccacgactcctctgctctctccaactccttccaccacctgcagctctttgaccaggacagctccaatgtggtgtcacgcttcctccaggatccctactccaccaccttcagcagcttctcccgagtgaccaacttcttccggggtgccctgcagccacagcctgagggagccgcctccgaccttcccccgccacccgacgatgagcccgagcctggattcgaggtcatttcctgtgtggagctggggcctcggccaaccgtggagcggggccctccagttacagaggaggagtgggcacgccacgtgggccctgaaggtcgcctgcagcaggtccctgagctgaagaaccggatcttctcggggggtctgagccccagcctgcggcgcgaggcctggaagttcctcctagggtacctcagctgggaaggcacagctgaggagcacaaggcccacatacgcaagaaaacggatgagtatttccgcatgaagctgcagtggaaatctgtgagccctgagcaggagcggagaaactcacttctgcatggataccgcagcctcatcgaaagggatgtgagccgcactgacaggaccaacaagttctacgagggtcccgagaacccggggctgggcctgctgaacgatatcctcctcacctactgcatgtatcacttcgacctcggctacgtccagggcatgagtgatcttctctccccgatcctctacgtcattcagaacgaggtggatgctttctggtgtttctgtggcttcatggagctcgtgcaagggaactttgaagagagccaggagaccatgaagcggcaactcgggcgactgctgctgctcctgagggtgctggaccccctgctctgcgacttcctggattcccaggactccggctctctctgcttctgtttccggtggctgctcatctggttcaagagggaattccccttcccggatgtccttcggctgtgggaggtgctgtggacagggctccctggccccaatctgcacctgctggtggcctgcgccatcctggacatggagagggacaccctcatgctgtccggcttcggctccaatgagatcctcaagcacgaagcacagagtgggcgctcgggcggaggtggttgagtgccgactggcgcctgacccaccccctcccgcagcacatcaacgagctgactatgaagctgagcgtggaggacgtgctgacccgcgccgacgccctccacggacacagccccgcagcccgacagcagcctggagatcctgcccgaggaggaggacgagggcgccgactcctaaccccgccaggcagcctcgttctgcacaggcactttagcccgagccaggcacacctgcgagggggcaggtgtgctccgccgccctgctgataagctggcttcattaaactgacacttctcatgtgcaaaaaaaaaaaaaaaaaacaaaaaaaaagggggggccacaaaaaaaacccagagaggacccaaagaagagcaggcaaacgccaggaccacacggtgcaacaaggggagcccacacaaggaggagcacccacaaataatatagccagaggagcgaagggaacagagcaaaaacacacacccgaacacacaggacaaaacacggcaacgacagaaagaatcaagtcgaagagagaaaccaccaaaaaaagcagagcagcgagaacacaaaaagagcacacaaaagaacacacacgacccacgcaaaaatcacacacaggaccaaaaggcaacaacacaaaaaagaacctgcaaaaaaggcgagaacaaaacgcacgcaacaacacacaacccaagcccaactacagagccagcaccaaaaaaacgaccacagcgcggcacacacgaggaagtaacgcacacaaaaaagcaacaagatcgcacaacacacccacggggaaacaccgcagggaaaaacaacaagagcgagcaaaaaagcaagaaaccaacaagccagcaaaagcgcgaacgacaaagaaacgacacccgagaaccgacgagacgaacaagagcccgacgaaccacacgacgagaaaagcgaacgaggacgggagaagcgagaggagaggagacacgaaggcagggagggcgagacaagatgggaagcgaaaggagcacgggaggagagaacgaagaaccagacacggagcaggaggagaagacgaagagggaagggcaaggagagagggaaaggagggaagcgggagggaaggacacagcaggcagcagaggaaggccaggggagaagacgcgacgagacagcacagcacgaacgcaggcaaacggaagaaagaaaga

SEQ ID NO: 277061 - DNA, 2664 bp, Homo sapiens
gagaagtaagtgggcgtttcaaggcgtgcttgccccaggtggtgcagctctcagaccctcccacttgtttacttcgtggcgagagggcgaacactgcgcctgcgcactctccgtagccggatccaccttcagcgtctgcgccacgtgactccgatccaccctcgaggttccagtggaataacccccttctgaaaaatggtttcacccgctccttctctagaacgggtcgggccgctaccactgtccggcccggaggggaactgttttctccggaagtgacaacacgctgactaggaaaaggaggaggcggggcagtggggccttcggcggcgactatggaaggagccggctacagggtggtgtttgagaagggcggagtgtacctgcacaccagcgctaagaagtatcaggaccgagactctctcatcgctggtgtcatccgtgtcgtggaaaaggacaatgacgtcctcctgcactgggctcctgtagaggaggctggagattccacccaaatcctcttctccaagaaggactccagtgggggtgactcatgtgcttctgaggaggaaccaacctttgaccccggctatgaacctgactgggctgtcatcagcactgtgcggccacagccctgccactcagagcccacgagaggtgcagagcccagctgcccccagggctcctgggccttctcagtgagtctgggggagctaaagtccatccgccgctccaagccaggcctcagctgggcctacctggttctggtgacccaggctggaggttccctgcccgcactgcacttccaccgcgggggcacccgcgccctgctccgcgtcctcagccgctacctgctgttggccagctccccgcaggactcccgcctctaccttgtcttcccccacgactcctctgctctctccaactccttccaccacctgcagctctttgaccaggacagctccaatgtggtgtcacgcttcctccaggatccctactccaccaccttcagcagcttctcccgagtgaccaacttcttccggggtgccctgcagccacagcctgagggagccgcctccgaccttcccccgccacccgacgatgagcccgagcctggattcgaggtcatttcctgtgtggagctggggcctcggccaaccgtggagcggggccctccagttacagaggaggagtgggcacgccacgtgggccctgaaggtcgcctgcagcaggtccctgagctgaagaaccggatcttctcggggggtctgagccccagcctgcggcgcgaggcctggaagttcctcctagggtacctcagctgggaaggcacagctgaggagcacaaggcccacatacgcaagaaaacggatgagtatttccgcatgaagctgcagtggaaatctgtgagccctgagcaggagcggagaaactcacttctgcatggataccgcagcctcatcgaaagggatgtgagccgcactgacaggaccaacaagttctacgagggtcccgagaacccggggctgggcctgctgaacgatatcctcctcacctactgcatgtatcacttcgacctcggctacgtccagggcatgagtgatcttctctccccgatcctctacgtcattcagaacgaggtggatgctttctggtgtttctgtggcttcatggagctcgtgcaagggaactttgaagagagccaggagaccatgaagcggcaactcgggcgactgctgctgctcctgagggtgctggaccccctgctctgcgacttcctggattcccaggactccggctctctctgcttctgtttccggtggctgctcatctggttcaagagggaattccccttcccggatgtccttcggctgtgggaggtgctgtggacagggctccctggccccaatctgcacctgctggtggcctgcgccatcctggacatggagagggacaccctcatgctgtccggcttcggctccaatgagatcctcaaggcactttagcccgagccaggcacacctgcgagggggcaggtgtgctccgccgccctgctgataagctggcttcattaaactgacacttctcatgtgcaaaaaaaaaaaaaaaaaacaaaaaaaaaaaaaaacaaaagagggggcgcgcgccgctctctctgaagattattcccctcgcggaggggccccagagtttagacgcgcgtaccccggttttctctggctaccaaggtgggccccctaatgagggggaggcgcgttatttataaagctctaaggcatgtggggccgttcctgtttacaaccaagcgttccgagtgaaccgtgggaaccaaacgtgctctcacccgtgggggcatccttcggcgggaagaggaaaacccccttaatcttccgagggggggtgggagcacccataatgtggggcacacaacatcttacccttaccaggagaattttaaagggcccctcatagagggtaaacttattaacacattcttcaagacggggtctattactgtcgtgcttcaacaaccctagcccgtggacatatatttgccgtgcgccgagccatatgagagaatttgggccttctaccgcgagattatgtgaatttaatgcgaaacactttttttactaccccggggaccaatggtatgcaataaacaca

SEQ ID NO: 277062 - DNA, 2106 bp, Homo sapiens
tctgttactgcccggggttatgggatcggcggcgactatgaaggagcgtctcaggtggtgtttgagaagggcggagtgtacctgcacaccagcgctaagaagtatcaggaccgagactctctcatcgctggtgtcatccgtgtcgtggaaaaggacaatgacgtcctcctgcactgggctcctgtagaggaggctggagattccacccaaatcctcttctccaagaaggactccagtgggggtgactcatgtgcttctgaggaggaaccaacctttgaccccggctatgaacctgactgggctgtcatcagcactgtgcggccacagccctgccactcagagcccacgagaggtgcagagcccagctgcccccagggctcctgggccttctcagtgagtctgggggagctaaagtccatccgccgctccaagccaggcctcagctgggcctacctggttctggtgacccaggctggaggttccctgcccgcactgcacttccaccgcgggggcacccgcgccctgctccgcgtcctcagccgctacctgctgttggccagctccccgcaggactcccgcctctaccttgtcttcccccacgactcctctgctctctccaactccttccaccacctgcagctctttgaccaggacagctccaatgtggtgtcacgcttcctccaggatccctactccaccaccttcagcagcttctcccgagtgaccaacttcttccggggtgccctgcagccacagcctgagggagccgcctccgaccttcccccgccacccgacgatgagcccgagcctggattcgaggtcatttcctgtgtggagctggggcctcggccaaccgtggagcggggccctccagttacagaggaggagtgggcacgccacgtgggccctgaaggtcgcctgcagcaggtccctgagctgaagaaccggatcttctcggggggtctgagccccagcctgcggcgcgaggcctggaagttcctcctagggtacctcagctgggaaggcacagctgaggagcacaaggcccacatacgcaagaaaacggatgagtatttccgcatgaagctgcagtggaaatctgtgagccctgagcaggagcggagaaactcacttctgcatggataccgcagcctcatcgaaagggatgtgagccgcactgacaggaccaacaagttctacgagggtcccgagaacccggggctgggcctgctgaacgatatcctcctcacctactgcatgtatcacttcgacctcggctacgtccagggcatgagtgatcttctctccccgatcctctacgtcattcagaacgaggtggatgctttctggtgtttctgtggcttcatggagctcgtgcaagggaactttgaagagagccaggagaccatgaagcggcaactcgggcgactgctgctgctcctgagggtgctggaccccctgctctgcgacttcctggattcccaggactccggctctctctgcttctgtttccggtggctgctcatctggttcaagagggaattccccttcccggatgtccttcggctgtgggaggtgctgtggacagggctccctggccccaatctgcacctgctggtggcctgcgccatcctggacatggagagggacaccctcatgctgtccggcttcggctccaatgagatcctcaagcacatcaacgagctgactatgaagctgagcgtggaggacgtgctgacccgcgccgaggccctgcaccgccagctaaccgcctgccccgagctgccccacaacgtgcaggagatcctggggctggccccgcccgcagagccccacagcccctcgcccaccgcctccccgctgcctctgtcgcccacccgggccccgcccaccccgccgccctccacggacacagccccgcagcccgacagcagcctggagatcctgcccgaggaggaggacgagggcgccgactcctaaccccgccaggcagcctcgttctgcacaggcactttagcccgagccaggcacacctgcgagggggcaggtgtgctccgccgccctgctgataagctggcttcattaaactgacacttctcatgtgca

SEQ ID NO: 277063 - DNA, 2461 bp, Homo sapiens
gagaagtaagtgggcgtttcaaggcgtgcttgccccaggtggtgcagctctcagaccctcccacttgtttacttcgtggcgagagggcgaacactgcgcctgcgcactctccgtagccggatccaccttcagcgtctgcgccacgtgactccgatccaccctcgaggttccagtggaataacccccttctgaaaaatggtttcacccgctccttctctagaacgggtcgggccgctaccactgtccggcccggaggggaactgttttctccggaagtgacaacacgctgactaggaaaaggaggaggcggggcagtggggccttcggcggcgactatggaaggagccggctacagggtggtgtttgagaagggcggagtgtacctgcacaccagcgctaagaagtatcaggaccgagactctctcatcgctggtgtcatccgtgtcgtggaaaaggacaatgacgtcctcctgcactgggctcctgtagaggaggctggagattccacccaaatcctcttctccaagaagccaaacacagccaaggcaccaggaagttgcgttacatcacttccgctttccaggactccagtgggggtgactcatgtgcttctgaggaggaaccaacctttgaccccggctatgaacctgactgggctgtcatcagcactgtgcggccacagccctgccactcagagcccacgagaggtgcagagcccagctgcccccagggctcctgggccttctcagtgagtctgggggagctaaagtccatccgccgctccaagccaggcctcagctgggcctacctggttctggtgacccaggctggaggttccctgcccgcactgcacttccaccgcgggggcacccgcgccctgctccgcgtcctcagccgctacctgctgttggccagctccccgcaggactcccgcctctaccttgtcttcccccacgactcctctgctctctccaactccttccaccacctgcagctctttgaccaggacagctccaatgtggtgtcacgcttcctccaggatccctactccaccaccttcagcagcttctcccgagtgaccaacttcttccggggtgccctgcagccacagcctgagggagccgcctccgaccttcccccgccacccgacgatgagcccgagcctggattcgaggtcatttcctgtgtggagctggggcctcggccaaccgtggagcggggccctccagttacagaggaggagtgggcacgccacgtgggccctgaaggtcgcctgcagcaggtccctgagctgaagaaccggatcttctcggggggtctgagccccagcctgcggcgcgaggcctggaagttcctcctagggtacctcagctgggaaggcacagctgaggagcacaaggcccacatacgcaagaaaacggatgagtatttccgcatgaagctgcagtggaaatctgtgagccctgagcaggagcggagaaactcacttctgcatggataccgcagcctcatcgaaagggatgtgagccgcactgacaggaccaacaagttctacgagggtcccgagaacccggggctgggcctgctgaacgatatcctcctcacctactgcatgtatcacttcgacctcggctacgtccagggcatgagtgatcttctctccccgatcctctacgtcattcagaacgaggtggatgctttctggtgtttctgtggcttcatggagctcgtgcaagggaactttgaagagagccaggagaccatgaagcggcaactcgggcgactgctgctgctcctgagggtgctggaccccctgctctgcgacttcctggattcccaggactccggctctctctgcttctgtttccggtggctgctcatctggttcaagagggaattccccttcccggatgtccttcggctgtgggaggtgctgtggacagggctccctggccccaatctgcacctgctggtggcctgcgccatcctggacatggagagggacaccctcatgctgtccggcttcggctccaatgagatcctcaagcacatcaacgagctgactatgaagctgagcgtggaggacgtgctgacccgcgccgaggccctgcaccgccagctaaccgcctgccccgagctgccccacaacgtgcaggagatcctggggctggccccgcccgcagagccccacagcccctcgcccaccgcctccccgctgcctctgtcgcccacccgggccccgcccaccccgccgccctccacggacacagccccgcagcccgacagcagcctggagatcctgcccgaggaggaggacgagggcgccgactcctaaccccgccaggcagcctcgttctgcacaggcactttagcccgagccaggcacacctgcgagggggcaggtgtgctccgccgccctgctgataagctggcttcattaaactgacacttctcatgtgca

SEQ ID NO: 277064 - DNA, 802 bp, Homo sapiens
agggaaggtacatagccacacaagagattccccatcacccaaataccttccactaggtccaactccaacatggcggtcacatttcaacacgaaatttggagggaaaaaacatccaaacaatatcaccatcttacaggctggtgttgtctggtgggctgtttgggaaatactggtctagacacatttctcaaacttggcaatatgactccactggacattaaaaagggatttccaggtatttcaagataaagggatttattctcaggagctgcaaacataagctaggttttcttacagtgttaacatcttggtttcagttacacgggtcaccagattgatacagatttagctgaggtaataaatcactgcttcagcaatcttaacagtcaagtcagttatctaacgatgatttgacaagtaatgaggtcacctgccatttcctcccataagtaattcaactgcatttagttcataatacatatggctagaaaagcatctaaatcaattcctacgatcagagagagagatgtccccatcaccatgaagcagaagttacaaagaaatgggggaagatgctatgcagttggccttaaacatagagaaagggactataagccaaggaatgcaggtggcatctagaggctgaaaagggcaaggaaatggattctcccctcgatcctccagaaggaacacagcccacactttgattttagatttctgacctccaggtctataagatgatcaattcatctctcgatatggcctcctcctgttcattgccactgctctccagtttagactc

SEQ ID NO: 277065 - DNA, 1628 bp, Homo sapiens
gaattttctttattaatgaccccaaccgtatttctttagatacaggagttttgaactcaaatacttaggagaaaacaagttatgactgcattatcctgcaactcattaccagtaatatattgcaaagcgaaacagcttggaaaagagggtgggagaaaagggaagtgagggagggaagataaagaaaaggaattaagttgatcaagtggaattctttttttttttttttttaattcttgggaactatattgtctgaaaaattgtctcaatttttcaagccttttgttagcattaatgcttggttttccatagtaatgatgggttcgttcctctgcatatcttctcttttatagacagatgcattccagaagcccgttccattggaacagcaccctgactatgcggaatacatcttccatccaatggacctttgtacattggaaaaggttggcctccgtcaaagaacctcaccattctagcccacagttgagatgcctaaggctcttccctcactgcctatgctctatcacaagttggacataacaatcttaaattgtttctctatattttcattgctcctttatttggatagaagaactcttgattctctaacgtctttcctttgtaacattcttccaagattgcagtggaatgttgaaattctttggtaatacttttgcgatgattctagctttttacctgcaaaagccatagcttctaagagttagtgatttgattgacttgagcgttacctcctctttctttcggaggtgctaatgagagcagcaggaaggaagaagagaaaattaagtgtctgggaagcctccagattagcaataaagatgtggcttcttagaatttgacttactctactgattaggttttttcttgaatgcctgaaggttttaaaagttcatgctaaaattccacgctgaaaattacacttggaacactgtagattgtgcacattattctgatgctgattttccaactatttgcagcaaaatatgggcagtgaaatgcatccacgaggaagaaacattacttcatattgtcttccccaataactcccaaaccataaatccagtctgtttttaggaaattgcacataccttcatggtgtggtggaaaaaaggaggcattcaaaagagatggagttggaaacctgactttatattaattaagttaagagctgtggaactttagatacattccttaacattactgtatctcagtttgcctttctgtaaaatgggtatgataataagtacttcattaaattattgtgaggtttgtgtgagaccatatgactaataataaataatgtataaatatatgaaataccctgtttggccgggcgcggtggctcaagcctgtaatcccagcagtttgggaggctgaggcgggcggatcatctgaggtcaggagttcgagaccagcctgaccaacatggagaaaccccgtctctactaaaaatacaaaatgagctgggcatggtagcacacgcctgtaattccagctattcaggaggctgaggcaggggaattgcttgaacccgggaggtggaggttgcagtgagccgagatcacgccattgcactccaacctgggcaataagagcaaaactcc

SEQ ID NO: 277066 - DNA, 4436 bp, Homo sapiens
  misc_feature (1357)..(1357): n is a, c, g, or t
  misc_feature (2241)..(2241): n is a, c, g, or t
agcaatgcacacgagcagacagagaagcaacatctttaaggtactgagggcaggagaagttaatgtagaatactatgccagaaaaaataaattcccaaaagtggaagtgaaataaggacatttagagatgtacaaaagctgaccgaattcactaccagtcaacccacactacaagaaacatcaaatgagtcctccaagcagaaggaatccaataccagatgaaaatccagatctccacgaggaaatgaagaacaccagaaatggatcggccctttcttcaaataagagcagttggaataacaaagctgttcagttgtacccttggaatccactgaaatcctgggtagggaagctccagtaccaccaactggaaagactgggaatgcctaatagctggtactggccattgtcgtaggctttgtccactctgacaaactgaagatggggactcgactcaccttcgccagccacaggaggacctccagacgaggttaggtcgacttcccgataactttagatcctgaaacctcacgggatttttcttctcttccctttgatctctcttccgcttgctcaacaggacaggactcgctgcctttctttcccgtcagaaagggatcccttgcggacaggacctaagtgagtagctggtttcccctacttgtccttccgggcctgggtgtctcgggggctcaggctgacgggagacctaactaccggcgagtgagaccagcaggagcctggaggggcgcgcaccagggtggaggtttggtgccgggggttgagaacaacagtcaaaccctcttcttcccctggcaccacgcacctgccccccgggatgccgaacgaagtggtccctaaagctcctctgcaggcccaaccgaaacaggcctgaagctccaggatgggcgagaggatcctctttgagcgaaaccagccttctgcctggctggccctggtcaacaccctgggaagaggccgatttggcggacagaacggaagaaaagacctaaaggtagaatctcatgatgtcgagatgttaaaacactcaaattttaaggttcgactgtgagggggagatagggggtctcgagctggatcgacccctgagccttcatctgcagagtcctgtgcaccagctcagaggacaggactatgtgcaccaatggttctcatcaggcggcaacttcaccctcacatgcctcccccatccctgctggtacacaagaccacgactaggggaagcccggagggagaatgttaacccctggcatctatctagtcagcagaggtgagggatgctgctaaacaccttacaatccaccggaggacacccgcccccaccgaccccgaagtngccattccctggaggtggggaaactcgcctgtagatcaatgcccacgcacttggcggacaggaaatcacgaattggccactaactggatcttggatctgaggaaaaaattccagcgtcagagggaactctcggagatttgcccagagcataaggaacgtactccttccctcagtgatggatcctcacatctgggggaaatcatagacaatttcttttgtagggcgaactctgctatacagtttatgatgtcagagtgaatactttctttgagttgcagtcagaaactgtagatttttaaaaatttaaaattcattattctctgtcagtattccaaagtgtatacagaaagctattgcactgttcaggagatggcgcttaacattttggaaattcaaggtgatgaatgtccagataagactatctctcctggtacaaagtttgacaatgctgaacatttttaaaggttctttttgatatacaaagtgcaccaatgagtgctttttaattcttacaataattctgggtgaggtaggtatttttccaattcccattttatgcttcggtagccctttgtatttatacttcaaaacacttggctctcttgtaattatttaagaaattagttgtgattatttgtttaatgtgcaggagttacaaaaggcaagctttagaacaagacagacctggttatgattcctggctctgaaagctgtacaccctgtgaccctagacaggtgttttaatgcctcgctgcctctgtttcttgctctgtaaaatgtgaacaataacagtattggcctcatgctttttttgggttttaaaagtaataatgtggacaaagatcagtggagtgcctggcatgctgaacccattccatgactgntagatatagttgttatgatttgtatcaatccattttcacactgctataaggaactacctgagactgggtaatctatgaagaaaagaggtttaattgactcacagttctgcatggctgggagtcctcaggaacttacaatcatggcagaaggggaagcaagacatttcttatatggcagcaggacagaaagagagagagtgaagggggaagtgccacacacttccaaacaaccatatcttgtggttaattaaaaagtactcattggtgtgccttgtatagaaaaaaatatacactcactatcatgagaacagcaaggagggagtctgcccccaagattcaatcacctcccagtagacccctcccctgacatgtggggattacaattcaagatgagatttgggtggggaaacagagtcaaaccatatcgtgattgttctataataaagagatgcccacatgtgtttcatcagggacagtgctcattaaccagttgtcctgccgtaattattaatagtatcccctttgctttcaaaagtgtcctagtttacaaaaagtatagaaatggaggacagaatagtggttgcccaagattggaaaagggtaagggtaaagggtgcagaggtggatgtggttataaaaggcaacatgggagatcctcgtagtgaaggaactgtttagtatctccactgtggtggtagatacccgaacctaaacatgtgaaaaattgcatgaaactaaacacacacacaaacaagtacaagttaagttaggaaaatccaaataagatttctacattgtatcaataggtatatcttgattatgatattgcaagatggtactattcaaggaaactgggtagaggctacatgagactcccctgtattatttcctataactccatgtgaatctacaaggatctcaggattaaggaagatatcctagtttggaagataaaaaatatatcccagtagtaatatccactgtcccaccagggcctgactaccttctataaaaagaagtgcctttgttcccctcaagttcctttatttggttttattcttcttcacagtacctacctccacttggcagattacatttattttttcatctttcaacagctatttactgaatgcctactagatgccaggcttgagatctagcaatgaacaagatctctgtgaaacttacattccaggaggagaaataaataataaaccaaaaatataatcagtaaattatttaatatgctgggaaacaatatgtgtaatggaagaaatatgtaaagtgatggattagggttctccagagaaacagaaccaacaattgactcatgtgattatggaggctgagaagtctcaagatcacagttggcaagcttgagacacaggagagcccatggtgtgtttctgatttgagtccaaaggcctgagaaccaggagagatgatggtgtgattacagttcaaaagctggcaggcttgaggcccaggaagagccagtgttgcagttcaattccaaaggcaggaaaaggctgatatctcagctgaagcaatcaggcagaaggagctctctcttactcatgggcaggtcagacttttggttctattcaggcctttaagtgattggatgaggatcatctactggggaaagaaataagctttattcagtgtactgattcaaatgttaatctcatccaaaaccatgctcacagacacacccagcataatgtttgaccaagtatctgggcaccttgtggttcagtcaaattaacacatattaactaccttagcaagatgaaaagcagtgaatgcaggatggtggttgaaattttaaatacgttggttatatagtctcattgaaaaaggaacatttgagtgaagacttgaaggggtggtggaataaaccatttatttgcttattgcctgtctccctctatcagaatgaaagcttcatgaagcgagagacttaatttttatctgttatatccctagtgcctggtgcagggtaagtactcaaaaatatttgttgagtgaataagtaatgattgaggatggggactggtttgtatctggttatatctcttgtccttagcacagtacctggcacatcctaagccatccaaaagagttggttatatgattgtctttgaattctatgactgtttataatatacagtaaacttcactgaagacactga

SEQ ID NO: 277067 - DNA, 4170 bp, Homo sapiens
  misc_feature (1091)..(1091): n is a, c, g, or t
  misc_feature (1975)..(1975): n is a, c, g, or t
agcaatgcacacgagcagacagagaagcaacatctttaaggtactgagggcaggagaagttaatgtagaatactatgccagaaaaaataaattcccaaaagtggaagtgaaataaggacatttagagatgtacaaaagctgaccgaattcactaccagtcaacccacactacaagaaacatcaaatgagtcctccaagcagaaggaatccaataccagatgaaaatccagatctccacgaggaaatgaagaacaccagaaatggatcggccctttcttcaaataagagcagttggaataacaaagctgttcagttgtacccttggaatccactgaaatcctgggtagggaagctccagtaccaccaactggaaagactgggaatgcctaatagctggtactggccattgtcgtaggctttgtccactctgacaaactgaagatggggactcgactcaccttcgccagccacaggaggacctccagacgaggacaggactcgctgcctttctttcccgtcagaaagggatcccttgcggacaggacctaagcaccacgcacctgccccccgggatgccgaacgaagtggtccctaaagctcctctgcaggcccaaccgaaacaggcctgaagctccaggatgggcgagaggatcctctttgagcgaaaccagccttctgcctggctggccctggtcaacaccctgggaagaggccgatttggcggacagaacggaagaaaagacctaaaggtagaatctcatgatgtcgagatgttaaaacactcaaattttaaggttcgactgtgagggggagatagggggtctcgagctggatcgacccctgagccttcatctgcagagtcctgtgcaccagctcagaggacaggactatgtgcaccaatggttctcatcaggcggcaacttcaccctcacatgcctcccccatccctgctggtacacaagaccacgactaggggaagcccggagggagaatgttaacccctggcatctatctagtcagcagaggtgagggatgctgctaaacaccttacaatccaccggaggacacccgcccccaccgaccccgaagtngccattccctggaggtggggaaactcgcctgtagatcaatgcccacgcacttggcggacaggaaatcacgaattggccactaactggatcttggatctgaggaaaaaattccagcgtcagagggaactctcggagatttgcccagagcataaggaacgtactccttccctcagtgatggatcctcacatctgggggaaatcatagacaatttcttttgtagggcgaactctgctatacagtttatgatgtcagagtgaatactttctttgagttgcagtcagaaactgtagatttttaaaaatttaaaattcattattctctgtcagtattccaaagtgtatacagaaagctattgcactgttcaggagatggcgcttaacattttggaaattcaaggtgatgaatgtccagataagactatctctcctggtacaaagtttgacaatgctgaacatttttaaaggttctttttgatatacaaagtgcaccaatgagtgctttttaattcttacaataattctgggtgaggtaggtatttttccaattcccattttatgcttcggtagccctttgtatttatacttcaaaacacttggctctcttgtaattatttaagaaattagttgtgattatttgtttaatgtgcaggagttacaaaaggcaagctttagaacaagacagacctggttatgattcctggctctgaaagctgtacaccctgtgaccctagacaggtgttttaatgcctcgctgcctctgtttcttgctctgtaaaatgtgaacaataacagtattggcctcatgctttttttgggttttaaaagtaataatgtggacaaagatcagtggagtgcctggcatgctgaacccattccatgactgntagatatagttgttatgatttgtatcaatccattttcacactgctataaggaactacctgagactgggtaatctatgaagaaaagaggtttaattgactcacagttctgcatggctgggagtcctcaggaacttacaatcatggcagaaggggaagcaagacatttcttatatggcagcaggacagaaagagagagagtgaagggggaagtgccacacacttccaaacaaccatatcttgtggttaattaaaaagtactcattggtgtgccttgtatagaaaaaaatatacactcactatcatgagaacagcaaggagggagtctgcccccaagattcaatcacctcccagtagacccctcccctgacatgtggggattacaattcaagatgagatttgggtggggaaacagagtcaaaccatatcgtgattgttctataataaagagatgcccacatgtgtttcatcagggacagtgctcattaaccagttgtcctgccgtaattattaatagtatcccctttgctttcaaaagtgtcctagtttacaaaaagtatagaaatggaggacagaatagtggttgcccaagattggaaaagggtaagggtaaagggtgcagaggtggatgtggttataaaaggcaacatgggagatcctcgtagtgaaggaactgtttagtatctccactgtggtggtagatacccgaacctaaacatgtgaaaaattgcatgaaactaaacacacacacaaacaagtacaagttaagttaggaaaatccaaataagatttctacattgtatcaataggtatatcttgattatgatattgcaagatggtactattcaaggaaactgggtagaggctacatgagactcccctgtattatttcctataactccatgtgaatctacaaggatctcaggattaaggaagatatcctagtttggaagataaaaaatatatcccagtagtaatatccactgtcccaccagggcctgactaccttctataaaaagaagtgcctttgttcccctcaagttcctttatttggttttattcttcttcacagtacctacctccacttggcagattacatttattttttcatctttcaacagctatttactgaatgcctactagatgccaggcttgagatctagcaatgaacaagatctctgtgaaacttacattccaggaggagaaataaataataaaccaaaaatataatcagtaaattatttaatatgctgggaaacaatatgtgtaatggaagaaatatgtaaagtgatggattagggttctccagagaaacagaaccaacaattgactcatgtgattatggaggctgagaagtctcaagatcacagttggcaagcttgagacacaggagagcccatggtgtgtttctgatttgagtccaaaggcctgagaaccaggagagatgatggtgtgattacagttcaaaagctggcaggcttgaggcccaggaagagccagtgttgcagttcaattccaaaggcaggaaaaggctgatatctcagctgaagcaatcaggcagaaggagctctctcttactcatgggcaggtcagacttttggttctattcaggcctttaagtgattggatgaggatcatctactggggaaagaaataagctttattcagtgtactgattcaaatgttaatctcatccaaaaccatgctcacagacacacccagcataatgtttgaccaagtatctgggcaccttgtggttcagtcaaattaacacatattaactaccttagcaagatgaaaagcagtgaatgcaggatggtggttgaaattttaaatacgttggttatatagtctcattgaaaaaggaacatttgagtgaagacttgaaggggtggtggaataaaccatttatttgcttattgcctgtctccctctatcagaatgaaagcttcatgaagcgagagacttaatttttatctgttatatccctagtgcctggtgcagggtaagtactcaaaaatatttgttgagtgaataagtaatgattgaggatggggactggtttgtatctggttatatctcttgtccttagcacagtacctggcacatcctaagccatccaaaagagttggttatatgattgtctttgaattctatgactgtttataatatacagtaaacttcactgaagacactga

SEQ ID NO: 277068 - DNA, 4121 bp, Homo sapiens
  misc_feature (1357)..(1357): n is a, c, g, or t
  misc_feature (2241)..(2241): n is a, c, g, or t
agcaatgcacacgagcagacagagaagcaacatctttaaggtactgagggcaggagaagttaatgtagaatactatgccagaaaaaataaattcccaaaagtggaagtgaaataaggacatttagagatgtacaaaagctgaccgaattcactaccagtcaacccacactacaagaaacatcaaatgagtcctccaagcagaaggaatccaataccagatgaaaatccagatctccacgaggaaatgaagaacaccagaaatggatcggccctttcttcaaataagagcagttggaataacaaagctgttcagttgtacccttggaatccactgaaatcctgggtagggaagctccagtaccaccaactggaaagactgggaatgcctaatagctggtactggccattgtcgtaggctttgtccactctgacaaactgaagatggggactcgactcaccttcgccagccacaggaggacctccagacgaggttaggtcgacttcccgataactttagatcctgaaacctcacgggatttttcttctcttccctttgatctctcttccgcttgctcaacaggacaggactcgctgcctttctttcccgtcagaaagggatcccttgcggacaggacctaagtgagtagctggtttcccctacttgtccttccgggcctgggtgtctcgggggctcaggctgacgggagacctaactaccggcgagtgagaccagcaggagcctggaggggcgcgcaccagggtggaggtttggtgccgggggttgagaacaacagtcaaaccctcttcttcccctggcaccacgcacctgccccccgggatgccgaacgaagtggtccctaaagctcctctgcaggcccaaccgaaacaggcctgaagctccaggatgggcgagaggatcctctttgagcgaaaccagccttctgcctggctggccctggtcaacaccctgggaagaggccgatttggcggacagaacggaagaaaagacctaaaggtagaatctcatgatgtcgagatgttaaaacactcaaattttaaggttcgactgtgagggggagatagggggtctcgagctggatcgacccctgagccttcatctgcagagtcctgtgcaccagctcagaggacaggactatgtgcaccaatggttctcatcaggcggcaacttcaccctcacatgcctcccccatccctgctggtacacaagaccacgactaggggaagcccggagggagaatgttaacccctggcatctatctagtcagcagaggtgagggatgctgctaaacaccttacaatccaccggaggacacccgcccccaccgaccccgaagtngccattccctggaggtggggaaactcgcctgtagatcaatgcccacgcacttggcggacaggaaatcacgaattggccactaactggatcttggatctgaggaaaaaattccagcgtcagagggaactctcggagatttgcccagagcataaggaacgtactccttccctcagtgatggatcctcacatctgggggaaatcatagacaatttcttttgtagggcgaactctgctatacagtttatgatgtcagagtgaatactttctttgagttgcagtcagaaactgtagatttttaaaaatttaaaattcattattctctgtcagtattccaaagtgtatacagaaagctattgcactgttcaggagatggcgcttaacattttggaaattcaaggtgatgaatgtccagataagactatctctcctggtacaaagtttgacaatgctgaacatttttaaaggttctttttgatatacaaagtgcaccaatgagtgctttttaattcttacaataattctgggtgaggtaggtatttttccaattcccattttatgcttcggtagccctttgtatttatacttcaaaacacttggctctcttgtaattatttaagaaattagttgtgattatttgtttaatgtgcaggagttacaaaaggcaagctttagaacaagacagacctggttatgattcctggctctgaaagctgtacaccctgtgaccctagacaggtgttttaatgcctcgctgcctctgtttcttgctctgtaaaatgtgaacaataacagtattggcctcatgctttttttgggttttaaaagtaataatgtggacaaagatcagtggagtgcctggcatgctgaacccattccatgactgntagatatagttgttatgatttgtatcaatccattttcacactgctataaggaactacctgagactgggtaatctatgaagaaaagaggtttaattgactcacagttctgcatggctgggagtcctcaggaacttacaatcatggcagaaggggaagcaagacatttcttatatggcagcaggacagaaagagagagagtgaagggggaagtgccacacacttccaaacaaccatatcttgtggttaattaaaaagtactcattggtgtgccttgtatagaaaaaaatatacactcactatcatgagaacagcaaggagggagtctgcccccaagattcaatcacctcccagtagacccctcccctgacatgtggggattacaattcaagatgagatttgggtggggaaacagagtcaaaccatatcgtgattgttctataataaagagatgcccacatgtgtttcatcagggacagtgctcattaaccagttgtcctgccgtaattattaatagtatcccctttgctttcaaaagtgtcctagtttacaaaaagtatagaaatggaggacagaatagtggttgcccaagattggaaaagggtaagggtaaagggtgcagaggtggatgtggttataaaaggcaacatgggagatcctcgtagtgaaggaactgtttagtatctccactgtggtggtagatacccgaacctaaacatgtgaaaaattgcatgaaactaaacacacacacaaacaagtacaagttaagttaggaaaatccaaataagatttctacattgtatcaataggtatatcttgattatgatattgcaagatggtactattcaaggaaactgggtagaggctacatgagactcccctgtattatttcctataactccatgtgaatctacaaggatctcaggattaaggaagatatcctagtttggaagataaaaaatatatcccagtagtaatatccactgtcccaccagggcctgactaccttctataaaaagaagtgcctttgttcccctcaagttcctttatttggttttattcttcttcacagtacctacctccacttggcagattacatttattttttcatctttcaacagctatttactgaatgcctactagatgccaggcttgagatctagcaatgaacaagatctctgtgaaacttacattccaggaggagaaataaataataaaccaaaaatataatcagtaaattatttaatatgctgggaaacaatatgtgtaatggaagaaatatgtaaagtgatggattagggttctccagagaaacagaaccaacaattgactcatgtgattatggaggctgagaagtctcaagatcacagttggcaagcttgagacacaggagagcccatggtgtgtttctgatttgagtccaaaggcctgagaaccaggagagatgatggtgtgattacagttcaaaagctggcaggcttgaggcccaggaagagccagtgttgcagttcaattccaaaggcaggaaaaggctgatatctcagctgaagcaatcaggcagaaggagctctctcttactcatgggcaggtcagacttttggttctattcaggcctttaagtgattggatgaggatcatttgttaggagggtctcagtgcagaagccaagccagaggggtgcaggcaaaatacagcactggcaggagagtccctgaaggctgtgacccttctgcagacaacagcatcactatgctaggcacaaatgtgtcagttctttaggtcttttcttccgttctgtcctccaaatcggcctcttccgagtgtgttgaccagggccagccaggcagaaggctggtttcgctcaaagaggatcctctcgccca

SEQ ID NO: 277069 - DNA, 4266 bp, Homo sapiens
  misc_feature (1187)..(1187): n is a, c, g, or t
  misc_feature (2071)..(2071): n is a, c, g, or t
gagatacagaatggggaagaacaagttggaaccagaaaactgatttcagggtctggcacttgaatgtctgattttggagaaagagaagacactgatcggccctttcttcaaataagagcagttggaataacaaagctgttcagttgtacccttggaatccactgaaatcctgggtagggaagctccagtaccaccaactggaaagactgggaatgcctaatagctggtactggccattgtcgtaggctttgtccactctgacaaactgaagatggggactcgactcaccttcgccagccacaggaggacctccagacgaggttaggtcgacttcccgataactttagatcctgaaacctcacgggatttttcttctcttccctttgatctctcttccgcttgctcaacaggacaggactcgctgcctttctttcccgtcagaaagggatcccttgcggacaggacctaagtgagtagctggtttcccctacttgtccttccgggcctgggtgtctcgggggctcaggctgacgggagacctaactaccggcgagtgagaccagcaggagcctggaggggcgcgcaccagggtggaggtttggtgccgggggttgagaacaacagtcaaaccctcttcttcccctggcaccacgcacctgccccccgggatgccgaacgaagtggtccctaaagctcctctgcaggcccaaccgaaacaggcctgaagctccaggatgggcgagaggatcctctttgagcgaaaccagccttctgcctggctggccctggtcaacaccctgggaagaggccgatttggcggacagaacggaagaaaagacctaaaggtagaatctcatgatgtcgagatgttaaaacactcaaattttaaggttcgactgtgagggggagatagggggtctcgagctggatcgacccctgagccttcatctgcagagtcctgtgcaccagctcagaggacaggactatgtgcaccaatggttctcatcaggcggcaacttcaccctcacatgcctcccccatccctgctggtacacaagaccacgactaggggaagcccggagggagaatgttaacccctggcatctatctagtcagcagaggtgagggatgctgctaaacaccttacaatccaccggaggacacccgcccccaccgaccccgaagtngccattccctggaggtggggaaactcgcctgtagatcaatgcccacgcacttggcggacaggaaatcacgaattggccactaactggatcttggatctgaggaaaaaattccagcgtcagagggaactctcggagatttgcccagagcataaggaacgtactccttccctcagtgatggatcctcacatctgggggaaatcatagacaatttcttttgtagggcgaactctgctatacagtttatgatgtcagagtgaatactttctttgagttgcagtcagaaactgtagatttttaaaaatttaaaattcattattctctgtcagtattccaaagtgtatacagaaagctattgcactgttcaggagatggcgcttaacattttggaaattcaaggtgatgaatgtccagataagactatctctcctggtacaaagtttgacaatgctgaacatttttaaaggttctttttgatatacaaagtgcaccaatgagtgctttttaattcttacaataattctgggtgaggtaggtatttttccaattcccattttatgcttcggtagccctttgtatttatacttcaaaacacttggctctcttgtaattatttaagaaattagttgtgattatttgtttaatgtgcaggagttacaaaaggcaagctttagaacaagacagacctggttatgattcctggctctgaaagctgtacaccctgtgaccctagacaggtgttttaatgcctcgctgcctctgtttcttgctctgtaaaatgtgaacaataacagtattggcctcatgctttttttgggttttaaaagtaataatgtggacaaagatcagtggagtgcctggcatgctgaacccattccatgactgntagatatagttgttatgatttgtatcaatccattttcacactgctataaggaactacctgagactgggtaatctatgaagaaaagaggtttaattgactcacagttctgcatggctgggagtcctcaggaacttacaatcatggcagaaggggaagcaagacatttcttatatggcagcaggacagaaagagagagagtgaagggggaagtgccacacacttccaaacaaccatatcttgtggttaattaaaaagtactcattggtgtgccttgtatagaaaaaaatatacactcactatcatgagaacagcaaggagggagtctgcccccaagattcaatcacctcccagtagacccctcccctgacatgtggggattacaattcaagatgagatttgggtggggaaacagagtcaaaccatatcgtgattgttctataataaagagatgcccacatgtgtttcatcagggacagtgctcattaaccagttgtcctgccgtaattattaatagtatcccctttgctttcaaaagtgtcctagtttacaaaaagtatagaaatggaggacagaatagtggttgcccaagattggaaaagggtaagggtaaagggtgcagaggtggatgtggttataaaaggcaacatgggagatcctcgtagtgaaggaactgtttagtatctccactgtggtggtagatacccgaacctaaacatgtgaaaaattgcatgaaactaaacacacacacaaacaagtacaagttaagttaggaaaatccaaataagatttctacattgtatcaataggtatatcttgattatgatattgcaagatggtactattcaaggaaactgggtagaggctacatgagactcccctgtattatttcctataactccatgtgaatctacaaggatctcaggattaaggaagatatcctagtttggaagataaaaaatatatcccagtagtaatatccactgtcccaccagggcctgactaccttctataaaaagaagtgcctttgttcccctcaagttcctttatttggttttattcttcttcacagtacctacctccacttggcagattacatttattttttcatctttcaacagctatttactgaatgcctactagatgccaggcttgagatctagcaatgaacaagatctctgtgaaacttacattccaggaggagaaataaataataaaccaaaaatataatcagtaaattatttaatatgctgggaaacaatatgtgtaatggaagaaatatgtaaagtgatggattagggttctccagagaaacagaaccaacaattgactcatgtgattatggaggctgagaagtctcaagatcacagttggcaagcttgagacacaggagagcccatggtgtgtttctgatttgagtccaaaggcctgagaaccaggagagatgatggtgtgattacagttcaaaagctggcaggcttgaggcccaggaagagccagtgttgcagttcaattccaaaggcaggaaaaggctgatatctcagctgaagcaatcaggcagaaggagctctctcttactcatgggcaggtcagacttttggttctattcaggcctttaagtgattggatgaggatcatctactggggaaagaaataagctttattcagtgtactgattcaaatgttaatctcatccaaaaccatgctcacagacacacccagcataatgtttgaccaagtatctgggcaccttgtggttcagtcaaattaacacatattaactaccttagcaagatgaaaagcagtgaatgcaggatggtggttgaaattttaaatacgttggttatatagtctcattgaaaaaggaacatttgagtgaagacttgaaggggtggtggaataaaccatttatttgcttattgcctgtctccctctatcagaatgaaagcttcatgaagcgagagacttaatttttatctgttatatccctagtgcctggtgcagggtaagtactcaaaaatatttgttgagtgaataagtaatgattgaggatggggactggtttgtatctggttatatctcttgtccttagcacagtacctggcacatcctaagccatccaaaagagttggttatatgattgtctttgaattctatgactgtttataatatacagtaaacttcactgaagacactga

SEQ ID NO: 277070 - DNA, 2472 bp, Homo sapiens
agcgggactcccggcggaagcgcgcggcgcgcggggaggcccgaactgatccgcggcggccggagaccgctggggacagacaggtagcgccgtcacccgcgggatccgcagctccatctgccgggcgaaggggctctggtcgggagagggctcagcgggcggaagcgcgtctctagagaagggtgcggtcgataaccgggggcgcccctggaaggccgaggatgggcagcagctcgctgtccgaggactaccgccagtgcctggagcgcgagctgcgacggggccgcgcgggcgtgtgcggggacccctcgctgcgcgcggtgctctggcagatcctggtggaggacttcgacctgcacggggcgctgcaggacgacgcgctggctctgctcaccgacgggctgtggggccgcgccgacctggcgcccgcgctacgcggcctggctcgcgccttcgagcttctggagctcgccgcggtgcacctgtacctgctgccctggaggaaggagttcaccaccatcaagaccttctctgggggctacgtgcacgtgctgaagggtgtgctctcagacgacctcctcctgaagagcttccagaagatgggctacgtacgcagagacagccatcggctcatggtgaccgccctgccccccgcctgccagctggtgcaggtggccctgggctgcttcgccctccggctggagtgtgagatcctgggtgaggtgctggcccagctgggcaccagtgtgctgccagctgaggagctgctgcaggcacggcgtgccagcggggacgtggcctcctgtgtggcctggctgcagcagcggctggcccaggatgaggagccgccacccctgcccccccgaggctcccctgctgcttacagggccccactggacttataccgggacttgcaggaagacgaggggtcggaggacgccagcctgtatggggagccgtcaccaggccctgactcgcccccggcggagctggcctacaggccaccactctgggagcagagtgccaaactgtggggcactgggggccgggcctgggagcccccagctgaggagctgccgcaggccagcagcccaccatatggggccttggaggaggggctggaacctgaaccttccgccttctccttcctctctctgcgccgtgagctgagtaggcctggggacctggccacccctgaaagctctgcagcggccagcccgaggcgtattcgggcagagggggtaccagcctcagcctataggtctgtctcggagcccccaggctaccaggcacacagctgcctgtcccctggcgccctgcccaccctctgctgcgacacctgtcgccagctgcatgctgcccactgtgcagccctgcccgcctgccgtccaggccactcgctgcgtgtgctgcttggcgacgcccagcggcgcttgtggctacagcgtgcacagatggacactctgctctacaacagccccggggcccggccctaggccagctgggccccaggtcaagggctcttgggagacagctcccgtggtgcttctctttgctggggaggggtctgggcctctggttgccttgtccctgggggagtcctgggcacagcagggggttggagagtccaggccaacccttgctggaggtgggactctctgtatatggaaggctccaagggcagcaggcctaagccggccagcaggagcctttccacatttccccaccctcggaacccagacgcatgcccacatgtgctgggtagaggggtccagcctgttccagccagtgcctgaacctgtccctgagaaggaccctgtgccccaaggcccgtggctcctggcctgctccctgcagtacggagtacggggctcaggacttgggggtcctccacgtgtcccagggattctccacacgagtgtcctcaagggcctgttggtgacaccgagctccccccaccccaagctctgctggagccaatctgcggggctctgccgggtgcacggctgacctggcttcggggacgccggccctccccttgggtgtcacagcagctgggcccacagacaggaaatgacctgacctcaaaccagatgtggaggtgcacgagaggcgcaggaacgggcagtggctgacagctgggaaggccctgagcgtcactgctgctgggcggaagggcctgtggacagcccacccaggcggcggggtcttggtgggtccagtggtaatggtgcccctcccctccattccctgtgggtgcagcccacaggctggcgaggaggtgcctctgccctaccctcgggtctggcgagggagagggcagggtgcatccactgtgacagcccctctgggcccacaactccctgaccctggaagctgagcctgctttcctgaccctccgccccaccccctcctccccagaacactcagagggacggtcaacatcagagcacattaaacgctggtgaaacc

SEQ ID NO: 277071 - DNA, 2335 bp, Homo sapiens
agcgggactcccggcggaagcgcgcggcgcgcggggaggcccgaactgatccgcggcggccggagaccgctggggacagacaggatgggcagcagctcgctgtccgaggactaccgccagtgcctggagcgcgagctgcgacggggccgcgcgggcgtgtgcggggacccctcgctgcgcgcggtgctctggcagatcctggtggaggacttcgacctgcacggggcgctgcaggacgacgcgctggctctgctcaccgacgggctgtggggccgcgccgacctggcgcccgcgctacgcggcctggctcgcgccttcgagcttctggagctcgccgcggtgcacctgtacctgctgccctggaggaaggagttcaccaccatcaagaccttctctgggggctacgtgcacgtgctgaagggtgtgctctcagacgacctcctcctgaagagcttccagaagatgggctacgtacgcagagacagccatcggctcatggtgaccgccctgccccccgcctgccagctggtgcaggtggccctgggctgcttcgccctccggctggagtgtgagatcctgggtgaggtgctggcccagctgggcaccagtgtgctgccagctgaggagctgctgcaggcacggcgtgccagcggggacgtggcctcctgtgtggcctggctgcagcagcggctggcccaggatgaggagccgccacccctgcccccccgaggctcccctgctgcttacagggccccactggacttataccgggacttgcaggaagacgaggggtcggaggacgccagcctgtatggggagccgtcaccaggccctgactcgcccccggcggagctggcctacaggccaccactctgggagcagagtgccaaactgtggggcactgggggccgggcctgggagcccccagctgaggagctgccgcaggccagcagcccaccatatggggccttggaggaggggctggaacctgaaccttccgccttctccttcctctctctgcgccgtgagctgagtaggcctggggacctggccacccctgaaagctctgcagcggccagcccgaggcgtattcgggcagagggggtaccagcctcagcctataggtctgtctcggagcccccaggctaccaggcacacagctgcctgtcccctggcgccctgcccaccctctgctgcgacacctgtcgccagctgcatgctgcccactgtgcagccctgcccgcctgccgtccaggccactcgctgcgtgtgctgcttggcgacgcccagcggcgcttgtggctacagcgtgcacagatggacactctgctctacaacagccccggggcccggccctaggccagctgggccccaggtcaagggctcttgggagacagctcccgtggtgcttctctttgctggggaggggtctgggcctctggttgccttgtccctgggggagtcctgggcacagcagggggttggagagtccaggccaacccttgctggaggtgggactctctgtatatggaaggctccaagggcagcaggcctaagccggccagcaggagcctttccacatttccccaccctcggaacccagacgcatgcccacatgtgctgggtagaggggtccagcctgttccagccagtgcctgaacctgtccctgagaaggaccctgtgccccaaggcccgtggctcctggcctgctccctgcagtacggagtacggggctcaggacttgggggtcctccacgtgtcccagggattctccacacgagtgtcctcaagggcctgttggtgacaccgagctccccccaccccaagctctgctggagccaatctgcggggctctgccgggtgcacggctgacctggcttcggggacgccggccctccccttgggtgtcacagcagctgggcccacagacaggaaatgacctgacctcaaaccagatgtggaggtgcacgagaggcgcaggaacgggcagtggctgacagctgggaaggccctgagcgtcactgctgctgggcggaagggcctgtggacagcccacccaggcggcggggtcttggtgggtccagtggtaatggtgcccctcccctccattccctgtgggtgcagcccacaggctggcgaggaggtgcctctgccctaccctcgggtctggcgagggagagggcagggtgcatccactgtgacagcccctctgggcccacaactccctgaccctggaagctgagcctgctttcctgaccctccgccccaccccctcctccccagaacactcagagggacggtcaacatcagagcacattaaacgctggtgaaacc

SEQ ID NO: 277072 - DNA, 1005 bp, Homo sapiens
agcgggactcccggcggaagcgcgcggcgcgcggggaggcccgaactgatccgcggcggccggagaccgctggggacagacaggatgggcagcagctcgctgtccgaggactaccgccagtgcctggagcgcgagctgcgacggggccgcgcgggcgtgtgcggggacccctcgctgcgcgcggtgctctggcagatcctggtggaggacttcgacctgcacggggcgctgcaggacgacgcgctggctctgctcaccgacgggctgtggggccgcgccgacctggcgcccgcgctacgcggcctggctcgcgccttcgagcttctggagctcgccgcggtgcacctgtacctgctgccctggaggaaggagttcaccaccatcaagaccttctctgggggctacgtgcacgtgctgaagggtgtgctctcagacgacctcctcctgaagagcttccagaagatgggctacgtacgcagagacagccatcggctcatgctctgctggagccaatctgcggggctctgccgggtgcacggctgacctggcttcggggacgccggccctccccttgggtgtcacagcagctgggcccacagacaggaaatgacctgacctcaaaccagatgtggaggtgcacgagaggcgcaggaacgggcagtggctgacagctgggaaggccctgagcgtcactgctgctgggcggaagggcctgtggacagcccacccaggcggcggggtcttggtgggtccagtggtaatggtgcccctcccctccattccctgtgggtgcagcccacaggctggcgaggaggtgcctctgccctaccctcgggtctggcgagggagagggcagggtgcatccactgtgacagcccctctgggcccacaactccctgaccctggaagctgagcctgctttcctgaccctccgccccaccccctcctccccagaacactcagagggacggtcaacatcagagcacattaaacgctggtgaaacc

SEQ ID NO: 277073 - DNA, 3749 bp, Homo sapiens
  misc_feature (3073)..(3073): n is a, c, g, or t
agattgtgggagtggagaagagaatgcctgtgtcctgagataattctgtaagtaaatgccagtccctaggaagagagaaccaaaatgtctaccggaccagatgtcaaggctacagtgggggacatttccagtgatggcaatttaaacgtggctcaagaggaatgctccaggaaagggatagtggatgaattcttcccgctgttgtcaaactaatgtatatggactcaaccacagggatatccccagagctcctatggaacactagcaaattttgtgtttttgttcagtccgacatgggctggccctcatcttgcagctctgtaatttttcaatttacacccaacaaatgaacttgagcattgccatcccagctatggtgaacaacacagccccacctagccagcccaatgcctccacagaacggccctccactgactcccagggctactggaatgaaactctaaaagaatttaaagcaatggcccctgcatatgactggagtcctgaaatccagggaatcatcctcagctccctcaactatggctcattcttggctccaatccccagtggctatgtggctggaatatttggagccaagtatgtggttggtgctggcttgtttatttcctcattcctgaccctcttcattccactggcagctaatgcgggagtggccttgctcattgtcctccggattgtacaaggcatagcccaggttatggtattaactggtcagtattcaatttgggtcaaatgggctcccccactggaaaggagtcaactcaccaccattgctggatcagggtcaatgctggggtccttcattgttctacttgctggtggtctcctctgccagaccataggatggccttacgtcttctatatctttggaggaattggctgtgcttgttgtcctctctggtttcctctcatttatgatgatcctgtgaatcatccctttatcagtgctggtgagaagagatacattgtgtgttcattggctcagcaggactgttcaccaggctggtctcttcccattagggctatgatcaaatccttaccactctgggccattttagtctcttatttctgtgaatactggcttttttataccattatggcgtacacaccaacgtacatcagctcggtacttcaagccaacctcagagatagtgggatcctgtctgccttgccgtttgttgttggatgtatctgcattatccttggaggtctactggcagactttcttctctccagaaaaatcctcagactcatcaccatcaggaaactcttcactgccattggggttctcttcccatccgtgatcctcgtgtccctgccctgggtcagatccagccacagcatgaccatgaccttcttggtgctgtcttctgccatcagcagcttctgtgaatcaggagcccttgttaacttcttggatattgctcctcggtacactggctttctcaaaggactattgcaagtctttgcacacatagctggagccatctctcctactgctgctggatttttcatcagtcaggattcagagtttggttggagaaatgtcttcttgctttcagctgctgttaacatatcgggcctggttttctacctcatctttggccgagcagatgtgcaggactgggctaaagagcagacattcacccacctctgagcaaaccgagagatgtgctagatcctggtgcttagttcatcattgttttccctcacagacatttctctttcatgcctgcttgactgataagccattagctagaccctgactatgtaacgctaaagattttaccatgcctggaaattttacaggggaagaaaacacgctagttatttaactgcaagctactaaaagcataggtgtgttgagatttctgtgttctccactcttccactgttatcctagtaaaagcatcaggggctggggacaatttctttccaaagcaaaagaggaagccagaccttgggaccgagaactgagaatcacaagggagttgcgcccaacatgcagaacatgaatcctctgagctgtcctcaaaagaaagccccaaacaacagaaagcatagtgttttccattgttggtgaaaaatgtcaaggaggaaagaacaataatgattccatcatgataagaggaatgaacgtgtctgcaactaatgggagcaagatagtacactttaactctttcagacaacttgcattctgtggatgccagctttggaatcagagccgcctctggaatacctgtgcttccagagttagcttttggacagttaccttctttctggccatcttgacttctgccccacatctgctttttggctttgtgcagatctttaacatgttagtgaacagacattgcccagtgtctcttctagcccctccaacagttcttcatgtagcactgcttttggacagtgacccatgatatctgccttcgtttgcccctctgactgttggaatcccacgcaccattcagtaggattcaattcaatgtggaaccattcaacattcacctcattaacctaaaatgtctcccaaagatgtatgtaagacacacactgccctaacctcactccaaatgtctggagaaatgtgtgtagtgcttttgttaaagcccctatatgggcagcatggaggatcataagatagcaaaaccatttcaacactaaatgaatattaatgtacacacaccttgtgtggatggcagaaatcaaatcatacacagtattaaggagttcagtgtctcgggagggcagataactttaatcaaagtatcacacaagtgaatatgtaataacaactgtagaaataatgagtggttacatgggttatgagagtggatgataagtgcactaatctgagtgtaaggaagggccacccctgcaaagtttcagctgagctgggatctgaaggataatagttaactgttgtgggagactgagaggagaatattttaggaagaaagaacagcataagcaaaagtttcatggcaggagggagaaattagctatggccagagtatagagaataagggaagtatgatttgtgaggagnctgtagaagaattaaggtcaggagcacacaggatgatgtaggcccagtgaagtgcgttggtctttattttgaaatcagtaggaagtgtcctggttttcaaaggcactctgcatgagagattaggttggagtaggagcttacagtgtagtccaggagagaacaatggcccctggcatgaggcaatagacatggtgagaggtgaatggattatttgatttaggtggattatttgatttagggaataaacctgacgggtcctattactaagtgagagagtgaaagatgtccagagtaactcctgagttttggtttgctattatattaatggggatgcctctaacacagacagcaacacagatagcaattatatccaagtgtagacaacaagaaggaaaatggacacatgactctggatttctcttgtgagacctgggctccatttacaaacgtataaatcatcttgatataggtagtgattacaatttttgcatggatgagtcatccatgggtgaaagtggcataagaaaaggaagcttgggaataagccttaaagaattccagtatttaatggtcagctggaggatgattagcagaaagaaagaaagaaagaaagaaaagaaagagagagagagagagagagtgagtgtatggtgtttcggcgtgtgcgggatcctct

SEQ ID NO: 277074 - DNA, 445 bp, Homo sapiens
ggtcggggagggagcaggaggacacagagccaaagcctttctgaaccaagagggacaggaattgggtgaccgttaataacttgtaattttctgcctccaggattcagagtttggttggagaaatgtcttcttgctttcagctgctgttaacatatcgggcctggttttctacctcatctttggccgagcagatgtgcaggactgggctaaagagcagacattcacccacctctgagcaaaccgagagatgtgctagatcctggtgcttagttcatcattgttttccctcacagacatttctctttcatgcctgcttgactgataagccattagctagaccctgactatgtaacgctaaagattttaccatgcctggaaattttacaggggaagaaaacacgctagttatttaactgcaagctactaaaagcataggtgtgttgag

SEQ ID NO: 277075 - DNA, 483 bp, Homo sapiens
cgactgcgcagtgacatccgttatcatcgtgcatagcggttcctagcgtaagagactctcagctgatatcgtgatacctacgttcctcatgcgcttggcacagatccagccacagcatgaccatgaccttcttggtgctgtcttctgccatcagcagcttctgtgaatcaggagcccttgttaacttcttggatattgctcctcggtagggacctcttttgcctcatcctttcagacactcaattcaagtctagcagccctaaatctactctgatgtgaaagtaaaatgtggcaggtacaacaggttgcaggaaatgtcagcaccagctctacatcctacatctaaataattcctggaagagactcaaagctggtggaccattgtgaacttagtttttctgggcgtgaacaagaggagtcagtggccatgctcagagtcaactgagggagactcacacaaacctctctctgttgaggaatgca

SEQ ID NO: 277076 - DNA, 3673 bp, Homo sapiens
  misc_feature (2997)..(2997): n is a, c, g, or t
gaattcctcgacactgttggcctactggatttatttgaaaggaatgaggatcctgcactcttcctccctcagtaagtaaatgccagtccctaggaagagagaaccaaaatgtctaccggaccagatgtcaaggctacagtgggggacatttccagtgatggcaatttaaacgtggctcaagaggaatgctccaggaaaggtttttgttcagtccgacatgggctggccctcatcttgcagctctgtaatttttcaatttacacccaacaaatgaacttgagcattgccatcccagctatggtgaacaacacagccccacctagccagcccaatgcctccacagaacggccctccactgactcccagggctactggaatgaaactctaaaagaatttaaagcaatggcccctgcatatgactggagtcctgaaatccagggaatcatcctcagctccctcaactatggctcattcttggctccaatccccagtggctatgtggctggaatatttggagccaagtatgtggttggtgctggcttgtttatttcctcattcctgaccctcttcattccactggcagctaatgcgggagtggccttgctcattgtcctccggattgtacaaggcatagcccaggttatggtattaactggtcagtattcaatttgggtcaaatgggctcccccactggaaaggagtcaactcaccaccattgctggatcagggtcaatgctggggtccttcattgttctacttgctggtggtctcctctgccagaccataggatggccttacgtcttctatatctttggaggaattggctgtgcttgttgtcctctctggtttcctctcatttatgatgatcctgtgaatcatccctttatcagtgctggtgagaagagatacattgtgtgttcattggctcagcaggactgttcaccaggctggtctcttcccattagggctatgatcaaatccttaccactctgggccattttagtctcttatttctgtgaatactggcttttttataccattatggcgtacacaccaacgtacatcagctcggtacttcaagccaacctcagagatagtgggatcctgtctgccttgccgtttgttgttggatgtatctgcattatccttggaggtctactggcagactttcttctctccagaaaaatcctcagactcatcaccatcaggaaactcttcactgccattggggttctcttcccatccgtgatcctcgtgtccctgccctgggtcagatccagccacagcatgaccatgaccttcttggtgctgtcttctgccatcagcagcttctgtgaatcaggagcccttgttaacttcttggatattgctcctcggtacactggctttctcaaaggactattgcaagtctttgcacacatagctggagccatctctcctactgctgctggatttttcatcagtcaggattcagagtttggttggagaaatgtcttcttgctttcagctgctgttaacatatcgggcctggttttctacctcatctttggccgagcagatgtgcaggactgggctaaagagcagacattcacccacctctgagcaaaccgagagatgtgctagatcctggtgcttagttcatcattgttttccctcacagacatttctctttcatgcctgcttgactgataagccattagctagaccctgactatgtaacgctaaagattttaccatgcctggaaattttacaggggaagaaaacacgctagttatttaactgcaagctactaaaagcataggtgtgttgagatttctgtgttctccactcttccactgttatcctagtaaaagcatcaggggctggggacaatttctttccaaagcaaaagaggaagccagaccttgggaccgagaactgagaatcacaagggagttgcgcccaacatgcagaacatgaatcctctgagctgtcctcaaaagaaagccccaaacaacagaaagcatagtgttttccattgttggtgaaaaatgtcaaggaggaaagaacaataatgattccatcatgataagaggaatgaacgtgtctgcaactaatgggagcaagatagtacactttaactctttcagacaacttgcattctgtggatgccagctttggaatcagagccgcctctggaatacctgtgcttccagagttagcttttggacagttaccttctttctggccatcttgacttctgccccacatctgctttttggctttgtgcagatctttaacatgttagtgaacagacattgcccagtgtctcttctagcccctccaacagttcttcatgtagcactgcttttggacagtgacccatgatatctgccttcgtttgcccctctgactgttggaatcccacgcaccattcagtaggattcaattcaatgtggaaccattcaacattcacctcattaacctaaaatgtctcccaaagatgtatgtaagacacacactgccctaacctcactccaaatgtctggagaaatgtgtgtagtgcttttgttaaagcccctatatgggcagcatggaggatcataagatagcaaaaccatttcaacactaaatgaatattaatgtacacacaccttgtgtggatggcagaaatcaaatcatacacagtattaaggagttcagtgtctcgggagggcagataactttaatcaaagtatcacacaagtgaatatgtaataacaactgtagaaataatgagtggttacatgggttatgagagtggatgataagtgcactaatctgagtgtaaggaagggccacccctgcaaagtttcagctgagctgggatctgaaggataatagttaactgttgtgggagactgagaggagaatattttaggaagaaagaacagcataagcaaaagtttcatggcaggagggagaaattagctatggccagagtatagagaataagggaagtatgatttgtgaggagnctgtagaagaattaaggtcaggagcacacaggatgatgtaggcccagtgaagtgcgttggtctttattttgaaatcagtaggaagtgtcctggttttcaaaggcactctgcatgagagattaggttggagtaggagcttacagtgtagtccaggagagaacaatggcccctggcatgaggcaatagacatggtgagaggtgaatggattatttgatttaggtggattatttgatttagggaataaacctgacgggtcctattactaagtgagagagtgaaagatgtccagagtaactcctgagttttggtttgctattatattaatggggatgcctctaacacagacagcaacacagatagcaattatatccaagtgtagacaacaagaaggaaaatggacacatgactctggatttctcttgtgagacctgggctccatttacaaacgtataaatcatcttgatataggtagtgattacaatttttgcatggatgagtcatccatgggtgaaagtggcataagaaaaggaagcttgggaataagccttaaagaattccagtatttaatggtcagctggaggatgattagcagaaagaaagaaagaaagaaagaaaagaaagagagagagagagagagagtgagtgtatggtgtttcggcgtgtgcgggatcctct

SEQ ID NO: 277077 - DNA, 3684 bp, Homo sapiens
  misc_feature (3008)..(3008): n is a, c, g, or t
ttacctcccagaattagacaattgcaaagagcttagaatatttatttgaaaggaatgaggatcctgcactcttcctccctcagtaagtaaatgccagtccctaggaagagagaaccaaaatgtctaccggaccagatgtcaaggctacagtgggggacatttccagtgatggcaatttaaacgtggctcaagaggaatgctccaggaaaggtttttgttcagtccgacatgggctggccctcatcttgcagctctgtaatttttcaatttacacccaacaaatgaacttgagcattgccatcccagctatggtgaacaacacagccccacctagccagcccaatgcctccacagaacggccctccactgactcccagggctactggaatgaaactctaaaagaatttaaagcaatggcccctgcatatgactggagtcctgaaatccagggaatcatcctcagctccctcaactatggctcattcttggctccaatccccagtggctatgtggctggaatatttggagccaagtatgtggttggtgctggcttgtttatttcctcattcctgaccctcttcattccactggcagctaatgcgggagtggccttgctcattgtcctccggattgtacaaggcatagcccaggttatggtattaactggtcagtattcaatttgggtcaaatgggctcccccactggaaaggagtcaactcaccaccattgctggatcagggtcaatgctggggtccttcattgttctacttgctggtggtctcctctgccagaccataggatggccttacgtcttctatatctttggaggaattggctgtgcttgttgtcctctctggtttcctctcatttatgatgatcctgtgaatcatccctttatcagtgctggtgagaagagatacattgtgtgttcattggctcagcaggactgttcaccaggctggtctcttcccattagggctatgatcaaatccttaccactctgggccattttagtctcttatttctgtgaatactggcttttttataccattatggcgtacacaccaacgtacatcagctcggtacttcaagccaacctcagagatagtgggatcctgtctgccttgccgtttgttgttggatgtatctgcattatccttggaggtctactggcagactttcttctctccagaaaaatcctcagactcatcaccatcaggaaactcttcactgccattggggttctcttcccatccgtgatcctcgtgtccctgccctgggtcagatccagccacagcatgaccatgaccttcttggtgctgtcttctgccatcagcagcttctgtgaatcaggagcccttgttaacttcttggatattgctcctcggtacactggctttctcaaaggactattgcaagtctttgcacacatagctggagccatctctcctactgctgctggatttttcatcagtcaggattcagagtttggttggagaaatgtcttcttgctttcagctgctgttaacatatcgggcctggttttctacctcatctttggccgagcagatgtgcaggactgggctaaagagcagacattcacccacctctgagcaaaccgagagatgtgctagatcctggtgcttagttcatcattgttttccctcacagacatttctctttcatgcctgcttgactgataagccattagctagaccctgactatgtaacgctaaagattttaccatgcctggaaattttacaggggaagaaaacacgctagttatttaactgcaagctactaaaagcataggtgtgttgagatttctgtgttctccactcttccactgttatcctagtaaaagcatcaggggctggggacaatttctttccaaagcaaaagaggaagccagaccttgggaccgagaactgagaatcacaagggagttgcgcccaacatgcagaacatgaatcctctgagctgtcctcaaaagaaagccccaaacaacagaaagcatagtgttttccattgttggtgaaaaatgtcaaggaggaaagaacaataatgattccatcatgataagaggaatgaacgtgtctgcaactaatgggagcaagatagtacactttaactctttcagacaacttgcattctgtggatgccagctttggaatcagagccgcctctggaatacctgtgcttccagagttagcttttggacagttaccttctttctggccatcttgacttctgccccacatctgctttttggctttgtgcagatctttaacatgttagtgaacagacattgcccagtgtctcttctagcccctccaacagttcttcatgtagcactgcttttggacagtgacccatgatatctgccttcgtttgcccctctgactgttggaatcccacgcaccattcagtaggattcaattcaatgtggaaccattcaacattcacctcattaacctaaaatgtctcccaaagatgtatgtaagacacacactgccctaacctcactccaaatgtctggagaaatgtgtgtagtgcttttgttaaagcccctatatgggcagcatggaggatcataagatagcaaaaccatttcaacactaaatgaatattaatgtacacacaccttgtgtggatggcagaaatcaaatcatacacagtattaaggagttcagtgtctcgggagggcagataactttaatcaaagtatcacacaagtgaatatgtaataacaactgtagaaataatgagtggttacatgggttatgagagtggatgataagtgcactaatctgagtgtaaggaagggccacccctgcaaagtttcagctgagctgggatctgaaggataatagttaactgttgtgggagactgagaggagaatattttaggaagaaagaacagcataagcaaaagtttcatggcaggagggagaaattagctatggccagagtatagagaataagggaagtatgatttgtgaggagnctgtagaagaattaaggtcaggagcacacaggatgatgtaggcccagtgaagtgcgttggtctttattttgaaatcagtaggaagtgtcctggttttcaaaggcactctgcatgagagattaggttggagtaggagcttacagtgtagtccaggagagaacaatggcccctggcatgaggcaatagacatggtgagaggtgaatggattatttgatttaggtggattatttgatttagggaataaacctgacgggtcctattactaagtgagagagtgaaagatgtccagagtaactcctgagttttggtttgctattatattaatggggatgcctctaacacagacagcaacacagatagcaattatatccaagtgtagacaacaagaaggaaaatggacacatgactctggatttctcttgtgagacctgggctccatttacaaacgtataaatcatcttgatataggtagtgattacaatttttgcatggatgagtcatccatgggtgaaagtggcataagaaaaggaagcttgggaataagccttaaagaattccagtatttaatggtcagctggaggatgattagcagaaagaaagaaagaaagaaagaaaagaaagagagagagagagagagagtgagtgtatggtgtttcggcgtgtgcgggatcctct

SEQ ID NO: 277078 - DNA, 621 bp, Homo sapiens
ttacctcccagaattagacaattgcaaagagcttagaatatttatttgaaaggaatgaggatcctgcactcttcctccctcagtaagtaaatgccagtccctaggaagagagaaccaaaatgtctaccggaccagatgtcaaggctacagtgggggacatttccagtgatggcaatttaaacgtggctcaagaggaatgctccaggaaaggtttttgttcagtccgacatgggctggccctcatcttgcagctctgtaatttttcaatttacacccaacaaatgaacttgagcattgccatcccagctatggtgaacaacacagccccacctagccagcccaatgcctccacagaacggccctccactgactcccagggctactggaatgaaactctaaaagaatttaaagcaatggtaagtttaatgagactctggactctttctttgactcaaataatttgacttaaagagttataaaagagtgagattcatttaaccactaagtatttactgaacatgtactatgtgccaggaatggcacaagtacctaagtatcaggccgagcatggtggctcacacctttagtcccagcactttgggagggtgaggcatctttact

SEQ ID NO: 277079 - DNA, 2780 bp, Homo sapiens
gggggcgagtttccggtctgggctttggcgggtctggtttgaagctctcctgtttgacgaaagtatgtctcaggaaggtgcggtcccagctagcgcggttcccctggaagaattaagtagctggccagaggagctatgccgccgggaactgccgtccgtcctgccccgactcctctcattgtctcaacattctgaaagttggattgagcatattcactgtgaaattattcgatgacatgatgtatgaattaaccagtcaagccagaggactgtcaagccaaaatttggaaatccagaccactctaaggaatattttacaaacaatggtgcagctcttaggagctctcacaggatgtgttcagcatatctgtgccacacaggaatccatcattttggaaaatattcagagtctcccctcctcagtccttcatataattaaaagcacatttgtgcattgtaagtttcagaccttctccaggctcttttcaaggaggcctattctcttcaaaagcagttaatggaactgctggacatggtttgcatggaccctttagtagatgacaatgatgatattttgaatatggtaatagttattcattctttattggatatctgctctgttatttccagtatggaccatgcatttcatgccaatacttggaagtttataattaagcagagccttaagcaccagtccataataaaaagccagttgaaacacaaagatataattactagcttgtgtgaagacattcttttctccttccattcttgtttacagttagctgagcagatgacacagtcagatgcacaggataatgctgactacagattatttcagaaaacactcaaattgtgtcgtttttttgccaactcccttttgcactacgctaaggaatttcttcctttcctctctgattcttgctgtactttgcaccaactgtatcttcagatacacagcaagtttcctccaagcctttatgctaccaggatttctaaagcacaccaagaggaaatagcaggtgctttcctagtgacactggatccacttatcagtcagctgctcacatttcagcctttcatgcaggtggttttggacagtaaattagacctgccatgtgaactgcagtttccacaatgtcttcttctggttgttgtcatggataagctgccatctcagcctaaggaagtgcaaaccctgtggtgcacagacagccaggtctcagaaacgacaaccaggatatctctactcaaagccgttttctacagttttgagcagtgttctggtgaactctctctacctgttcatttacagggattaaagagtaaggggaaagctgaggtggctgtcaccttgtatcagcatgtttgtgttcatctgtgtacatttattacttcctttcatccctcactgtttgctgaactggatgctgctctgctgaatgctgtacttagtgctaatatgatcacctctttgttagctatggatgcatggtgcttccttgctcgatatgggactgctgaactgtgtgcacaccatgtcaccatagtggctcatctgataaagtcatgccctggagaatgttatcaactcatcaacctatcaatactgttgaagcgtctctttttcttcatggcaccaccccatcagctggagtttatccagaaattttccccaaaagaagcagaaaatctgcctctgtggcaacatatttccttccaggcgttacctcctgagcttagggaacaaactgtccatgaggtcaccacagtaggcactgcagaatgcaggaaatggctgagcaggagtcgtactttgggagaactagaatctctgaacacagtactgtctgctttgcttgcagtatgtaattctgctggtgaagctttggatacaggaaaacaaactgcaattatcgaagttgtgagtcagctttgggcttttttaaacattaaacaggtagcagatcaaccttatgttcaacagacattcagccttttacttccactgttgggatttttcattcaaactctagatcctaaactgatacttcaggcagtaactttgcagacctcgctacttaaattagagcttcctgactatgttcgtttggcaatgttggattttgtatcttctttaggaaaactttttatacctgaagctatccaggacagaattctgcccaacctgtcctgtatgtttgccttactgctagctgacaggagttggctgctagaacaacataccttggaggcgtttactcagttcgctgagggaacaaatcatgaagagatagttccacagtgtctcagttctgaagaaactaagaacaaagttgtatcctttctggagaagactgggtttgtagatgaaactgaagctgccaaagtggaacgtgtgaaacaggaaaaaggtattttctgggaaccctttgctaatgtgactgtagaagaagcaaagaggtcatctttacagccttatgcaaaaagagctcgtcaggagttcccctgggaagaagagtacaggtcagcgctgcatacaatagcaggggctttggaagcaactgagtcactactccaaaagggtcctgctccagcctggctttcaatggaaatggaggcgctccaagaaaggatggataagctaaaacgttacatacatactctagggtgaaacttatcactaggcagaactgggtttgatgctttgtcaactgaaaatacttatgtctgtacattttctaacagatataaaacaaattttgtaaagttgaatctag

SEQ ID NO: 277080 - DNA, 3368 bp, Homo sapiens
ggctttggccctggaaagcctcgcggacgtgttctgacccaaggttttagcagtggatgtggcgttttcttccattccttctttcagtttttctgtactcgttgcttgcaattaagtgtaaatacttttgctagtggataatgggggaggcaaggactgagacctgcggtatgacgatagctctggctcttaatagtttgaggtaaagcgagatactctgagcttttgtctcccgtaaaaagggtggtgaatatgaataagggctttcttagcgttataagaattaaagggcatagttctgtggtgtgaaatctttaaaagatgttcagtaaataaaaatgattttcctccttcccctctcagacctctttttcttctttctttctttttttttgacaagttctcactcctctcacccaggctggagtctttctgaaagagttcttccgcttgttgttggctttcaactgttggatttgaggcgcttagcgccttcttcgtccgggtgcagcacattcttgattggtctcatgcctttgtggttgtaaatgtgcctggaatcctagcctttcatggtttgttctgagtaatgaataccctattactatgacactagtatcttccttaattatcctactcattgtctcaacattctgaaagttggattgagcatattcaaattttgaaaattattgtagaaatgtttttacctcatatgaaccacctgacattggaacagactttcttttcacaagtgttaccaaagactgtgaaattattcgatgacatgatgtatgaattaaccagtcaagccagaggactgtcaagccaaaatttggaaatccagaccactctaaggaatattttacaaacaatggtgcagctcttaggagctctcacaggatgtgttcagcatatctgtgccacacaggaatccatcattttggaaaatattcagagtctcccctcctcagtccttcatataattaaaagcacatttgtgcattgtaagaatagtgaatctgtgtattctgggtgtttacacctagtttcagaccttctccaggctcttttcaaggaggcctattctcttcaaaagcagttaatggaactgctggacatggtttgcatggaccctttagtagatgacaatgatgatattttgaatatggtaatagttattcattctttattggatatctgctctgttatttccagtatggaccatgcatttcatgccaatacttggaagtttataattaagcagagccttaagcaccagtccataataaaaagccagttgaaacacaaagatataattactagcttgtgtgaagacattcttttctccttccattcttgtttacagttagctgagcagatgacacagtcagatgcacaggataatgctgactacagattatttcagaaaacactcaaattgtgtcgtttttttgccaactcccttttgcactacgctaaggaatttcttcctttcctctctgattcttgctgtactttgcaccaactgtatcttcagatacacagcaagtttcctccaagcctttatgctaccaggatttctaaagcacaccaagaggaaatagcaggtgctttcctagtgacactggatccacttatcagtcagctgctcacatttcagcctttcatgcaggtggttttggacagtaaattagacctgccatgtgaactgcagtttccacaatgtcttcttctggttgttgtcatggataagctgccatctcagcctaaggaagtgcaaaccctgtggtgcacagacagccaggtctcagaaacgacaaccaggatatctctactcaaagccgttttctacagttttgagcagtgttctggtgaactctctctacctgttcatttacagggattaaagagtaaggggaaagctgaggtggctgtcaccttgtatcagcatgtttgtgttcatctgtgtacatttattacttcctttcatccctcactgtttgctgaactggatgctgctctgctgaatgctgtacttagtgctaatatgatcacctctttgttagctatggatgcatggtgcttccttgctcgatatgggactgctgaactgtgtgcacaccatgtcaccatagtggctcatctgataaagtcatgccctggagaatgttatcaactcatcaacctatcaatactgttgaagcgtctctttttcttcatggcaccaccccatcagctggagtttatccagaaattttccccaaaagaagcagaaaatctgcctctgtggcaacatatttccttccaggcgttacctcctgagcttagggaacaaactgtccatgaggtcaccacagtaggcactgcagaatgcaggaaatggctgagcaggagtcgtactttgggagaactagaatctctgaacacagtactgtctgctttgcttgcagtatgtaattctgctggtgaagctttggatacaggaaaacaaactgcaattatcgaagttgtgagtcagctttgggcttttttaaacattaaacaggtagcagatcaaccttatgttcaacagacattcagccttttacttccactgttgggatttttcattcaaactctagatcctaaactgatacttcaggcagtaactttgcagacctcgctacttaaattagagcttcctgactatgttcgtttggcaatgttggattttgtatcttctttaggaaaactttttatacctgaagctatccaggacagaattctgcccaacctgtcctgtatgtttgccttactgctagctgacaggagttggctgctagaacaacataccttggaggcgtttactcagttcgctgagggaacaaatcatgaagagatagttccacagtgtctcagttctgaagaaactaagaacaaagttgtatcctttctggagaagactgggtttgtagatgaaactgaagctgccaaagtggaacgtgtgaaacaggaaaaaggtattttctgggaaccctttgctaatgtgactgtagaagaagcaaagaggtcatctttacagccttatgcaaaaagagctcgtcaggagttcccctgggaagaagagtacaggtcagcgctgcatacaatagcaggggctttggaagcaactgagtcactactccaaaagggtcctgctccagcctggctttcaatggaaatggaggcgctccaagaaaggatggataagctaaaacgttacatacatactctagggtgaaacttatcactaggcagaactgggtttgatgctttgtcaactgaaaatacttatgtctgtacattttctaacagatataaaacaaattttgtaaagttgaatctag

SEQ ID NO: 277081 - DNA, 1367 bp, Homo sapiens
ttttttttggcatggcttttttattctctttgcagccaagacctgtttttacaattaaaaccaaaattttgaatcacaaggttcctatgtctatgcatacttgggaacttagtgtgaggaaataatagttaattgaaatactagtggaactgttaaaccacaaatttagactaccaggagaaactgaattatttgatatattacatgtaatgatgcacgttatatattttacatatattacatatatatttttttaggtgaaatgggcccacttgactcactgaactttattttttagacagagtctcgctctgtcgcccagattggagtgtggtggtgtgatcatagctcgctataacctcaaactcctgggctcaagcattcctcccaccaaagtcctgggattagaggcatgagccaccacacttggcctacttatattacatctaagctggattttaagtacatgtgtatacactgctgttgccagtttcttagcttatacagtaaaggttagcagactatcattttttcctgcaaagacaactctataactaactattttgtaaggaagaacacagtagagtgatttaatccagattatactaagagtatttatagatcagtccatgtgacttccagaatttgcctagtatggttgaacactcagcacttaaattatgtggccatttcatatctagtagagtgctaacatgttgctatttgcttggtttttcatggtccctggcagactgggtttgtagatgaaactgaagctgccaaagtggaacgtgtgaaacaggaaaaaggtattttctgggaaccctttgctaatgtgactgtagaagaagcaaagaggtcatctttacaggtatgggctgatttcaataggggccaaactttaacaaggcaaattctgccctttttacttactgacgaaacaaaccagtgtggtttccagccttatgctgaatttcaaatcaaatagatctagacatgtaaaattctgttttatggtagttgcttttaaaattaagaagtgggactacaccatatcaaatatattctttcagtatgtttgaattattggtagtaacctttaagggaagttacatattgtaccagtgatgctataaatgcagtctttactgaaccacagaagaaaatgaaagaaacttactcctaaatgtttagtttgattccttgccttattaatcaaatgagtctcctaataatttttggcagtaactgaagatcacatctacttattaaaaggcagaatttgacaccaataaggatattcaaaatattgttttgagcactattagtatagtaattagtatagtagtaattcatgaagaacaaca

SEQ ID NO: 277082 - DNA, 571 bp, Homo sapiens
cttggatcccccccttagggtaactcacacgcttcgatccacaatatagggaaaaacatttgggaaccctgtctatatggctatatcaccccaaaatgcctttacatatttttctagatgactgtgtaggggttttggggtgcatcctcctacccttgtgatccaatgactagaataaaatttgcatgtaagctttactccagtccaaaaggaaggttctttatatttagaatggatattgtgatattacttatgttttttttccagccttatgcaaaaagagctcgtcaggagttcccctgggaagaagagtacaggtcagcgctgcatacaatagcaggggctttggaagcaactgagtcactactccaaaagggtcctgctccagcctggctttcaatggaaatggaggcgctccaagaaaggatggataagctaaaacgttacatacatactctagggtgaaacttatcactaggcagaactgggtttgatgctttgtcaactgaaaatacttatgtctgtacattttctaacagatataaaacaaattttgtaaagttgaatctag

SEQ ID NO: 277083 - DNA, 524 bp, Homo sapiens
  misc_feature (1)..(1): n is a, c, g, or t
  misc_feature (15)..(15): n is a, c, g, or t
  misc_feature (24)..(24): n is a, c, g, or t
  misc_feature (46)..(46): n is a, c, g, or t
  misc_feature (60)..(60): n is a, c, g, or t
  misc_feature (90)..(90): n is a, c, g, or t
  misc_feature (98)..(98): n is a, c, g, or t
nccagattcccttangggcccaanttcttaaagaaaaggttcccanagtgtcccaagttntaaaaaaacttaaggaccaaagtggacccnttctgganaaactgggtttgtagatgaaactgaagctgccaaagtggaacgtgtgaaacaggaaaaaggtattttctgggaaccctttgctaatgtgactgtagaagaagcaaagaggtcatctttacagccttatgcaaaaagagctcgtcaggagttcccctgggaagaagagtacaggtcagcgctgcatacaatagcaggggctttggaagcaactgagtcactactccaaaagggtcctgctccagcctggctttcaatggaaatggaggcgctccaagaaaggatggataagctaaaacgttacatacatactctagggtgaaacttatcactaggcagaactgggtttgatgctttgtcaactgaaaatacttatgtctgtacattttctaacagatataaaacaaattttgtaaagttgaatctag

SEQ ID NO: 277084 - DNA, 432 bp, Homo sapiens
tgactttcaaaccattttaatatttcaaatattccagaacaatcccaaaacatttattgaactgcttctgtattgcaatcggaaaattgtctgaagggtacattactcgttatctcttttacagcttctcaaaatgaggcttagataaatgaagtgaatttcgtaaggtcctctgaataaacaaggaccagaacaggcatacacagcaggcctactgatacagacagacacagacacagtcttccagcagatagtatttttgggtcaaatgataatacatttcattttgtgctatcagtcataagggttaggctgatgaacctaaacctgtaagatgggttgctcctttactcttactgcatttgctgtatagtcatgcctatgatcataagggagtccagaagcattagtatgacccagcagaagtaatta

SEQ ID NO: 277085 - DNA, 3896 bp, Homo sapiens
gggggcgagtttccggtctgggctttggcgggtctggtttgaagctctcctgtttgacgaaagtatgtctcaggaaggtgcggtcccagctagcgcggttcccctggaagaattaagtagctggccagaggagctatgccgccgggaactgccgtccgtcctgccccgactcctctcattgtctcaacattctgaaagttggattgagcatattcaaattttgaaaattattgtagaaatgtttttacctcatatgaaccacctgacattggaacagactttcttttcacaagtgttaccaaagactgtgaaattattcgatgacatgatgtatgaattaaccagtcaagccagaggactgtcaagccaaaatttggaaatccagaccactctaaggaatattttacaaacaatggtgcagctcttaggagctctcacaggatgtgttcagcatatctgtgccacacaggaatccatcattttggaaaatattcagagtctcccctcctcagtccttcatataattaaaagcacatttgtgcattgtaagaatagtgaatctgtgtattctgggtgtttacacctagtttcagaccttctccaggctcttttcaaggaggcctattctcttcaaaagcagttaatggaactgctggacatggtttgcatggaccctttagtagatgacaatgatgatattttgaatatggtaatagttattcattctttattggatatctgctctgttatttccagtatggaccatgcatttcatgccaatacttggaagtttataattaagcagagccttaagcaccagtccataataaaaagccagttgaaacacaaagatataattactagcttgtgtgaagacattcttttctccttccattcttgtttacagttagctgagcagatgacacagtcagatgcacaggataatgctgactacagattatttcagaaaacactcaaattgtgtcgtttttttgccaactcccttttgcactacgctaaggaatttcttcctttcctctctgattcttgctgtactttgcaccaactgtatcttcagatacacagcaagtttcctccaagcctttatgctaccaggatttctaaagcacaccaagaggaaatagcaggtgctttcctagtgacactggatccacttatcagtcagctgctcacatttcagcctttcatgcaggtggttttggacagtaaattagacctgccatgtgaactgcagtttccacaatgtcttcttctggttgttgtcatggataagctgccatctcagcctaaggaagtgcaaaccctgtggtgcacagacagccaggtctcagaaacgacaaccaggatatctctactcaaagccgttttctacagttttgagcagtgttctggtgaactctctctacctgttcatttacagggattaaagagtaaggggaaagctgaggtggctgtcaccttgtatcagcatgtttgtgttcatctgtgtacatttattacttcctttcatccctcactgtttgctgaactggatgctgctctgctgaatgctgtacttagtgctaatatgatcacctctttgttagctatggatgcatggtgcttccttgctcgatatgggactgctgaactgtgtgcacaccatgtcaccatagtggctcatctgataaagtcatgccctggagaatgttatcaactcatcaacctatcaatactgttgaagcgtctctttttcttcatggcaccaccccatcagctggagtttatccagaaattttccccaaaagaagcagaaaatctgcctctgtggcaacatatttccttccaggcgttacctcctgagcttagggaacaaactgtccatgaggtcaccacagtaggcactgcagaatgcaggaaatggctgagcaggagtcgtactttgggagaactagaatctctgaacacagtactgtctgctttgcttgcagtatgtaattctgctggtgaagctttggatacaggaaaacaaactgcaattatcgaagttgtgagtcagctttgggcttttttaaacattaaacaggtagcagatcaaccttatgttcaacagacattcagccttttacttccactgttgggatttttcattcaaactctagatcctaaactgatacttcaggcagtaactttgcagacctcgctacttaaattagagcttcctgactatgttcgtttggcaatgttggattttgtatcttctttaggaaaactttttatacctgaagctatccaggacagaattctgcccaacctgtcctgtatgtttgccttactgctagctgacaggagttggctgctagaacaacataccttggaggcgtttactcagttcgctgagggaacaaatcatgaagagatagttccacagtgtctcagttctgaagaaactaagaacaaagttgtatcctttctggagaagactgggtttgtagatgaaactgaagctgccaaagtggaacgtgtgaaacaggaaaaaggtattttctgggaaccctttgctaatgtgactgtagaagaagcaaagaggtcatctttacagccttatgcaaaaagagctcgtcaggagttcccctgggaagaagagtacaggtcagcgctgcatacaatagcaggggctttggaagcaactgagtcactactccaaaagggtcctgctccagcctggctttcaatggaaatggaggcgctccaagaaaggatggataagctaaaacgttacatacatactctagggtgaaacttatcactaggcagaactgggtttgatgctttgtcaactgaaaatacttatgtctgtacattttctaacagatataaaacaaattttgtaaagttgaatctagtgaaaataatctttatttgacatttagagaacaggattgtggggaatattcttattaagaactttggtacaatgtactacatgtggaacagtcaggaactgcctaggtccacaaagaaccatttactcagatagtctaactgtaaacaaataaataagctgcctaaggaaacctcagcaatttaaaatcatttatataatttatagctaaaattttttaaagttgtatttcataatagagcttactcttatgttaaagaatggcacaaaattaagctaaccagcttgaattacattttctttacttccagaattgtcctggaaaaagcagtaaattcgacctctcctcagctacttgctcttcatagaaactggcctcagtcaaatgcacaaaggctcttcctcctggaaaccagtactgtgagcctcaccacccagggcttttagccagcactcacagtcagtctcctacttcagttggcacagactggataatgagctcctgggatgggaaaagcaggccactttggggttttcttgtcccaaagcctgcttttgaggtattgattttttttaaaaaaagggaatcctttttcctaaagtttaactcacatctattgtcaccagttattatcttcccagttcagctccccttcttcttcccagccttcagcctctccctgcaacaaaataaagcacaccaagaacccactgaaacaaatcatatgcaaaaatcatacgcaaatttgaaaaagcaggaatttaaaatttatcttttgatgccagaaacactacctcgtactaagtaaaataacttagagctctaacagaaagttgaaaagtaggattacaaaaccatggcactggaaaatagcttttcaaaaaccataaaatccagtaaaaatcagtgtggatgacaccaaatccttattttaatccctttttttctttttcaaataaaaaggttacaatagctcattaaacaaactaa

SEQ ID NO: 277086 - DNA, 2165 bp, Homo sapiens
ttttttttggcatggcttttttattctctttgcagccaagacctgtttttacaattaaaaccaaaattttgaatcacaaggttcctatgtctatgcatacttgggaacttagtgtgaggaaataatagttaattgaaatactagtggaactgttaaaccacaaatttagactaccaggagaaactgaattatttgatatattacatgtaatgatgcacgttatatattttacatatattacatatatatttttttaggtgaaatgggcccacttgactcactgaactttattttttagacagagtctcgctctgtcgcccagattggagtgtggtggtgtgatcatagctcgctataacctcaaactcctgggctcaagcattcctcccaccaaagtcctgggattagaggcatgagccaccacacttggcctacttatattacatctaagctggattttaagtacatgtgtatacactgctgttgccagtttcttagcttatacagtaaaggttagcagactatcattttttcctgcaaagacaactctataactaactattttgtaaggaagaacacagtagagtgatttaatccagattatactaagagtatttatagatcagtccatgtgacttccagaatttgcctagtatggttgaacactcagcacttaaattatgtggccatttcatatctagtagagtgctaacatgttgctatttgcttggtttttcatggtccctggcagactgggtttgtagatgaaactgaagctgccaaagtggaacgtgtgaaacaggaaaaaggtattttctgggaaccctttgctaatgtgactgtagaagaagcaaagaggtcatctttacagccttatgcaaaaagagctcgtcaggagttcccctgggaagaagagtacaggtcagcgctgcatacaatagcaggggctttggaagcaactgagtcactactccaaaagggtcctgctccagcctggctttcaatggaaatggaggcgctccaagaaaggatggataagctaaaacgttacatacatactctagggtgaaacttatcactaggcagaactgggtttgatgctttgtcaactgaaaatacttatgtctgtacattttctaacagatataaaacaaattttgtaaagttgaatctagtgaaaataatctttatttgacatttagagaacaggattgtggggaatattcttattaagaactttggtacaatgtactacatgtggaacagtcaggaactgcctaggtccacaaagaaccatttactcagatagtctaactgtaaacaaataaataagctgcctaaggaaacctcagcaatttaaaatcatttatataatttatagctaaaattttttaaagttgtatttcataatagagcttactcttatgttaaagaatggcacaaaattaagctaaccagcttgaattacattttctttacttccagaattgtcctggaaaaagcagtaaattcgacctctcctcagctacttgctcttcatagaaactggcctcagtcaaatgcacaaaggctcttcctcctggaaaccagtactgtgagcctcaccacccagggcttttagccagcactcacagtcagtctcctacttcagttggcacagactggataatgagctcctgggatgggaaaagcaggccactttggggttttcttgtcccaaagcctgcttttgaggtattgattttttttaaaaaaagggaatcctttttcctaaagtttaactcacatctattgtcaccagttattatcttcccagttcagctccccttcttcttcccagccttcagcctctccctgcaacaaaataaagcacaccaagaacccactgaaacaaatcatatgcaaaaatcatacgcaaatttgaaaaagcaggaatttaaaatttatcttttgatgccagaaacactacctcgtactaagtaaaataacttagagctctaacagaaagttgaaaagtaggattacaaaaccatggcactggaaaatagcttttcaaaaaccataaaatccagtaaaaatcagtgtggatgacaccaaatccttattttaatccctttttttctttttcaaataaaaaggttacaatagctcattaaacaaactaa

SEQ ID NO: 277087 - DNA, 3871 bp, Homo sapiens
gggggcgagtttccggtctgggctttggcgggtctggtttgaagctctcctgtttgacgaaagtatgtctcaggaaggtgcggtcccagctagcgcggttcccctggaagaattaagtagctggccagaggagctatgccgccgggaactgccgtccgtcctgccccgactcctctcattgtctcaacattctgaaagttggattgagcatattcactgtgaaattattcgatgacatgatgtatgaattaaccagtcaagccagaggactgtcaagccaaaatttggaaatccagaccactctaaggaatattttacaaacaatggtgcagctcttaggagctctcacaggatgtgttcagcatatctgtgccacacaggaatccatcattttggaaaatattcagagtctcccctcctcagtccttcatataattaaaagcacatttgtgcattgtaagtttcagaccttctccaggctcttttcaaggaggcctattctcttcaaaagcagttaatggaactgctggacatggtttgcatggaccctttagtagatgacaatgatgatattttgaatatggtaatagttattcattctttattggatatctgctctgttatttccagtatggaccatgcatttcatgccaatacttggaagtttataattaagcagagccttaagcaccagtccataataaaaagccagttgaaacacaaagatataattactagcttgtgtgaagacattcttttctccttccattcttgtttacagttagctgagcagatgacacagtcagatgcacaggataatgctgactacagattatttcagaaaacactcaaattgtgtcgtttttttgccaactcccttttgcactacgctaaggaatttcttcctttcctctctgattcttgctgtactttgcaccaactgtatcttcagatacacagcaagtttcctccaagcctttatgctaccaggatttctaaagcacaccaagaggaaatagcaggtgctttcctagtgacactggatccacttatcagtcagctgctcacatttcagcctttcatgcaggtggttttggacagtaaattagacctgccatgtgaactgcagtttccacaatgtcttcttctggttgttgtcatggataagctgccatctcagcctaaggaagtgcaaaccctgtggtgcacagacagccaggtctcagaaacgacaaccaggatatctctactcaaagccgttttctacagttttgagcagtgttctggtgaactctctctacctgttcatttacagggattaaagagtaaggggaaagctgaggtggctgtcaccttgtatcagcatgtttgtgttcatctgtgtacatttattacttcctttcatccctcactgtttgctgaactggatgctgctctgctgaatgctgtacttagtgctaatatgatcacctctttgttagctatggatgcatggtgcttccttgctcgatatgggactgctgaactgtgtgcacaccatgtcaccatagtggctcatctgataaagtcatgccctggagaatgttatcaactcatcaacctatcaatactgttgaagcgtctctttttcttcatggcaccaccccatcagctggagtttatccagaaattttccccaaaagaagcagaaaatctgcctctgtggcaacatatttccttccaggcgttacctcctgagcttagggaacaaactgtccatgaggtcaccacagtaggcactgcagaatgcaggaaatggctgagcaggagtcgtactttgggagaactagaatctctgaacacagtactgtctgctttgcttgcagtatgtaattctgctggtgaagctttggatacaggaaaacaaactgcaattatcgaagttgtgagtcagctttgggcttttttaaacattaaacaggtagcagatcaaccttatgttcaacagacattcagccttttacttccactgttgggatttttcattcaaactctagatcctaaactgatacttcaggcagtaactttgcagacctcgctacttaaattagagcttcctgactatgttcgtttggcaatgttggattttgtatcttctttaggaaaactttttatacctgaagctatccaggacagaattctgcccaacctgtcctgtatgtttgccttactgctagctgacaggagttggctgctagaacaacataccttggaggcgtttactcagttcgctgagggaacaaatcatgaagagatagttccacagtgtctcagttctgaagaaactaagaacaaagttgtatcctttctggagaagactgggtttgtagatgaaactgaagctgccaaagtggaacgtgtgaaacaggaaaaaggtattttctgggaaccctttgctaatgtgactgtagaagaagcaaagaggtcatctttacagccttatgcaaaaagagctcgtcaggagttcccctgggaagaagagtacaggtcagcgctgcatacaatagcaggggctttggaagcaactgagtcactactccaaaagggtcctgctccagcctggctttcaatggaaatggaggcgctccaagaaaggatggataagctaaaacgttacatacatactctagggtgaaacttatcactaggcagaactgggtttgatgctttgtcaactgaaaatacttatgtctgtacattttctaacagatataaaacaaattttgtaaagttgaatctagtgaaaataatctttatttgacatttagagaacaggattgtggggaatattcttattaagaactttggtacaatgtactacatgtggaacagtcaggaactgcctaggtccacaaagaaccatttactcagatagtctaactgtaaacaaataaataagctgcctaaggaaacctcagcaatttaaaatcatttatataatttatagctaaaattttttaaagttgtatttcataatagagcttactcttatgttaaagaatggcacaaaattaagctaaccagcttgaattacattttctttacttccagaattgtcctggaaaaagcagtaaattcgacctctcctcagctacttgctcttcatagaaactggcctcagtcaaatgcacaaaggctcttcctcctggaaaccagtactgtgagcctcaccacccagggcttttagccagcactcacagtcagtctcctacttcagttggcacagactggataatgagctcctgggatgggaaaagcaggccactttggggttttcttgtcccaaagcctgcttttgagcaaattttgaggaaaactgcatcactggggagacatcatccttttttgggaccatttctgtcctcagttcaggtaatataagaaaagcagcagaaggcttaatttctgggatcatatcagcaaaccaatccatctcaggatcttttactggcttcttttttacttgaatggtgaattcctctcctaaaccaagttctgatggaaccttaaggggcctttcttgtgatgatacttttggcggctcgatttggtctgcgtcatcccccctttgtacaaggctaatctttcggggtaagcttgatttccaaggcatagactcttcagtgagtgaaagcaaagcaggaataggcttctgctcccctgaggtaacaggttttgtagcagtgattccacctcctgggtttactttagtatctaagctgctgggctcgcagtcatcccaagatgactcttccacatccaaggtagtgcactgggacttgacatcatcacaaggttctctaggccaaatctgtatgttgacagtttgatt

SEQ ID NO: 277088 - DNA, 2467 bp, Homo sapiens
cttaactgtacaaggtgacgagtatataggaaaataagacttattggtaagtaggagcatgataagatatctgacataactaataatgaaatacattatttaatgtcttggtgcatttatattgtgctccacttaagctgtgtttttgttttggaaaccaatgcagcatcaataacaataataataaagcatgttcatttatgttaccttggtctggaatgtagatattaccgtaccattataaagctttctcgaaatattaaatgtggaaactaatacttagcttttgtgtatccattcctctgacttgtctcatgttactcttctttctttaacaatttatttcagctggagtttatccagaaattttccccaaaagaagcagaaaatctgcctctgtggcaacatatttccttccaggcgttacctcctgagcttagggaacaaactgtccatgaggtcaccacagtaggcactgcagaatgcaggaaatggctgagcaggagtcgtactttgggagaactagaatctctgaacacagtactgtctgctttgcttgcagtatgtaattctgctggtgaagctttggatacaggaaaacaaactgcaattatcgaagttgtgagtcagctttgggcttttttaaacattaaacaggtagcagatcaaccttatgttcaacagacattcagccttttacttccactgttgggatttttcattcaaactctagatcctaaactgatacttcaggcagtaactttgcagacctcgctacttaaattagagcttcctgactatgttcgtttggcaatgttggattttgtatcttctttaggaaaactttttatacctgaagctatccaggacagaattctgcccaacctgtcctgtatgtttgccttactgctagctgacaggagttggctgctagaacaacataccttggaggcgtttactcagttcgctgagggaacaaatcatgaagagatagttccacagtgtctcagttctgaagaaactaagaacaaagttgtatcctttctggagaagactgggtttgtagatgaaactgaagctgccaaagtggaacgtgtgaaacaggaaaaaggtattttctgggaaccctttgctaatgtgactgtagaagaagcaaagaggtcatctttacagccttatgcaaaaagagctcgtcaggagttcccctgggaagaagagtacaggtcagcgctgcatacaatagcaggggctttggaagcaactgagtcactactccaaaagggtcctgctccagcctggctttcaatggaaatggaggcgctccaagaaaggatggataagctaaaacgttacatacatactctagggtgaaacttatcactaggcagaactgggtttgatgctttgtcaactgaaaatacttatgtctgtacattttctaacagatataaaacaaattttgtaaagttgaatctagtgaaaataatctttatttgacatttagagaacaggattgtggggaatattcttattaagaactttggtacaatgtactacatgtggaacagtcaggaactgcctaggtccacaaagaaccatttactcagatagtctaactgtaaacaaataaataagctgcctaaggaaacctcagcaatttaaaatcatttatataatttatagctaaaattttttaaagttgtatttcataatagagcttactcttatgttaaagaatggcacaaaattaagctaaccagcttgaattacattttctttacttccagaattgtcctggaaaaagcagtaaattcgacctctcctcagctacttgctcttcatagaaactggcctcagtcaaatgcacaaaggctcttcctcctggaaaccagtactgtgagcctcaccacccagggcttttagccagcactcacagtcagtctcctacttcagttggcacagactggataatgagctcctgggatgggaaaagcaggccactttggggttttcttgtcccaaagcctgcttttgaggtattgattttttttaaaaaaagggaatcctttttcctaaagtttaactcacatctattgtcaccagttattatcttcccagttcagctccccttcttcttcccagccttcagcctctccctgcaacaaaataaagcacaccaagaacccactgaaacaaatcatatgcaaaaatcatacgcaaatttgaaaaagcaggaatttaaaatttatcttttgatgccagaaacactacctcgtactaagtaaaataacttagagctctaacagaaagttgaaaagtaggattacaaaaccatggcactggaaaatagcttttcaaaaaccataaaatccagtaaaaatcagtgtggatgacaccaaatccttattttaatccctttttttctttttcaaataaaaaggttacaatagctcattaaacaaactaa

SEQ ID NO: 277089 - DNA, 1807 bp, Homo sapiens
gagcacagtgctgacgacttttactaagcaattgaggccacagaagtaaaacacttggggccaggcgcggcggctacttatattacatctaagctggattttaagtacatgtgtatacactgctgttgccagtttcttagcttatacagtaaaggttagcagactatcattttttcctgcaaagacaactctataactaactattttgtaaggaagaacacagtagagtgatttaatccagattatactaagagtatttatagatcagtccatgtgacttccagaatttgcctagtatggttgaacactcagcacttaaattatgtggccatttcatatctagtagagtgctaacatgttgctatttgcttggtttttcatggtccctggcagactgggtttgtagatgaaactgaagctgccaaagtggaacgtgtgaaacaggaaaaaggtattttctgggaaccctttgctaatgtgactgtagaagaagcaaagaggtcatctttacagccttatgcaaaaagagctcgtcaggagttcccctgggaagaagagtacaggtcagcgctgcatacaatagcaggggctttggaagcaactgagtcactactccaaaagggtcctgctccagcctggctttcaatggaaatggaggcgctccaagaaaggatggataagctaaaacgttacatacatactctagggtgaaacttatcactaggcagaactgggtttgatgctttgtcaactgaaaatacttatgtctgtacattttctaacagatataaaacaaattttgtaaagttgaatctagtgaaaataatctttatttgacatttagagaacaggattgtggggaatattcttattaagaactttggtacaatgtactacatgtggaacagtcaggaactgcctaggtccacaaagaaccatttactcagatagtctaactgtaaacaaataaataagctgcctaaggaaacctcagcaatttaaaatcatttatataatttatagctaaaattttttaaagttgtatttcataatagagcttactcttatgttaaagaatggcacaaaattaagctaaccagcttgaattacattttctttacttccagaattgtcctggaaaaagcagtaaattcgacctctcctcagctacttgctcttcatagaaactggcctcagtcaaatgcacaaaggctcttcctcctggaaaccagtactgtgagcctcaccacccagggcttttagccagcactcacagtcagtctcctacttcagttggcacagactggataatgagctcctgggatgggaaaagcaggccactttggggttttcttgtcccaaagcctgcttttgaggtattgattttttttaaaaaaagggaatcctttttcctaaagtttaactcacatctattgtcaccagttattatcttcccagttcagctccccttcttcttcccagccttcagcctctccctgcaacaaaataaagcacaccaagaacccactgaaacaaatcatatgcaaaaatcatacgcaaatttgaaaaagcaggaatttaaaatttatcttttgatgccagaaacactacctcgtactaagtaaaataacttagagctctaacagaaagttgaaaagtaggattacaaaaccatggcactggaaaatagcttttcaaaaaccataaaatccagtaaaaatcagtgtggatgacaccaaatccttattttaatccctttttttctttttcaaataaaaaggttacaatagctcattaaacaaactaa

SEQ ID NO: 277090 - DNA, 1019 bp, Homo sapiens
cgcgtcgactcttttttttttttttctagtgaaaataatctttatttgacatttagagaacaggattgtggggaatattcttattaagaactttggtacaatgtactacatgtggaacagtcaggaactgcctaggtccacaaagaaccatttactcagatagtctaactgtaaacaaataaataagctgcctaaggaaacctcagcaatttaaaatcatttatataatttatagctaaaattttttaaagttgtatttcataatagagcttactcttatgttaaagaatggcacaaaattaagctaaccagcttgaattacattttctttacttccagaattgtcctggaaaaagcagtaaattcgacctctcctcagctacttgctcttcatagaaactggcctcagtcaaatgcacaaaggctcttcctcctggaaaccagtactgtgagcctcaccacccagggcttttagccagcactcacagtcagtctcctacttcagttggcacagactggataatgagctcctgggatgggaaaagcaggccactttggggttttcttgtcccaaagcctgcttttgaggtattgattttttttaaaaaaagggaatcctttttcctaaagtttaactcacatctattgtcaccagttattatcttcccagttcagctccccttcttcttcccagccttcagcctctccctgcaacaaaataaagcacaccaagaacccactgaaacaaatcatatgcaaaaatcatacgcaaatttgaaaaagcaggaatttaaaatttatcttttgatgccagaaacactacctcgtactaagtaaaataacttagagctctaacagaaagttgaaaagtaggattacaaaaccatggcactggaaaatagcttttcaaaaaccataaaatccagtaaaaatcagtgtggatgacaccaaatccttattttaatccctttttttctttttcaaataaaaaggttacaatagctcattaaacaaactaa

SEQ ID NO: 277091 - DNA, 2972 bp, Homo sapiens
gggggcgagtttccggtctgggctttggcgggtctggtttgaagctctcctgtttgacgaaagtatgtctcaggaaggtgcggtcccagctagcgcggttcccctggaagaattaagtagctggccagaggagctatgccgccgggaactgccgtccgtcctgccccgactcctctcattgtctcaacattctgaaagttggattgagcatattcactgtgaaattattcgatgacatgatgtatgaattaaccagtcaagccagaggactgtcaagccaaaatttggaaatccagaccactctaaggaatattttacaaacaatggtgcagctcttaggagctctcacaggatgtgttcagcatatctgtgccacacaggaatccatcattttggaaaatattcagagtctcccctcctcagtccttcatataattaaaagcacatttgtgcattgtaagtttcagaccttctccaggctcttttcaaggaggcctattctcttcaaaagcagttaatggaactgctggacatggtttgcatggaccctttagtagatgacaatgatgatattttgaatatggtaatagttattcattctttattggatatctgctctgttatttccagtatggaccatgcatttcatgccaatacttggaagtttataattaagcagagccttaagcaccagtccataataaaaagccagttgaaacacaaagatataattactagcttgtgtgaagacattcttttctccttccattcttgtttacagttagctgagcagatgacacagtcagatgcacaggataatgctgactacagattatttcagaaaacactcaaattgtgtcgtttttttgccaactcccttttgcactacgctaaggaatttcttcctttcctctctgattcttgctgtactttgcaccaactgtatcttcagatacacagcaagtttcctccaagcctttatgctaccaggatttctaaagcacaccaagaggaaatagcaggtgctttcctagtgacactggatccacttatcagtcagctgctcacatttcagcctttcatgcaggtggttttggacagtaaattagacctgccatgtgaactgcagtttccacaatgtcttcttctggttgttgtcatggataagctgccatctcagcctaaggaagtgcaaaccctgtggtgcacagacagccaggtctcagaaacgacaaccaggatatctctactcaaagccgttttctacagttttgagcagtgttctggtgaactctctctacctgttcatttacagggattaaagagtaaggggaaagctgaggtggctgtcaccttgtatcagcatgtttgtgttcatctgtgtacatttattacttcctttcatccctcactgtttgctgaactggatgctgctctgctgaatgctgtacttagtgctaatatgatcacctctttgttagctatggatgcatggtgcttccttgctcgatatgggactgctgaactgtgtgcacaccatgtcaccatagtggctcatctgataaagtcatgccctggagaatgttatcaactcatcaacctatcaatactgttgaagcgtctctttttcttcatggcaccaccccatcagctggagtttatccagaaattttccccaaaagaagcagaaaatctgcctctgtggcaacatatttccttccaggcgttacctcctgagcttagggaacaaactgtccatgaggtcaccacagtaggcactgcagaatgcaggaaatggctgagcaggagtcgtactttgggagaactagaatctctgaacacagtactgtctgctttgcttgcagtatgtaattctgctggtgaagctttggatacaggaaaacaaactgcaattatcgaagttgtgagtcagctttgggcttttttaaacattaaacaggtagcagatcaaccttatgttcaacagacattcagccttttacttccactgttgggatttttcattcaaactctagatcctaaactgatacttcaggcagtaactttgcagacctcgctacttaaattagagcttcctgactatgttcgtttggcaatgttggattttgtatcttctttaggaaaactttttatacctgaagctatccaggacagaattctgcccaacctgtcctgtatgtttgccttactgctagctgacaggagttggctgctagaacaacataccttggaggcgtttactcagttcgctgagggaacaaatcatgaagagatagttccacagtgtctcagttctgaagaaactaagaacaaagttgtatcctttctggagaagactgggtttgtagatgaaactgaagctgccaaagtggaacgtgtgaaacaggaaaaaggtattttctgggaaccctttgctaatgtgactgtagaagaagcaaagaggtcatctttacaggtatgggctgatttcaataggggccaaactttaacaaggcaaattctgccctttttacttactgacgaaacaaaccagtgtggtttccagccttatgctgaatttcaaatcaaatagatctagacatgtaaaattctgttttatggtagttgcttttaaaattaagaagtgggactacaccatatcaaatatattctttcagtatgtttgaattattggtagtaacctttaagggaagttacatattgtaccagtgatgctataaatgcagtctttactgaaccacagaagaaaatgaaagaaacttactcctaaatgtttagtttgattccttgccttattaatcaaatgagtctcctaataatttttggcagtaactgaagatcacatctacttattaaaaggcagaatttgacaccaataaggatattcaaaatattgttttgagcactattagtatagtaattagtatagtagtaattcatgaagaacaaca

SEQ ID NO: 277092 - DNA, 1004 bp, Homo sapiens
agcgctcgtctgcaggtcattgcttttcaccggcatgctgcggaggtgcagcggcgggaatattcttattaagaactttggtacaatgtactacatgtggaacagtcaggaactgcctaggtccacaaagaaccatttactcagatagtctaactgtaaacaaataaataagctgcctaaggaaacctcagcaatttaaaatcatttatataatttatagctaaaattttttaaagttgtatttcataatagagcttactcttatgttaaagaatggcacaaaattaagctaaccagcttgaattacattttctttacttccagaattgtcctggaaaaagcagtaaattcgacctctcctcagctacttgctcttcatagaaactggcctcagtcaaatgcacaaaggctcttcctcctggaaaccagtactgtgagcctcaccacccagggcttttagccagcactcacagtcagtctcctacttcagttggcacagactggataatgagctcctgggatgggaaaagcaggccactttggggttttcttgtcccaaagcctgcttttgaggtattgattttttttaaaaaaagggaatcctttttcctaaagtttaactcacatctattgtcaccagttattatcttcccagttcagctccccttcttcttcccagccttcagcctctccctgcaacaaaataaagcacaccaagaacccactgaaacaaatcatatgcaaaaatcatacgcaaatttgaaaaagcaggaatttaaaatttatcttttgatgccagaaacactacctcgtactaagtaaaataacttagagctctaacagaaagttgaaaagtaggattacaaaaccatggcactggaaaatagcttttcaaaaaccataaaatccagtaaaaatcagtgtggatgacaccaaatccttattttaatccctttttttctttttcaaataaaaaggttacaatagctcattaaacaaactaa

SEQ ID NO: 277093 - DNA, 812 bp, Homo sapiens
gggggcgagtttccggtctgggctttggcgggtctggtttgaagctctcctgtttgacgaaagtatgtctcaggaaggtgcggtcccagctagcgcggttcccctggaagaattaagtagctggccagaggagctatgccgccgggaactgccgtccgtcctgccccgactcctctcattgtctcaacattctgaaagttggattgagcatattcaaattttgaaaattattgtagaaatgtttttacctcatatgaaccacctgacattggaacagactttcttttcacaagtgttaccaaagactgtgaaattattcgatgacatgatgtatgaattaaccagtcaagccagaggactgtcaagccaaaatttggaaatccagaccactctaaggaatattttacaaacaatggtgcagctcttaggagctctcacaggatgtgttcagcatatctgtgccacacaggaatccatcattttggaaaatattcagagtctcccctcctcagtccttcatataattaaaagcacatttgtgcattgtaagtttcagaccttctccaggctcttttcaaggaggcctattctcttcaaaagcagttaatggaactgctggacatggtttgcatggaccctttagtagatgacaatgatgatattttgaatatggtaataggtgagtgaagaaaactttctgcttagtatatggtgactataaatcatgtatcaattaaaattgtctctaatgattcatgttattttcttactaattatgcattaaaattgatttaaatcttaccaaataaatt

SEQ ID NO: 277094 - DNA, 516 bp, Homo sapiens
gccatgaagtgaacacatgctgttgcagaaatggtacaggtagacttgttcagtacagagttgccacacaccttatatttctaaaaaaaaaaaaaaaaaaaaaaaaaaagcagtatcttcaaattgcaataaatcaaagcacaataaaatactgtttgtacaaaatatgttttaaaggtttggtatataaagtttttcagaaacatgtatacttttattttttacgtggttggaggcaggagggtgtggtaagaataatgctttaactgttaacttgttcataggattgtcttatttaaattctaccagtgaagttcaggggctgtggtgtgtttgtttttttctgggtttggttttgtttcccctccccacatttccatccaaatcttaggcagttattgtgtctgtacaaaatactggtattatttataactgttctttggtcttcacctctgtaggcagtaactttgcagacctcgctacttaaattagagcttcctgactatgttcgtttgg

SEQ ID NO: 277095 - DNA, 737 bp, Homo sapiens
gcaataaacaataacaacatgatgatatgtgcagtatattaaatggtggtgagtgctatggagaaaaataaagcagggaaggaagatagggaatatgaatgtgggggtccaatttgaaatgggatatatagttagtgaagtcctcaccaaggtgacatgcaagtaaaaacctgaaatgcaaagcactggagatgggagcatgcctcatattcagggaagcaagtatagctaacacaaaggtagcaggactttgcaggtcatttgaggactttggctttcactaacaagggaaatagggagctactggaaggatttgagtaaaagagtgacattacctaatatgttttagtgtgtgtcccctgggacaggattatgttaacttgacaacactgggcttattgaatgtatggctattttatgattatctattatggtttcttttctctattataataaggcttggttcttttaggacagaattctgcccaacctgtcctgtatgtttgccttactgctagctgacaggagttggctgctagaacaacataccttggaggcgtttactcagttcgctgaggtaattataaaactgatttatcacagtgactttcaaaccattttaatatttcaaatattccagaacaatcccaaaacatttattgaactgcttctgtattgcaatcggaaaattgtctgaagggtacattactcgttatctcttttacagcttctcaaaa

SEQ ID NO: 277096 - DNA, 440 bp, Homo sapiens
ctctctctaaaaaaaaataaataaataaatcataaacctgtggattattgtagcattgtttctcatctgtcaaaaatatttcatgactatgcatagtttgaaaaggcaagtttgtccctgggcaattttcaaaatatttctttaatgtgttttcacaatactgtttacctaataaatcttaagtttttaaaagcaaaattaagccagtaatttgagtccaattccaatctcttatgagtcattgcttaaatttcaaaagggttttattttttttttaggtttgttctgagtaatgaataccctattactatgacactagtatcttccttaattatcctactcattgtctcaacattctgaaagttggattgagcatattcgtaagtaaaattgttttaactgtatgatgtactttgatgttaaggtccgagtccccacat

SEQ ID NO: 277097 - DNA, 914 bp, Homo sapiens
  misc_feature (2)..(2): n is a, c, g, or t
gnggtcccggaacaaatccgaccccagaagtggggacttctggccctcacctccccatttgaatgtaatgtttacagtgatccagacctggggatgcttgcttcccgacgtgtcctgggatcgcgcttctgaaaaagctcacctcacaacgcctcctccggacctaaatcgcgcaccagtttgttctgagtaatgaataccctattactatgacactagtatcttccttaattatcctactcattgtctcaacattctgaaagttggattgagcatattcaaattttgaaaattattgtagaaatgtttttacctcatatgaaccacctgacattggaacagactttcttttcacaagtgttaccaaagactgtgaaattattcgatgacatgatgtatgaattaaccagtcaagccagaggactgtcaagccaaaatttggaaatccagaccactctaaggaatattttacaaacaatggtgcagctcttaggagctctcacaggatgtgttcagcatatctgtgccacacaggaatccatcattttggaaaatattcagagtctcccctcctcagtccttcatataattaaaagcacatttgtgcattgtaagaatagtgaatctgtgtattctgggtgtttacacctagtttcagaccttctccaggctcttttcaaggaggcctattctcttcaaaagcagttaatggaactgctggacatggtttgcatggaccctttagtagatgacaatgatgatattttgaatatggtaataggtgagtgaagaaaactttctgcttagtatatggtgactataaatcatgtatcaattaaaattgtctctaatgattcatgttattttcttactaattatgcattaaaattgatttaaatcttaccaaataaatt

SEQ ID NO: 277098 - DNA, 3770 bp, Homo sapiens
gggggcgagtttccggtctgggctttggcgggtctggtttgaagctctcctgtttgacgaaagtatgtctcaggaaggtgcggtcccagctagcgcggttcccctggaagaattaagtagctggccagaggagctatgccgccgggaactgccgtccgtcctgccccgactcctctcattgtctcaacattctgaaagttggattgagcatattcactgtgaaattattcgatgacatgatgtatgaattaaccagtcaagccagaggactgtcaagccaaaatttggaaatccagaccactctaaggaatattttacaaacaatggtgcagctcttaggagctctcacaggatgtgttcagcatatctgtgccacacaggaatccatcattttggaaaatattcagagtctcccctcctcagtccttcatataattaaaagcacatttgtgcattgtaagtttcagaccttctccaggctcttttcaaggaggcctattctcttcaaaagcagttaatggaactgctggacatggtttgcatggaccctttagtagatgacaatgatgatattttgaatatggtaatagttattcattctttattggatatctgctctgttatttccagtatggaccatgcatttcatgccaatacttggaagtttataattaagcagagccttaagcaccagtccataataaaaagccagttgaaacacaaagatataattactagcttgtgtgaagacattcttttctccttccattcttgtttacagttagctgagcagatgacacagtcagatgcacaggataatgctgactacagattatttcagaaaacactcaaattgtgtcgtttttttgccaactcccttttgcactacgctaaggaatttcttcctttcctctctgattcttgctgtactttgcaccaactgtatcttcagatacacagcaagtttcctccaagcctttatgctaccaggatttctaaagcacaccaagaggaaatagcaggtgctttcctagtgacactggatccacttatcagtcagctgctcacatttcagcctttcatgcaggtggttttggacagtaaattagacctgccatgtgaactgcagtttccacaatgtcttcttctggttgttgtcatggataagctgccatctcagcctaaggaagtgcaaaccctgtggtgcacagacagccaggtctcagaaacgacaaccaggatatctctactcaaagccgttttctacagttttgagcagtgttctggtgaactctctctacctgttcatttacagggattaaagagtaaggggaaagctgaggtggctgtcaccttgtatcagcatgtttgtgttcatctgtgtacatttattacttcctttcatccctcactgtttgctgaactggatgctgctctgctgaatgctgtacttagtgctaatatgatcacctctttgttagctatggatgcatggtgcttccttgctcgatatgggactgctgaactgtgtgcacaccatgtcaccatagtggctcatctgataaagtcatgccctggagaatgttatcaactcatcaacctatcaatactgttgaagcgtctctttttcttcatggcaccaccccatcagctggagtttatccagaaattttccccaaaagaagcagaaaatctgcctctgtggcaacatatttccttccaggcgttacctcctgagcttagggaacaaactgtccatgaggtcaccacagtaggcactgcagaatgcaggaaatggctgagcaggagtcgtactttgggagaactagaatctctgaacacagtactgtctgctttgcttgcagtatgtaattctgctggtgaagctttggatacaggaaaacaaactgcaattatcgaagttgtgagtcagctttgggcttttttaaacattaaacaggtagcagatcaaccttatgttcaacagacattcagccttttacttccactgttgggatttttcattcaaactctagatcctaaactgatacttcaggcagtaactttgcagacctcgctacttaaattagagcttcctgactatgttcgtttggcaatgttggattttgtatcttctttaggaaaactttttatacctgaagctatccaggacagaattctgcccaacctgtcctgtatgtttgccttactgctagctgacaggagttggctgctagaacaacataccttggaggcgtttactcagttcgctgagggaacaaatcatgaagagatagttccacagtgtctcagttctgaagaaactaagaacaaagttgtatcctttctggagaagactgggtttgtagatgaaactgaagctgccaaagtggaacgtgtgaaacaggaaaaaggtattttctgggaaccctttgctaatgtgactgtagaagaagcaaagaggtcatctttacagccttatgcaaaaagagctcgtcaggagttcccctgggaagaagagtacaggtcagcgctgcatacaatagcaggggctttggaagcaactgagtcactactccaaaagggtcctgctccagcctggctttcaatggaaatggaggcgctccaagaaaggatggataagctaaaacgttacatacatactctagggtgaaacttatcactaggcagaactgggtttgatgctttgtcaactgaaaatacttatgtctgtacattttctaacagatataaaacaaattttgtaaagttgaatctagtgaaaataatctttatttgacatttagagaacaggattgtggggaatattcttattaagaactttggtacaatgtactacatgtggaacagtcaggaactgcctaggtccacaaagaaccatttactcagatagtctaactgtaaacaaataaataagctgcctaaggaaacctcagcaatttaaaatcatttatataatttatagctaaaattttttaaagttgtatttcataatagagcttactcttatgttaaagaatggcacaaaattaagctaaccagcttgaattacattttctttacttccagaattgtcctggaaaaagcagtaaattcgacctctcctcagctacttgctcttcatagaaactggcctcagtcaaatgcacaaaggctcttcctcctggaaaccagtactgtgagcctcaccacccagggcttttagccagcactcacagtcagtctcctacttcagttggcacagactggataatgagctcctgggatgggaaaagcaggccactttggggttttcttgtcccaaagcctgcttttgaggtattgattttttttaaaaaaagggaatcctttttcctaaagtttaactcacatctattgtcaccagttattatcttcccagttcagctccccttcttcttcccagccttcagcctctccctgcaacaaaataaagcacaccaagaacccactgaaacaaatcatatgcaaaaatcatacgcaaatttgaaaaagcaggaatttaaaatttatcttttgatgccagaaacactacctcgtactaagtaaaataacttagagctctaacagaaagttgaaaagtaggattacaaaaccatggcactggaaaatagcttttcaaaaaccataaaatccagtaaaaatcagtgtggatgacaccaaatccttattttaatccctttttttctttttcaaataaaaaggttacaatagctcattaaacaaactaa

SEQ ID NO: 277099 - DNA, 3973 bp, Homo sapiens
  misc_feature (239)..(239): n is a, c, g, or t
ccttcgagaatcttgctagaccattcggtatgtgctgcgcgtgctgccacgttaggtaaaggtcatgcattgggtcaatcatccttcgtgtcctgaaggagaatctcattggttctctgagcataggttgcttgtcacttactctacgcagactagatataaaccgtcgccggcagagttaaacctgaagcctgttctagaagcgaagactcctaggcactgcgcaggttacatcgtangctgctatctgatctcgtggactctagtcatccatgcgtacgattcgtgtcgagcatctgcattgatcaattgtgactcgcccgctctgcaaattttgaaaattattgtagaaatgtttttacctcatatgaaccacctgacattggaacagactttcttttcacaagtgttaccaaagactgtgaaattattcgatgacatgatgtatgaattaaccagtcaagccagaggactgtcaagccaaaatttggaaatccagaccactctaaggaatattttacaaacaatggtgcagctcttaggagctctcacaggatgtgttcagcatatctgtgccacacaggaatccatcattttggaaaatattcagagtctcccctcctcagtccttcatataattaaaagcacatttgtgcattgtaagtttcagaccttctccaggctcttttcaaggaggcctattctcttcaaaagcagttaatggaactgctggacatggtttgcatggaccctttagtagatgacaatgatgatattttgaatatggtaatagttattcattctttattggatatctgctctgttatttccagtatggaccatgcatttcatgccaatacttggaagtttataattaagcagagccttaagcaccagtccataataaaaagccagttgaaacacaaagatataattactagcttgtgtgaagacattcttttctccttccattcttgtttacagttagctgagcagatgacacagtcagatgcacaggataatgctgactacagattatttcagaaaacactcaaattgtgtcgtttttttgccaactcccttttgcactacgctaaggaatttcttcctttcctctctgattcttgctgtactttgcaccaactgtatcttcagatacacagcaagtttcctccaagcctttatgctaccaggatttctaaagcacaccaagaggaaatagcaggtgctttcctagtgacactggatccacttatcagtcagctgctcacatttcagcctttcatgcaggtggttttggacagtaaattagacctgccatgtgaactgcagtttccacaatgtcttcttctggttgttgtcatggataagctgccatctcagcctaaggaagtgcaaaccctgtggtgcacagacagccaggtctcagaaacgacaaccaggatatctctactcaaagccgttttctacagttttgagcagtgttctggtgaactctctctacctgttcatttacagggattaaagagtaaggggaaagctgaggtggctgtcaccttgtatcagcatgtttgtgttcatctgtgtacatttattacttcctttcatccctcactgtttgctgaactggatgctgctctgctgaatgctgtacttagtgctaatatgatcacctctttgttagctatggatgcatggtgcttccttgctcgatatgggactgctgaactgtgtgcacaccatgtcaccatagtggctcatctgataaagtcatgccctggagaatgttatcaactcatcaacctatcaatactgttgaagcgtctctttttcttcatggcaccaccccatcagctggagtttatccagaaattttccccaaaagaagcagaaaatctgcctctgtggcaacatatttccttccaggcgttacctcctgagcttagggaacaaactgtccatgaggtcaccacagtaggcactgcagaatgcaggaaatggctgagcaggagtcgtactttgggagaactagaatctctgaacacagtactgtctgctttgcttgcagtatgtaattctgctggtgaagctttggatacaggaaaacaaactgcaattatcgaagttgtgagtcagctttgggcttttttaaacattaaacaggtagcagatcaaccttatgttcaacagacattcagccttttacttccactgttgggatttttcattcaaactctagatcctaaactgatacttcaggcagtaactttgcagacctcgctacttaaattagagcttcctgactatgttcgtttggcaatgttggattttgtatcttctttaggaaaactttttatacctgaagctatccaggacagaattctgcccaacctgtcctgtatgtttgccttactgctagctgacaggagttggctgctagaacaacataccttggaggcgtttactcagttcgctgagggaacaaatcatgaagagatagttccacagtgtctcagttctgaagaaactaagaacaaagttgtatcctttctggagaagactgggtttgtagatgaaactgaagctgccaaagtggaacgtgtgaaacaggaaaaaggtattttctgggaaccctttgctaatgtgactgtagaagaagcaaagaggtcatctttacagccttatgcaaaaagagctcgtcaggagttcccctgggaagaagagtacaggtcagcgctgcatacaatagcaggggctttggaagcaactgagtcactactccaaaagggtcctgctccagcctggctttcaatggaaatggaggcgctccaagaaaggatggataagctaaaacgttacatacatactctagggtgaaacttatcactaggcagaactgggtttgatgctttgtcaactgaaaatacttatgtctgtacattttctaacagatataaaacaaattttgtaaagttgaatctagtgaaaataatctttatttgacatttagagaacaggattgtggggaatattcttattaagaactttggtacaatgtactacatgtggaacagtcaggaactgcctaggtccacaaagaaccatttactcagatagtctaactgtaaacaaataaataagctgcctaaggaaacctcagcaatttaaaatcatttatataatttatagctaaaattttttaaagttgtatttcataatagagcttactcttatgttaaagaatggcacaaaattaagctaaccagcttgaattacattttctttacttccagaattgtcctggaaaaagcagtaaattcgacctctcctcagctacttgctcttcatagaaactggcctcagtcaaatgcacaaaggctcttcctcctggaaaccagtactgtgagcctcaccacccagggcttttagccagcactcacagtcagtctcctacttcagttggcacagactggataatgagctcctgggatgggaaaagcaggccactttggggttttcttgtcccaaagcctgcttttgaggtattgattttttttaaaaaaagggaatcctttttcctaaagtttaactcacatctattgtcaccagttattatcttcccagttcagctccccttcttcttcccagccttcagcctctccctgcaacaaaataaagcacaccaagaacccactgaaacaaatcatatgcaaaaatcatacgcaaatttgaaaaagcaggaatttaaaatttatcttttgatgccagaaacactacctcgtactaagtaaaataacttagagctctaacagaaagttgaaaagtaggattacaaaaccatggcactggaaaatagcttttcaaaaaccataaaatccagtaaaaatcagtgtggatgacaccaaatccttattttaatccctttttttctttttcaaataaaaaggttacaatagctcattaaacaaactaa

SEQ ID NO: 277100 - DNA, 3961 bp, Homo sapiens
  misc_feature (2)..(2): n is a, c, g, or t
gnggtcccggaacaaatccgaccccagaagtggggacttctggccctcacctccccatttgaatgtaatgtttacagtgatccagacctggggatgcttgcttcccgacgtgtcctgggatcgcgcttctgaaaaagctcacctcacaacgcctcctccggacctaaatcgcgcaccagtttgttctgagtaatgaataccctattactatgacactagtatcttccttaattatcctactcattgtctcaacattctgaaagttggattgagcatattcaaattttgaaaattattgtagaaatgtttttacctcatatgaaccacctgacattggaacagactttcttttcacaagtgttaccaaagactgtgaaattattcgatgacatgatgtatgaattaaccagtcaagccagaggactgtcaagccaaaatttggaaatccagaccactctaaggaatattttacaaacaatggtgcagctcttaggagctctcacaggatgtgttcagcatatctgtgccacacaggaatccatcattttggaaaatattcagagtctcccctcctcagtccttcatataattaaaagcacatttgtgcattgtaagaatagtgaatctgtgtattctgggtgtttacacctagtttcagaccttctccaggctcttttcaaggaggcctattctcttcaaaagcagttaatggaactgctggacatggtttgcatggaccctttagtagatgacaatgatgatattttgaatatggtaatagttattcattctttattggatatctgctctgttatttccagtatggaccatgcatttcatgccaatacttggaagtttataattaagcagagccttaagcaccagtccataataaaaagccagttgaaacacaaagatataattactagcttgtgtgaagacattcttttctccttccattcttgtttacagttagctgagcagatgacacagtcagatgcacaggataatgctgactacagattatttcagaaaacactcaaattgtgtcgtttttttgccaactcccttttgcactacgctaaggaatttcttcctttcctctctgattcttgctgtactttgcaccaactgtatcttcagatacacagcaagtttcctccaagcctttatgctaccaggatttctaaagcacaccaagaggaaatagcaggtgctttcctagtgacactggatccacttatcagtcagctgctcacatttcagcctttcatgcaggtggttttggacagtaaattagacctgccatgtgaactgcagtttccacaatgtcttcttctggttgttgtcatggataagctgccatctcagcctaaggaagtgcaaaccctgtggtgcacagacagccaggtctcagaaacgacaaccaggatatctctactcaaagccgttttctacagttttgagcagtgttctggtgaactctctctacctgttcatttacagggattaaagagtaaggggaaagctgaggtggctgtcaccttgtatcagcatgtttgtgttcatctgtgtacatttattacttcctttcatccctcactgtttgctgaactggatgctgctctgctgaatgctgtacttagtgctaatatgatcacctctttgttagctatggatgcatggtgcttccttgctcgatatgggactgctgaactgtgtgcacaccatgtcaccatagtggctcatctgataaagtcatgccctggagaatgttatcaactcatcaacctatcaatactgttgaagcgtctctttttcttcatggcaccaccccatcagctggagtttatccagaaattttccccaaaagaagcagaaaatctgcctctgtggcaacatatttccttccaggcgttacctcctgagcttagggaacaaactgtccatgaggtcaccacagtaggcactgcagaatgcaggaaatggctgagcaggagtcgtactttgggagaactagaatctctgaacacagtactgtctgctttgcttgcagtatgtaattctgctggtgaagctttggatacaggaaaacaaactgcaattatcgaagttgtgagtcagctttgggcttttttaaacattaaacaggtagcagatcaaccttatgttcaacagacattcagccttttacttccactgttgggatttttcattcaaactctagatcctaaactgatacttcaggcagtaactttgcagacctcgctacttaaattagagcttcctgactatgttcgtttggcaatgttggattttgtatcttctttaggaaaactttttatacctgaagctatccaggacagaattctgcccaacctgtcctgtatgtttgccttactgctagctgacaggagttggctgctagaacaacataccttggaggcgtttactcagttcgctgagggaacaaatcatgaagagatagttccacagtgtctcagttctgaagaaactaagaacaaagttgtatcctttctggagaagactgggtttgtagatgaaactgaagctgccaaagtggaacgtgtgaaacaggaaaaaggtattttctgggaaccctttgctaatgtgactgtagaagaagcaaagaggtcatctttacagccttatgcaaaaagagctcgtcaggagttcccctgggaagaagagtacaggtcagcgctgcatacaatagcaggggctttggaagcaactgagtcactactccaaaagggtcctgctccagcctggctttcaatggaaatggaggcgctccaagaaaggatggataagctaaaacgttacatacatactctagggtgaaacttatcactaggcagaactgggtttgatgctttgtcaactgaaaatacttatgtctgtacattttctaacagatataaaacaaattttgtaaagttgaatctagtgaaaataatctttatttgacatttagagaacaggattgtggggaatattcttattaagaactttggtacaatgtactacatgtggaacagtcaggaactgcctaggtccacaaagaaccatttactcagatagtctaactgtaaacaaataaataagctgcctaaggaaacctcagcaatttaaaatcatttatataatttatagctaaaattttttaaagttgtatttcataatagagcttactcttatgttaaagaatggcacaaaattaagctaaccagcttgaattacattttctttacttccagaattgtcctggaaaaagcagtaaattcgacctctcctcagctacttgctcttcatagaaactggcctcagtcaaatgcacaaaggctcttcctcctggaaaccagtactgtgagcctcaccacccagggcttttagccagcactcacagtcagtctcctacttcagttggcacagactggataatgagctcctgggatgggaaaagcaggccactttggggttttcttgtcccaaagcctgcttttgaggtattgattttttttaaaaaaagggaatcctttttcctaaagtttaactcacatctattgtcaccagttattatcttcccagttcagctccccttcttcttcccagccttcagcctctccctgcaacaaaataaagcacaccaagaacccactgaaacaaatcatatgcaaaaatcatacgcaaatttgaaaaagcaggaatttaaaatttatcttttgatgccagaaacactacctcgtactaagtaaaataacttagagctctaacagaaagttgaaaagtaggattacaaaaccatggcactggaaaatagcttttcaaaaaccataaaatccagtaaaaatcagtgtggatgacaccaaatccttattttaatccctttttttctttttcaaataaaaaggttacaatagctcattaaacaaactaa

SEQ ID NO: 277101 - DNA, 4011 bp, Homo sapiens
gggggcgagtttccggtctgggctttggcgggtctggtttgaagctctcctgtttgacgaaagtatgtctcaggaaggtgcggtcccagctagcgcggttcccctggaagaattaagtagctggccagaggagctatgccgccgggaactgccgtccgtcctgccccgactcctctcattgtctcaacattctgaaagttggattgagcatattcactgtgaaattattcgatgacatgatgtatgaattaaccagtcaagccagaggactgtcaagccaaaatttggaaatccagaccactctaaggaatattttacaaacaatggtgcagctcttaggagctctcacaggatgtgttcagcatatctgtgccacacaggaatccatcattttggaaaatattcagagtctcccctcctcagtccttcatataattaaaagcacatttgtgcattgtaagtttcagaccttctccaggctcttttcaaggaggcctattctcttcaaaagcagttaatggaactgctggacatggtttgcatggaccctttagtagatgacaatgatgatattttgaatatggtaatagttattcattctttattggatatctgctctgttatttccagtatggaccatgcatttcatgccaatacttggaagtttataattaagcagagccttaagcaccagtccataataaaaagccagttgaaacacaaagatataattactagcttgtgtgaagacattcttttctccttccattcttgtttacagttagctgagcagatgacacagtcagatgcacaggataatgctgactacagattatttcagaaaacactcaaattgtgtcgtttttttgccaactcccttttgcactacgctaaggaatttcttcctttcctctctgattcttgctgtactttgcaccaactgtatcttcagatacacagcaagtttcctccaagcctttatgctaccaggatttctaaagcacaccaagaggaaatagcaggtgctttcctagtgacactggatccacttatcagtcagctgctcacatttcagcctttcatgcaggtggttttggacagtaaattagacctgccatgtgaactgcagtttccacaatgtcttcttctggttgttgtcatggataagctgccatctcagcctaaggaagtgcaaaccctgtggtgcacagacagccaggtctcagaaacgacaaccaggatatctctactcaaagccgttttctacagttttgagcagtgttctggtgaactctctctacctgttcatttacagggattaaagagtaaggggaaagctgaggtggctgtcaccttgtatcagcatgtttgtgttcatctgtgtacatttattacttcctttcatccctcactgtttgctgaactggatgctgctctgctgaatgctgtacttagtgctaatatgatcacctctttgttagctatggatgcatggtgcttccttgctcgatatgggactgctgaactgtgtgcacaccatgtcaccatagtggctcatctgataaagtcatgccctggagaatgttatcaactcatcaacctatcaatactgttgaagcgtctctttttcttcatggcaccaccccatcagctggagtttatccagaaattttccccaaaagaagcagaaaatctgcctctgtggcaacatatttccttccaggcgttacctcctgagcttagggaacaaactgtccatgaggtcaccacagtaggcactgcagaatgcaggaaatggctgagcaggagtcgtactttgggagaactagaatctctgaacacagtactgtctgctttgcttgcagtatgtaattctgctggtgaagctttggatacaggaaaacaaactgcaattatcgaagttgtgagtcagctttgggcttttttaaacattaaacaggtagcagatcaaccttatgttcaacagacattcagccttttacttccactgttgggatttttcattcaaactctagatcctaaactgatacttcaggcagtaactttgcagacctcgctacttaaattagagcttcctgactatgttcgtttggcaatgttggattttgtatcttctttaggaaaactttttatacctgaagctatccaggacagaattctgcccaacctgtcctgtatgtttgccttactgctagctgacaggagttggctgctagaacaacataccttggaggcgtttactcagttcgctgagggaacaaatcatgaagagatagttccacagtgtctcagttctgaagaaactaagaacaaagttgtatcctttctggagaagactgggtttgtagatgaaactgaagctgccaaagtggaacgtgtgaaacaggaaaaaggtattttctgggaaccctttgctaatgtgactgtagaagaagcaaagaggtcatctttacagccttatgcaaaaagagctcgtcaggagttcccctgggaagaagagtacaggtcagcgctgcatacaatagcaggggctttggaagcaactgagtcactactccaaaagggtcctgctccagcctggctttcaatggaaatggaggcgctccaagaaaggatggataagctaaaacgttacatacatactctagggtgaaacttatcactaggcagaactgggtttgatgctttgtcaactgaaaatacttatgtctgtacattttctaacagatataaaacaaattttgtaaagttgaatctagtgaaaataatctttatttgacatttagagaacaggattgtggggaatattcttattaagaactttggtacaatgtactacatgtggaacagtcaggaactgcctaggtccacaaagaaccatttactcagatagtctaactgtaaacaaataaataagctgcctaaggaaacctcagcaatttaaaatcatttatataatttatagctaaaattttttaaagttgtatttcataatagagcttactcttatgttaaagaatggcacaaaattaagctaaccagcttgaattacattttctttacttccagaattgtcctggaaaaagcagtaaattcgacctctcctcagctacttgctcttcatagaaactggcctcagtcaaatgcacaaaggctcttcctcctggaaaccagtactgtgagcctcaccacccagggcttttagccagcactcacagtcagtctcctacttcagttggcacagactggataatgagctcctgggatgggaaaagcaggccactttggggttttcttgtcccaaagcctgcttttgaggtattgattttttttaaaaaaagggaatcctttttcctaaagtttaactcacatctattgtcaccagttattatcttcccagttcagctccccttcttcttcccagccttcagcctctccctcagtaatttctgctgcagcaaattttgaggaaaactgcatcactggggagacatcatccttttttgggaccatttctgtcctcagttcaggtaatataagaaaagcagcagaaggcttaatttctgggatcatatcagcaaaccaatccatctcaggatcttttactggcttcttttttacttgaatggtgaattcctctcctaaaccaagttctgatggaaccttaaggggcctttcttgtgatgatacttttggcggctcgatttggtctgcgtcatcccccctttgtacaaggctaatctttcggggtaagcttgatttccaaggcatagactcttcagtgagtgaaagcaaagcaggaataggcttctgctcccctgaggtaacaggttttgtagcagtgattccacctcctgggtttactttagtatctaagctgctgggctcgcagtcatcccaagatgactcttccacatccaaggtagtgcactgggacttgacatcatcacaaggttctctaggccaaatctgtatgttgacagtttgatt

SEQ ID NO: 277102 - DNA, 421 bp, Homo sapiens
gttttacaaagaagttttgcctttattaataagaaaccagtgatgtttagtttggaataactttttttaaaatgttatgtctttgaatgtcatgttagccttttactgcagggcccacttagagaggctgataaaagctataaaccctcctccttcctgctccccatgccctctcaaatctcaaacacacacagaaaattgaatatagtattgggaggtttttgacttccttgaagtctgttcattaacttcttaaaggttcatattgatattgcacaggaggctgctgagggtgaagcagcctcagattttggggcctaaaggatggtgctgagggtctggctccatgtcctcctcgtcctcggggaaaggcggcctgatttggcaggggggaagagggccttgcgctgacggaggcatg

SEQ ID NO: 277103 - DNA, 237 bp, Homo sapiens
accattctaaatccttggtaagggctccgtgcagtagttaaccccccaaatccgactaaggagagcaggacggcggaacccgggtgccctaatcaaatatgggcaccaaggaaggaaaaaagcgtccgcatctgctcgctggtcaccgccgacgacagattcgtcacctgaatcaccgacgtgggggtgaggccgaagcctaagcccaaaccgaagccgccgccgctgttcatcccg

SEQ ID NO: 277104 - DNA, 1302 bp, Homo sapiens
aagttagaaagaacctgagacgtgacactgaaaatcagtagaagaaatacgccacatttattctaccggggaagacagtgggaaacctgaaactgccattgagcagaaggaaaacatccctttccagaacctttctcgtttttctaaaaatctgcacttttggaagtgatcccccaaagagacctccagactctaccatgagtgtctccagctgaactcatcgtgtctaatcctcaccctagcttatcctgttcaaatcatttccatctttttctggatgaacctgggcggatgtcagaccagagaagagcacagaatgtaccagagagagtcttgctctgtcacccaggctgaagtgcacccaggctgaagttggaggctatggtgagctgcaccactacaccactatgggaggccgaggcgagtggattgcctgagctcaggagttcgagaccagcctgggcaacgttgtgaaaccccgtctctactaaaacacaaaaaattagccaggcctggcggcatgtgcctatagtcccagctactcaggaggctgaggcaggagaattgcttgaacccgggagctggaggttgcagtgagccgagattgcgccactgcactccagcctcggtgacagagtgagactccgtctcaaaaaaaaacaatataaggtgaaggccaagcagggtggcacatacctgttgtctcacctactcaaaaggctgaggccagaggaggattgctggaagtgagttcaaagccagcctagagaatatattgagactctgtctctaaattttatatatatatggtgaattcacctttaccatatcttttatgtataagcaatgggattgattagcaagtaatgggactctgaaatcaaaggggtaaatttgggtatatctttataaatataataaccttgaaccccacaaatctctctaagcgtcctttaaaaaatagactttctgtctgagtaggtgagtccttttttttgtttgaagatactagaaagctcttacttgagacagctcctaaaagaatgtcaattcaacagaagtctcatagccagtataactaattctaaccccctaactagagtcagatactaggatacccctaagggacaacaatgaaatctgaatttgggtgtcattgcttacatatcaaaacagttgcaagagacagttaatttatatttgcagaaaccatatgaatttgtatgaaaatgattttttaaagtgctatatcaagaaaactagaacataatgcagaacaaataaaatttacttatatgggtg

SEQ ID NO: 277105 - DNA, 541 bp, Homo sapiens
aagttagaaagaacctgagacgtgacactgaaaatcagtagaagaaatacgccacatttattctaccggggaagacagtgggaaacctgaaactgccattgagcagaaggaaaacatccctttccagaacctttctcgtttttctaaaaatctgcacttttggaagtgatcccccaaagagacctccagactctaccatgagtgtctccagctgaactcatcgtgtctaatcctcaccctagcttatcctgttcaaatcatttccatctttttctggatgaacctgggcggatgtcagaccagagaagagcacagaatgtaccagagagagatggggtttcaccatgttggccaggatgtctcaatctctcgacctcgtgatccgcctgcctcagcctctcaaagtgctaggattatagaagtgagccaccacgctcggcaaatgtttcaattttattcacaaaagtatactttacccaattgttgtaaactataaatattaatgtttaaaataaaatttttcttgactcaaaaacaaaac

SEQ ID NO: 277106 - DNA, 4208 bp, Homo sapiens
aagttagaaagaacctgagacgtgacactgaaaatcagtagaagaaatacgccacatttattctaccggggaagacagtgggtaagaaaaaaataccgtaacatttaaattaaaaaataattaaaaatttaaaagcaaatagaaattaaaacaaaatacactgataacctcgctgccagaacaagatacaccaaaaaaaaattttttttttgattatacaaaacatacaaagcatcctacaaacagaaagaaattgcaaacagggtcgaatggtgagatcctaccattatatttgtcagcactaaacccgtgcctcttgcgcctatccgaagtttcctcggattaagaagaaacagccatggttaaaccggtatttgcgacaccaacaattatctgtagccgacgtaccccaacttctacatgagtgaaaaatcgccagcatagccagggcgagactattgcgaattctaacttggtatgatttaaaaattccagacactgctaaatttttttaaattgcattcttcagtacctagattaatacaggagttataaaccgcacgcatggctataatgggggctcctattacggaacaggaatttgctactactaaaattatgtaggcatggttaaagccagaattgttacaaccagaaatcgcaaactggaataactctcaacttgctacggtaagaaataactaaactctgacttggtcagactaagaaatcaggagtttgagaccagcccaggcaacatggcgaaatcctgtctctaggaaggatacaaaaaattacccgggcgtggtggcgcgtgcctgtggtcccagctaccccggaggctggggtgggaggatcgcttcagcccgggaggcggaggttgcagtgagccgagatcgcggcactgcactccagcctgggcgacagagccggaccccgtatcaagaaagaaagagaaaagaaaaagaaccaaagaaaaagaaaagtcaccatcgcacggttaagtctgccttgctacagctaaacagtgacttcctaggaccaagaaatcgcagccagggctagaccgatgccctaaatcgggacttgcttaggctgagaaatcacattttggctagttatttggacaagaggtagaaatagcgggcaccgcgaaatcgaaacttgctaggaccaagaagccaacgacgggcgaaaccgcaggggcctgcgatagagacgccagcggcgccgccgggggactgggttcaggaggccgagcaggaacccgtgcgtcggcgctcgcggcgctgtgaagagacggcgtccgcgcagctcctctgcctctggctcggaggagcggcgggctcccccgcccagcgccggcgtcgcccgggaaccccagactctgcgcaactggctgcgattccaaatccctcagatcggctaccagagcgctgccgccaccgagaaaatggaggcaccgaggaacaagatgtgccgcgaccaagagaactcggcttggcgaaatggcggtgctgggaccctaagagtgacgccagccggaggagttcccaaggacaacatccattttggcggaaccaacggtgttgtcacgcagaaaatgtcgaccctcggaaaagagaggttctgcgaccgagaaattcggtgcaacaagtgctgtgacagaaaaccccccgctcggcgctgctggcgaaagagccaacaaaacgctgggtgctgccaccgtgacaccgactttaggaccccggcctcggatggagaaaggagggtacggagccaccacataacttcctaatgtcttcaaatagcgaaagtgctagccggaaactgccggctgggtttacctattggtgctcgtgtgggactagcagattcgagaaaccagcgggactggaacctagtacacttcgggcagttgagaaatgacttaccaggacaaatactgcttctggctcgatggtgctgcccatgaacatccgccggctctgagaaacgagctgcactgtcagtgagaaaccgtgggcactgagaaacgagcggactgcaactgataactgcccacccagtgccactacgacaaagtgctgctggcactactcccaccctccgtcctcaaatcagtcccctcccgcctaagaagacctttatttttcctagcgaagtcatactgagggccccatcaaccgatcccttgcgatgcgcatgggaaaaggaggcagtatagggaccgagaatcgggcggattgggctggccctggtaacaaaagccatccgggtcgccaaccgtcttccactgcaagaaacaaaccttccagtggctgggctccgcccttctccttggtcagagccctccaggctcctaagggcgaagccgacacctcatccctttggaacttgaagttctcagtccaagacctccgtggagagtgaaagactcaatgcctcctgaccgaggcttcaggcctgccccggcagctaggaaacctgaaactgccattgagcagaaggaaaacatccctttccagaacctttctcgtttttctaaaaatctgcacttttggaagtgatcccccaaagagacctccagactctaccatgagtgtctccagctgaactcatcgtgtctaatcctcaccctagcttatcctgttcaaatcatttccatctttttctggatgaacctgggcggatgtcagaccagagaagagcacagaatgtaccagagagggtaagaagacccattttgggctctcacttctcacccactcccaagatggtcacctccagtcttcccccctataccttaccctttcttcagctagccaaaacctgccctggtacttgaggcttcttcagttgccttcttttgcaggcagtagaataaaggaaagagggcagtgtcaatagaagaaaagttacagccactttatctaattgaagatactgtgcagagcctttgaaaaaacaaaatatctcacccaccattcctctctccgtttccaccctagcttcctattttagcaaaaatggtgggatcagcacctctggagggaaggggtcactcttccaggttaggaatgtggacaggagttatggagcttacttccctaaaggaggaggcattctagttccggcattcagattctgtctgattccaatatggtgtttgtgtggggtggtcagagaaagggcaagtcggcaactgtatattcctcagcaagagactataagacatttgcatttggaaaatcaggagagatgctgatatggtttggctccgtgtccccacccaaatctcaccttgaattgtaataatccccatgtgtcaagggtgagaccaggtggagataattgaatcatggggttggttttccccatgctgttctcgtgttagtgagtgggtctcacgagatctgatagttttataattgcctggcattttcccctgctggcacacattctcctgcggccctctgaagaggtgccttccatcacgattgtaagtttcctgaggcctccccagccatgcagagctttgagtcaattaaaacttctttctttataaattacccagtcttggatatttcttcatagcagtgtgggaacagactaatacagatgtggtagagttgggtgctgggtggcaatgctaagtgtatgcaggttctaggcaccagatcaaatctggaatgcaaactgtgggacacaaaccacaaatgatgcccagcctttaatactttctttcattgtttgtcatatagaagaagaaacaaagaataaagaaaagcattttttttgagacggagtctcgctctgttccccaggctggagtgtagtggtacgatctcggctcactgcaacatccacctcccaggttcaagttattctcctgcctcagctcccaagcagccaggattacaggtgcataccatcacacctggcttatttttgtatttttagtaaagacagggtttcaccctgttggccaggctggtctcaaagtcctgacctcaagtgatccacctgcttcggcctctcaaagtgctggaattacaggcatgagtcacagtgcccagccgcaaagtatatttttgtaaaatttcatcaagataaatctggctaaaccaataaactaataataacaaaacttgggttattgttgactaaaggaaggtggcacaaaatggaaacatttttaaacattc

SEQ ID NO: 277107 - DNA, 3397 bp, Homo sapiens
aagttagaaagaacctgagacgtgacactgaaaatcagtagaagaaatacgccacatttattctaccggggaagacagtgggtaagaaaaaaataccgtaacatttaaattaaaaaataattaaaaatttaaaagcaaatagaaattaaaacaaaatacactgataacctcgctgccagaacaagatacaccaaaaaaaaattttttttttgattatacaaaacatacaaagcatcctacaaacagaaagaaattgcaaacagggtcgaatggtgagatcctaccattatatttgtcagcactaaacccgtgcctcttgcgcctatccgaagtttcctcggattaagaagaaacagccatggttaaaccggtatttgcgacaccaacaattatctgtagccgacgtaccccaacttctacatgagtgaaaaatcgccagcatagccagggcgagactattgcgaattctaacttggtatgatttaaaaattccagacactgctaaatttttttaaattgcattcttcagtacctagattaatacaggagttataaaccgcacgcatggctataatgggggctcctattacggaacaggaatttgctactactaaaattatgtaggcatggttaaagccagaattgttacaaccagaaatcgcaaactggaataactctcaacttgctacggtaagaaataactaaactctgacttggtcagactaagaaatcaggagtttgagaccagcccaggcaacatggcgaaatcctgtctctaggaaggatacaaaaaattacccgggcgtggtggcgcgtgcctgtggtcccagctaccccggaggctggggtgggaggatcgcttcagcccgggaggcggaggttgcagtgagccgagatcgcggcactgcactccagcctgggcgacagagccggaccccgtatcaagaaagaaagagaaaagaaaaagaaccaaagaaaaagaaaagtcaccatcgcacggttaagtctgccttgctacagctaaacagtgacttcctaggaccaagaaatcgcagccagggctagaccgatgccctaaatcgggacttgcttaggctgagaaatcacattttggctagttatttggacaagaggtagaaatagcgggcaccgcgaaatcgaaacttgctaggaccaagaagccaacgacgggcgaaaccgcaggggcctgcgatagagacgccagcggcgccgccgggggactgggttcaggaggccgagcaggaacccgtgcgtcggcgctcgcggcgctgtgaagagacggcgtccgcgcagctcctctgcctctggctcggaggagcggcgggctcccccgcccagcgccggcgtcgcccgggaaccccagactctgcgcaactggctgcgattccaaatccctcagatcggctaccagagcgctgccgccaccgagaaaatggaggcaccgaggaacaagatgtgccgcgaccaagagaactcggcttggcgaaatggcggtgctgggaccctaagagtgacgccagccggaggagttcccaaggacaacatccattttggcggaaccaacggtgttgtcacgcagaaaatgtcgaccctcggaaaagagaggttctgcgaccgagaaattcggtgcaacaagtgctgtgacagaaaaccccccgctcggcgctgctggcgaaagagccaacaaaacgctgggtgctgccaccgtgacaccgactttaggaccccggcctcggatggagaaaggagggtacggagccaccacataacttcctaatgtcttcaaatagcgaaagtgctagccggaaactgccggctgggtttacctattggtgctcgtgtgggactagcagattcgagaaaccagcgggactggaacctagtacacttcgggcagttgagaaatgacttaccaggacaaatactgcttctggctcgatggtgctgcccatgaacatccgccggctctgagaaacgagctgcactgtcagtgagaaaccgtgggcactgagaaacgagcggactgcaactgataactgcccacccagtgccactacgacaaagtgctgctggcactactcccaccctccgtcctcaaatcagtcccctcccgcctaagaagacctttatttttcctagcgaagtcatactgagggccccatcaaccgatcccttgcgatgcgcatgggaaaaggaggcagtatagggaccgagaatcgggcggattgggctggccctggtaacaaaagccatccgggtcgccaaccgtcttccactgcaagaaacaaaccttccagtggctgggctccgcccttctccttggtcagagccctccaggctcctaagggcgaagccgacacctcatccctttggaacttgaagttctcagtccaagacctccgtggagagtgaaagactcaatgcctcctgaccgaggcttcaggcctgccccggcagctaggaaacctgaaactgccattgagcagaaggaaaacatccctttccagaacctttctcgtttttctaaaaatctgcacttttggaagtgatcccccaaagagacctccagactctaccatgagtgtctccagctgaactcatcgtgtctaatcctcaccctagcttatcctgttcaaatcatttccatctttttctggatgaacctgggcggatgtcagaccagagaagagcacagaatgtaccagagagagtgagactccgtctcaaaaaaaaacaatataaggtgaaggccaagcagggtggcacatacctgttgtctcacctactcaaaaggctgaggccagaggaggattgctggaagtgagttcaaagccagcctagagaatatattgagactctgtctctaaattttatatatatatggtgaattcacctttaccatatcttttatgtataagcaatgggattgattagcaagtaatgggactctgaaatcaaaggggtaaatttgggtatatctttataaatataataaccttgaaccccacaaatctctctaagcgtcctttaaaaaatagactttctgtctgagtaggtgagtccttttttttgtttgaagatactagaaagctcttacttgagacagctcctaaaagaatgtcaattcaacagaagtctcatagccagtataactaattctaaccccctaactagagtcagatactaggatacccctaagggacaacaatgaaatctgaatttgggtgtcattgcttacatatcaaaacagttgcaagagacagttaatttatatttgcagaaaccatatgaatttgtatgaaaatgattttttaaagtgctatatcaagaaaactagaacataatgcagaacaaataaaatttacttatatgggtg

SEQ ID NO: 277108 - DNA, 3201 bp, Homo sapiens
aagttagaaagaacctgagacgtgacactgaaaatcagtagaagaaatacgccacatttattctaccggggaagacagtgggtaagaaaaaaataccgtaacatttaaattaaaaaataattaaaaatttaaaagcaaatagaaattaaaacaaaatacactgataacctcgctgccagaacaagatacaccaaaaaaaaattttttttttgattatacaaaacatacaaagcatcctacaaacagaaagaaattgcaaacagggtcgaatggtgagatcctaccattatatttgtcagcactaaacccgtgcctcttgcgcctatccgaagtttcctcggattaagaagaaacagccatggttaaaccggtatttgcgacaccaacaattatctgtagccgacgtaccccaacttctacatgagtgaaaaatcgccagcatagccagggcgagactattgcgaattctaacttggtatgatttaaaaattccagacactgctaaatttttttaaattgcattcttcagtacctagattaatacaggagttataaaccgcacgcatggctataatgggggctcctattacggaacaggaatttgctactactaaaattatgtaggcatggttaaagccagaattgttacaaccagaaatcgcaaactggaataactctcaacttgctacggtaagaaataactaaactctgacttggtcagactaagaaatcaggagtttgagaccagcccaggcaacatggcgaaatcctgtctctaggaaggatacaaaaaattacccgggcgtggtggcgcgtgcctgtggtcccagctaccccggaggctggggtgggaggatcgcttcagcccgggaggcggaggttgcagtgagccgagatcgcggcactgcactccagcctgggcgacagagccggaccccgtatcaagaaagaaagagaaaagaaaaagaaccaaagaaaaagaaaagtcaccatcgcacggttaagtctgccttgctacagctaaacagtgacttcctaggaccaagaaatcgcagccagggctagaccgatgccctaaatcgggacttgcttaggctgagaaatcacattttggctagttatttggacaagaggtagaaatagcgggcaccgcgaaatcgaaacttgctaggaccaagaagccaacgacgggcgaaaccgcaggggcctgcgatagagacgccagcggcgccgccgggggactgggttcaggaggccgagcaggaacccgtgcgtcggcgctcgcggcgctgtgaagagacggcgtccgcgcagctcctctgcctctggctcggaggagcggcgggctcccccgcccagcgccggcgtcgcccgggaaccccagactctgcgcaactggctgcgattccaaatccctcagatcggctaccagagcgctgccgccaccgagaaaatggaggcaccgaggaacaagatgtgccgcgaccaagagaactcggcttggcgaaatggcggtgctgggaccctaagagtgacgccagccggaggagttcccaaggacaacatccattttggcggaaccaacggtgttgtcacgcagaaaatgtcgaccctcggaaaagagaggttctgcgaccgagaaattcggtgcaacaagtgctgtgacagaaaaccccccgctcggcgctgctggcgaaagagccaacaaaacgctgggtgctgccaccgtgacaccgactttaggaccccggcctcggatggagaaaggagggtacggagccaccacataacttcctaatgtcttcaaatagcgaaagtgctagccggaaactgccggctgggtttacctattggtgctcgtgtgggactagcagattcgagaaaccagcgggactggaacctagtacacttcgggcagttgagaaatgacttaccaggacaaatactgcttctggctcgatggtgctgcccatgaacatccgccggctctgagaaacgagctgcactgtcagtgagaaaccgtgggcactgagaaacgagcggactgcaactgataactgcccacccagtgccactacgacaaagtgctgctggcactactcccaccctccgtcctcaaatcagtcccctcccgcctaagaagacctttatttttcctagcgaagtcatactgagggccccatcaaccgatcccttgcgatgcgcatgggaaaaggaggcagtatagggaccgagaatcgggcggattgggctggccctggtaacaaaagccatccgggtcgccaaccgtcttccactgcaagaaacaaaccttccagtggctgggctccgcccttctccttggtcagagccctccaggctcctaagggcgaagccgacacctcatccctttggaacttgaagttctcagtccaagacctccgtggagagtgaaagactcaatgcctcctgaccgaggcttcaggcctgccccggcagctaggtacctctccaggggatggaactctgtgggaactgctatttaattctgatggttaactctgtcagatggccttgatatatgggaataatcgttgcaggagggtaggggaaataagaatcgcaagactctagcacaggacgtgtggattgatggaaacctgaaactgccattgagcagaaggaaaacatccctttccagaacctttctcgtttttctaaaaatctgcacttttggaagtgatcccccaaagagacctccagactctaccatgagtgtctccagctgaactcatcgtgtctaatcctcaccctagcttatcctgttcaaatcatttccatctttttctggatgaacctgggcggatgtcagaccagagaagagcacagaatgtaccagagaggacaacaactcgggatccacctaacacgggtacaaagaaggctgtaacacgggaagcagctgttgggccaaaccagccctggagctgtaggccagagcaagaccacaggactgacagagctgttaacacgctgacatctttcgggctgcagagggcgggactgaaagagctattagcatgttgtaacacccactctggggctttggggtcacgggcatccctgtttgggtgccatcacattcccctcatctggatgccagagtccaccataggagtcacttgcaacatgcctggtccagccacaagtcccacacagagc

SEQ ID NO: 277109 - DNA, 3901 bp, Homo sapiens
aagttagaaagaacctgagacgtgacactgaaaatcagtagaagaaatacgccacatttattctaccggggaagacagtgggtaagaaaaaaataccgtaacatttaaattaaaaaataattaaaaatttaaaagcaaatagaaattaaaacaaaatacactgataacctcgctgccagaacaagatacaccaaaaaaaaattttttttttgattatacaaaacatacaaagcatcctacaaacagaaagaaattgcaaacagggtcgaatggtgagatcctaccattatatttgtcagcactaaacccgtgcctcttgcgcctatccgaagtttcctcggattaagaagaaacagccatggttaaaccggtatttgcgacaccaacaattatctgtagccgacgtaccccaacttctacatgagtgaaaaatcgccagcatagccagggcgagactattgcgaattctaacttggtatgatttaaaaattccagacactgctaaatttttttaaattgcattcttcagtacctagattaatacaggagttataaaccgcacgcatggctataatgggggctcctattacggaacaggaatttgctactactaaaattatgtaggcatggttaaagccagaattgttacaaccagaaatcgcaaactggaataactctcaacttgctacggtaagaaataactaaactctgacttggtcagactaagaaatcaggagtttgagaccagcccaggcaacatggcgaaatcctgtctctaggaaggatacaaaaaattacccgggcgtggtggcgcgtgcctgtggtcccagctaccccggaggctggggtgggaggatcgcttcagcccgggaggcggaggttgcagtgagccgagatcgcggcactgcactccagcctgggcgacagagccggaccccgtatcaagaaagaaagagaaaagaaaaagaaccaaagaaaaagaaaagtcaccatcgcacggttaagtctgccttgctacagctaaacagtgacttcctaggaccaagaaatcgcagccagggctagaccgatgccctaaatcgggacttgcttaggctgagaaatcacattttggctagttatttggacaagaggtagaaatagcgggcaccgcgaaatcgaaacttgctaggaccaagaagccaacgacgggcgaaaccgcaggggcctgcgatagagacgccagcggcgccgccgggggactgggttcaggaggccgagcaggaacccgtgcgtcggcgctcgcggcgctgtgaagagacggcgtccgcgcagctcctctgcctctggctcggaggagcggcgggctcccccgcccagcgccggcgtcgcccgggaaccccagactctgcgcaactggctgcgattccaaatccctcagatcggctaccagagcgctgccgccaccgagaaaatggaggcaccgaggaacaagatgtgccgcgaccaagagaactcggcttggcgaaatggcggtgctgggaccctaagagtgacgccagccggaggagttcccaaggacaacatccattttggcggaaccaacggtgttgtcacgcagaaaatgtcgaccctcggaaaagagaggttctgcgaccgagaaattcggtgcaacaagtgctgtgacagaaaaccccccgctcggcgctgctggcgaaagagccaacaaaacgctgggtgctgccaccgtgacaccgactttaggaccccggcctcggatggagaaaggagggtacggagccaccacataacttcctaatgtcttcaaatagcgaaagtgctagccggaaactgccggctgggtttacctattggtgctcgtgtgggactagcagattcgagaaaccagcgggactggaacctagtacacttcgggcagttgagaaatgacttaccaggacaaatactgcttctggctcgatggtgctgcccatgaacatccgccggctctgagaaacgagctgcactgtcagtgagaaaccgtgggcactgagaaacgagcggactgcaactgataactgcccacccagtgccactacgacaaagtgctgctggcactactcccaccctccgtcctcaaatcagtcccctcccgcctaagaagacctttatttttcctagcgaagtcatactgagggccccatcaaccgatcccttgcgatgcgcatgggaaaaggaggcagtatagggaccgagaatcgggcggattgggctggccctggtaacaaaagccatccgggtcgccaaccgtcttccactgcaagaaacaaaccttccagtggctgggctccgcccttctccttggtcagagccctccaggctcctaagggcgaagccgacacctcatccctttggaacttgaagttctcagtccaagacctccgtggagagtgaaagactcaatgcctcctgaccgaggcttcaggcctgccccggcagctaggtacctctccaggggatggaactctgtgggaactgctatttaattctgatggttaactctgtcagatggccttgatatatgggaataatcgttgcaggagggtaggggaaataagaatcgcaagactctagcacaggacgtgtggattgatggtgaggcctttgctccctctccccttgaaatcctcaaagggcagttcccgatttctatcacctttgaaattcatccctgatgtcttctccatctttgggaagtgcaatgcaatttcaagctcttgaatcttccctctcccacatttgtcaaatatactgacgctacaaactcctttcttacaggaaacctgaaactgccattgagcagaaggaaaacatccctttccagaacctttctcgtttttctaaaaatctgcacttttggaagtgatcccccaaagagacctccagactctaccatgagtgtctccagctgaactcatcgtgtctaatcctcaccctagcttatcctgttcaaatcatttccatctttttctggatgaacctgggcggatgtcagaccagagaagagcacagaatgtaccagagagggtaagaagacccattttgggctctcacttctcacccactcccaagatggtcacctccagtcttcccccctataccttaccctttcttcagctagccaaaacctgccctggtacttgaggcttcttcagttgccttcttttgcaggcagtagaataaaggaaagagggcagtgtcaatagaagaaaagttacagccactttatctaattgaagatactgtgcagagcctttgaaaaaacaaaatatctcacccaccattcctctctccgtttccaccctagcttcctattttagcaaaaatggtgggatcagcacctctggagggaaggggtcactcttccaggttaggaatgtggacaggagttatggagcttacttccctaaaggaggaggcattctagttccggcattcagattctgtctgattccaatatggtgtttgtgtggggtggtcagagaaagggcaagtcggcaactgtatattcctcagcaagagactataagacatttgcatttggaaaatcaggagagatgctgatatggtttggctccgtgtccccacccaaatctcaccttgaattgtaataatccccatgtgtcaagggtgagaccaggtggagataattgaatcatggggttggttttccccatgctgttctcgtgttagtgagtgggtctcacgagatctgatagttttataattgcctggcattttcccctgctggcacacattctcctgcggccctctgaagaggtgccttccatcacgattgtaagtttcctgaggcctccccagccatgcagagctttgagtcaattaaaacttctttctttat

SEQ ID NO: 277110 - DNA, 2060 bp, Homo sapiens
aagttagaaagaacctgagacgtgacactgaaaatcagtagaagaaatacgccacatttattctaccggggaagacagtgggtaagaaaaaaataccgtaacatttaaattaaaaaataattaaaaatttaaaagcaaatagaaattaaaacaaaatacactgataacctcgctgccagaacaagatacaccaaaaaaaaattttttttttgattatacaaaacatacaaagcatcctacaaacagaaagaaattgcaaacagggtcgaatggtgagatcctaccattatatttgtcagcactaaacccgtgcctcttgcgcctatccgaagtttcctcggattaagaagaaacagccatggttaaaccggtatttgcgacaccaacaattatctgtagccgacgtaccccaacttctacatgagtgaaaaatcgccagcatagccagggcgagactattgcgaattctaacttggtatgatttaaaaattccagacactgctaaatttttttaaattgcattcttcagtacctagattaatacaggagttataaaccgcacgcatggctataatgggggctcctattacggaacaggaatttgctactactaaaattatgtaggcatggttaaagccagaattgttacaaccagaaatcgcaaactggaataactctcaacttgctacggtaagaaataactaaactctgacttggtcagactaagaaatcaggagtttgagaccagcccaggcaacatggcgaaatcctgtctctaggaaggatacaaaaaattacccgggcgtggtggcgcgtgcctgtggtcccagctaccccggaggctggggtgggaggatcgcttcagcccgggaggcggaggttgcagtgagccgagatcgcggcactgcactccagcctgggcgacagagccggaccccgtatcaagaaagaaagagaaaagaaaaagaaccaaagaaaaagaaaagtcaccatcgcacggttaagtctgccttgctacagctaaacagtgacttcctaggaccaagaaatcgcagccagggctagaccgatgccctaaatcgggacttgcttaggctgagaaatcacattttggctagttatttggacaagaggtagaaatagcgggcaccgcgaaatcgaaacttgctaggaccaagaagccaacgacgggcgaaaccgcaggggcctgcgatagagacgccagcggcgccgccgggggactgggttcaggaggccgagcaggaacccgtgcgtcggcgctcgcggcgctgtgaagagacggcgtccgcgcagctcctctgcctctggctcggaggagcggcgggctcccccgcccagcgccggcgtcgcccgggaaccccagactctgcgcaactggctgcgattccaaatccctcagatcggctaccagagcgctgccgccaccgagaaaatggaggcaccgaggaacaagatgtgccgcgaccaagagaactcggcttggcgaaatggcggtgctgggaccctaagagtgacgccagccggaggagttcccaaggacaacatccattttggcggaaccaacggtgttgtcacgcagaaaatgtcgaccctcggaaaagagaggttctgcgaccgagaaattcggtgcaacaagtgctgtgacagaaaaccccccgctcggcgctgctggcgaaagagccaacaaaacgctgggtgctgccaccgtgacaccgactttaggaccccggcctcggatggagaaaggagggtacggagccaccacataacttcctaatgtcttcaaatagcgaaagtgctagccggaaactgccggctgggtttacctattggtgctcgtgtgggactagcagattcgagaaaccagcgggactggaacctagtacacttcggcctctcaaagtgctaggattatagaagtgagccaccacgctcggcaaatgtttcaattttattcacaaaagtatactttacccaattgttgtaaactataaatattaatgtttaaaataaaatttttcttgactcaaaaacaaaac

SEQ ID NO: 277111 - DNA, 176 bp, Homo sapiens
attataggcatgtgtcaccacgctcggccccaaattcagcatttttttaaagcatagtcacagagttgtgtaatcatcaccactatctaattcttgaacattttcatcaccccaagaagaaaccctgtactcatttatattttttaaatagaaatatttggaccaaataatttgcc

SEQ ID NO: 277112 - DNA, 1046 bp, Homo sapiens
agtcacagaagaaataaacactttaaaaagaccgtttggctttaccttctccatcctcttgaattgattttggctgtgacacagtgaaacactgcattacttcataacgctggcaagcttcttggttctcggtccctggctcatctggagggtgaattagcatcctgcagttaaagggacatggggagcccagaaatttaagaagcagaatgagtgccatgaccagatttgtaagctccctaaagacagaaacatgtctcacatttcacttgtatccttaaaacatcatgcaaatggtgctggctgaagagtacgcacttaacatgtacttgagttgaattggaaatattcaacaagcataaacacagctacctatacttttgagattaacgttttaatcctcattctcctagaagaatgaatgaatggagaagaggtaacaggaggaagatatgagatatctcactccaccaaacagttgctgagaaactcctatccaaggatctgtgcacaatgctggcaataccctgatgtctaacagatgctctttatgattaaagaattcaattctgtttggggagacagaaacattacaaggtggcattcatacataaactcagtttcaaaattatacatttttagtttaccatatcaaatacattgttttgttaaagctgaagcccatatttcagttataaacctcaaggagatggtactttcaaatatttttaaagcaaatgtgaatataattatctttaagatatctaaagaagagaaaaaagatatgaaacttttatatttgtaatgatgctatatacacaaaaacatcagagcatctacagataaaccattaaaacacataagaagattcagcacaatggatggatctgaagaataaccaagaacgtcttgtttcatcacatatcaaggcaattatcataagaaagctcagaaccagatccctatatatacaggaacttgacttataataaagagcgatgcggccgtatttacctggggaacaaagggcgagtgatcgagaatag

SEQ ID NO: 277113 - DNA, 816 bp, Homo sapiens
atgaaggggaaaaagatgagagaaagactattcaaaaggtacagaatgtgcaactttatgggttgcatgaactagatataatggccagttcctggattactggggctaggaatcaaatgagtagaggattataaaaatagctgtgtgctgtgctatacgaggataggcagcttatggattatgaaagtagaacacactaaaagtaaaaatcaatccagtaagtgttttggtaagtgggtgaatatgatcaaggaataaagaatgactaggaaaagctaggatgcatgaagaatagcaggcgttcttgtagtaaagggaagtctaacaagcccttctccaacgtggcttcagaggaccctttcctctgccctcaactcacctgggatctgatcctcagtggcaatcacctcagtctgggggaagcaccatgacttccagaatttgaacaaagatgtttgaatcttttaagtccatgaggaggagatgttttacaaagagatgagcattaggaaagggaaaagaaagagagagaagcaggacgttgacaaggactgggtcgcttttctgattcatgtgcatattctttgaggtcaggtccttcttttggctctgcttaaattggttctagatcatattattgtccttaatgaattcttacccaggctggagtgccatggtgtgatcatagttcacagcagccttgaaatcctggtctcaagcgacctgttcccctctcgatgcatcgtgagtagggcgattctagcagtcactgccgtcatgttacactggttactagctatgaccagtagagtacgg

SEQ ID NO: 277114 - DNA, 871 bp, Homo sapiens
ggcggactcccgggcggcggggacgcgcggggacccggccgcgggacgagggaggccggcggctggacactacctgcgggagagcgagtgaggttctggccctccgagttgaccgcctgcaggtgtttacagaacatccacggagtttgggccaagcccagagtgaggagctgggcactggggtggcagaagaccaggccttgccttgagcccttgtgcgagctttacctcaaagcctctgtaatcgaagtgggagaaggggtggtggtgcgtggttggtctcagccacctccaccactcctcagaagatgaacgctggatccaggaagagattgtcaagcctcccaagccctgtggggacagtgcacacagactatgatggatgcctgaagtgggttgcattacaagagaggagcactgagctaaaggaatttgcctcttttaggctacacagaattaagcctgctctttgaaggtggggagatgttatctcatccctcaaacgttgcttgctacaaacaccgcccagagaaatggactgataaagagctggacattggagtggcagaacagcaagaatgatcagagaagttcaagggccatggcagagagccttttccaacatagtacagtgtacttatacactacatatgaaggccagctaatctagtcttgggagaaccaagagaggcttctgaaagagatgacatctatgccgaaccttgaaggtcaaacaggaatcagccacataaagagaaggaggagagcattctggatagcaggaacatcatgtataaaactttgaagtaaacgatacactccgagaagtttttcattccctttcacattcatctccatattgaactccaat

SEQ ID NO: 277115 - DNA, 416 bp, Homo sapiens
tgatggagtctcactctgtcactcaggctggagtgcaatggcacggtctcagctcactgcgacctccgcctcctgggttcatgcctacagagtgcatatcatgcatgtacttaaaactatgggaaggaaatgacacgtaaacacacagaggccaagaaactaagcaacccacctgtcaaccaaaaggcacatgctggctaaagcttaggcagcttgaggaaaaagagaaaaaaaacacatagaaaaggccatgaaatatagcaaagtgatgctgataccattcgcaggtcatccttgatccatagtggatcgtactgtgcttaataaacttttgctgctttgctatttgtgtgtgtcatgtccaattttttgtttgcggcaccaacaacttgggacttcacaacatcagccagtaa

SEQ ID NO: 277116 - DNA, 591 bp, Homo sapiens
gatgcattctcaccatgctgcaaggctgctctcggactcctggcctcaagcaatctgcccaccgcgtcctcccaaagtgctggatggaattacagacaaactgaactgcttccaaatagcctcaattacctggatcccaacagtcaagaattgttgttaaggcacttcggagaaggtcagtccaagcagtacggctcttttctgcccgggccatgggagaagataatattccttttagagcctgtagggaagctgcaactgtcgaagataactggcccccaggtaacttcacagcagtctctctgaggaccccgattgtgaggtacaatatagtagggagaattgagatgcttcctgtaagatacattttttaaaaacacactggatttcaacctatatatatggtttctaaaaagaaatcatcaaggagtaagacaatgtcagattttcagtttttaaaagatgatttctaataaagaattataactgttaagataatgtaagtagctttattaaaatttttatggatggattaaatcttgatggttataactggagattacgtttaaataaattgtgtgagtatcatta

SEQ ID NO: 277117 - DNA, 607 bp, Homo sapiens
actccccatagggatttggcccctcaggcccaagaattcggcaaagggctcgtgagggatccgagggctccgtccttgtgctgtcttcgccccggctcccaggggtcaaacgagggtcgggggtggggacacgcagcctagccactgtcctgcctgggatccggtctcccccgccccccggctgcagggtggataaagaggaagatgtgaagaggaggcagacaaaagcaaaaggacatcctgtcagtaggaaacggccgaattacaattcagatgtgcaatgtttgcataagtaaactgacacgggactattatatgcagaaatccacgtgcaaaaattttcagacacacctttgtacctcttcctaatcctgccctggtaaaatggcggttatcagtgcaagtttgaggatacatacagctggaaaatggacatcaccaaactggactccagaaagttctgtctaggattttattagactgctttttttctcaatatacctgtattggaagattgagacaaaaaggcacaaactcacattaaataaacaaggtaatctaatcaattctacaaagtgtagtttgtaaaacaagtagcactaggaac

SEQ ID NO: 277118 - DNA, 582 bp, Homo sapiens
ccgccgccgcagcctctgccccactcgtgagggatccgagggctccgtccttgtgctgtcttcgccccggctcccaggggtcaaacgagggtcgggggtggggacacgcagcctagccactgtcctgcctgggatccggtctcccccgccccccggctgcagggtggataaagaggaagatgtgaagaggaggcagacaaaagcaaaaggacatcctgtcagtaggaaacggccgaattacaattcagatgtgcaatgtttgcataagtaaactgacacgggactattatatgcagaaatccacgtgcaaaaattttcagacacacctttgtacctcttcctaatcctgccctggtaaaatggcggttatcagtgcaagtttgaggatacatacagctggaaaatggacatcaccaaactggactccagaaagttctgtctaggattttattagactgctttttttctcaatatacctgtattggaagattgagacaaaaaggcacaaactcacattaaataaacaaggtaatctaatcaattctacaaagtgtagtttgtaaaacaagtagcactaggaac

SEQ ID NO: 277119 - DNA, 351 bp, Homo sapiens
cggcacgaggtggagcggccacaaatgtttgcataagtaaactgacacgggactattatatgcagaaatccacgtgcaaaaattttcagacacacctttgtacctcttcctaatcctgccctggtaaaatggcggttatcagtgcaagtttgaggatacatacagctggaaaatggacatcaccaaactggactccagaaagttctgtctaggattttattagactgctttttttctcaatatacctgtattggaagattgagacaaaaaggcacaaactcacattaaataaacaaggtaatctaatcaattctacaaagtgtagtttgtaaaacaagtagcactaggaac

SEQ ID NO: 277120 - DNA, 407 bp, Homo sapiens
ctactttaaataaatgttttgcttgtttggtagggtggataaagaggaagatgtgaagaggaggcagacaaaagcaaaaggacatcctgtcagtaggaaacggccgaattacaattcagatgtgcaatgtttgcataagtaaactgacacgggactattatatgcagaaatccacgtgcaaaaattttcagacacacctttgtacctcttcctaatcctgccctggtaaaatggcggttatcagtgcaagtttgaggatacatacagctggaaaatggacatcaccaaactggactccagaaagttctgtctaggattttattagactgctttttttctcaatatacctgtattggaagattgagacaaaaaggcacaaactcacattaaataaacaaggtaatcta

SEQ ID NO: 277121 - DNA, 331 bp, Homo sapiens
ctgaacgcggctttctggtgagagaactggaccctcggaaaccctccgagtcccgaattcgttggttcctctagggctctacttctcgcctgccctgttttcttcgctgcactggctccttcctgtacttgcctaattttgcctcacctccttccactccatcccgcctgcaggcttcggcaccctagttcttcccagggccgtccacccatcttctctgccttacctgtgcccgcacccccgccccgcacatctggcgggagcttctggtaacatcttgagccgctcaagagtgagcgagggctcctcttttgagcccgacaaagctgcg

SEQ ID NO: 277122 - DNA, 552 bp, Homo sapiens
tgaagtctgttttttggctgaccccactacacatgatagcttggcagtgttttgttaagcttactatagttcattttgaccagaggaagataacacaaaggtttaaaagaaaatgcagcggagaaacggttcatctttccaagaaaccctagtgttctgagtcacatcatgagtaaatggtggacggaaggcaggtttagctgggcagtcatcaaaaatcatgaagggcaagcaagccaggtaccacaccctcaggcactccccaaactcgttgcccatcggataaagttagtccaagtgccaactcctgccacaacaatgccttataaggactcttaaatcctgtctgacctttgaacaggttcagagtgtgctgtgttcaaatgggaaggaatataaagtaattctagaagatatccaaccggttgataaattgtagaccctaaagggggaaaaagacatcttttgtctggaatttactttgaggggatgtgatttttgagggtaagattttcagtaggtaataaagtaaaatcccgtacctcaactaat

SEQ ID NO: 277123 - DNA, 3616 bp, Homo sapiens
  misc_feature (1332)..(1332): n is a, c, g, or t
  misc_feature (2401)..(2401): n is a, c, g, or t
atgtagtaattttgcctggatggttttggatataatagccaattcatcacttgtgatttgatgactcttagggtctctagtttttcttaacagcctccaaattgaagtttcagaatccttactgcaaaaagcacaaaagttttcattgccattttgatagtgatatgtagctcgtaaataataattcttacctctgtgttagataaaacatccagtaaaacagcatcaagtttagctttgatagaagggaacaattagagttggtgtagagacagaccagttaggatgagggcatgaaatacagcagaagcagtaggaagagaagagagactgaggatcttgaattagggtctagatgaaaatttaggatgattcctaggtttgggaatggagggagagcttaaacaagatagagaatatagacacagattttggaggaaatgattttctcaagggactgctgagtccaaggaatgtttacaaatcctcaagaagtactccaggctatttgtaagatctgaggctcataggccttttctggctctcaggatttagagtcgtaataggcagtaatgtaaattcactagctaactttgaggttgcaacattcatagcactctgaactttgagggcatcttgttttaattcaaaaaactggtaatccctgcttttgattgtgatgtaagtagcagtacacaagcatgggaataagtaaatccaataaaggagtatttaggctcacctgctaaatactcagtgtgccacccaaaccatctgtaatgggtccccttattgaaaacattctttttccagaatgggcaaggaaggctggatgggcaaaagcaaaataaatgtaccacagacccttgattctgttagtatcagtgataaaacatgattgataaaactaggcatgatacattcttaaggtacagaaaaatgtggaaattgtgtcaagaaaattcacaaattttaaatggttctttaggctgatagtaataaatgggatcattataattttatgtaaaaccttcaaaggcttcctactaaagaaagctgaattccagtaacagattgagcccagactactcagttcatatttgaggccaacttagactatttttgatgccttaaagattccttcaagtcccctttctctttctaccatacccccagtaaagctacttaaaatcctctgtaggaaagagctgagtaattgggggcagagatggaggacaaatttaagggaacagaaagccattgggaagacaaatgaaagccagaatctgaagataattttaaaaccttcagggaaagtaggtgtctaatcanaggacttaattcacttgagtagaaatttgtaatttagccataggaatttaggaagtgttagttacaagaggtaacttgaagctgtggacatgatgatagcttttgttgcataattagaatgtgccaaacactttgctaagtgcttatgatagcttttctcttcagaacatcaccatgattatttacagtataacctgtattttacagatggagaaatgtaggcaaaggaaaggggcataacttgcctccagggtcacatagatagcaaatgatgaaatttaattttaaaattagaaactgattccaaagtccttacactcttaaccatgaaactgaagacatctaagtcaccacgcaaaacccagaatctaaatggccatttattagtgcttattcctttatttcctaatattaattaaatgacttaattaccatgagaagataatgtgctttcagttttcgcagtagttagttcagccattgattttcttactaagaacctctaaaaggccaatgggcagttgacaaaaattagggatggattctgcagctgtaagaccaagtgaaagtaaaaggcccatggcggtaaatttgtcccttgcaggcagtttgttctaaatgcttgtgcctagaaataaacttagccttattatcatctggactctgagcaatttttgcatctcagtattcttagatgtggatgattaaaaggccacgtatgaaggcagctaacataagacactttgtgggagtgagataattcattaaaatcaaatattagtgtattaggcaaacaaattcaatcatttcagttatgtaaagctagctgggttctcagttttagcaagttagggaagatatcacattacaggagaaagacaatctaaaagtttttgaagttttaatggatttaaccacttgtaaaatgttataaattgtaggacacttctcccagagagatcctctagcatacatggatgatttacttttcatatttatgatttggcaggaaagtttgagttcatttgaagttaggctttttaatagtttttctcctcccagtgaattnttctgagttgataggtgtaaaatttatagattttattgataataaaagtttgtaagcatctttaatgtagcgattccattgcttattttttattcagcactcaggtcacttcctatgtgctggagataattaaagactccacttccaagaaaggatacaacaaggaaaataagaggttgttaaataaaaattatgccaaagataagcctgtagaaagcttctgtggtgcgtatttggtagattttatggatggatttcgtgaaggataaatagcagagtcctgaggggggaaaaaaggatagaagtggccaaatacaagagaggaaatgggagaaagaataggatatgaagaagcctggcattgagaggtggtattggcctgttaagaaaacttgtttgcctagcccctaagttctagtctcactcagtattgggtttagggctcctctagattctagtacatcatgatagatcatgcagtcagtaaaagtcctgctgattttccccagtaaagtgctttagtccacacaaagcctgatctttaatccatgcctagaattggcaaatgatgccaggaaagaaaacagttggtagtctcagctatgtagaaaagacaaagacttttagtacatctagtcttaagcgcttccacagctctttcgtatctgtaatgtattttgcatttgatccattttttcctagttactgcacctgggagcgactgccagtactaccacatcatttcggtagtggaggtccccattgaagggtttttttcatagcacatagcatgatcacgtctaggaagatcgttctggctgtagatagtataattatctactaatacaaagggggaaaggacgtgagatgatgtgaaaggaagttttgcatcatttacttgaaagatactgttcttctgaatttaatcacattggggattggaaaaagtagatgaataaaaattaaaaagaaaaaaacaaatgagttcatgaagttaagcaattaaagaaaaagacaaatctaatacagtactgtaattatttcaaaggttactattttaccctaaactcatttctatacttgaaagttcaaggatcgattgatatttttgaaattctgaactaaatggaaatattaagatggctcatgtgtgcatatataaatgttatttgtatcctcagaataaactaataaatttcaagggtacaaaatagg

SEQ ID NO: 277124 - DNA, 921 bp, Homo sapiens
ctggggtggggttagcgatgagtcagctaccagggtgagcccacttgaaaccacttgggagaacctgccagtgtcaggatcctatacctccagccttgaactgccaggtggggccagggactcaagagccctcatgccccagcagcttccaagtggtcatcatggaggcagccgattacagcagaaaggcattcttccttccctgccttcctcactgccccacctggggcaacaatccttactatatctgctcagacctgcccctctgccctggcctaacacatgcatacccttcccagccgagggcctggcacccagtgcattgggagctgatgtttctagggctgcaagtcagcacctcccctccttcccccagtgaccccagagcttaccttgcagttacaacccaggtgataccgatagttcagccccttgcgctgggagagggtgagctggtcccacctctccacgaagttgcacagccccgtgtacatcttgccatcatagacgcgacctacaggaggaaagaagaaaacaaggagaggttgttttgtccagagcctagcccagagagaattcacacctactatgttcccacttagcccaggcactgtggctgggtacttttcagacccatgattttatttcaccctacccaacaccttttaaaatggactgtagccccattttccagatgaggataatgaggcttggagaggtaaagtgatttgccaaaggtcccaagcccattaaatactggagctaggactagaggccaactcttcactccctttataatgatttttgtttttgttttctcctttactacactgactgcctaaagatgaataactttcaaagacgggcctaacaggtcgagtgtgaggtggagaggaacagatactccctttttatttacag

SEQ ID NO: 277125 - DNA, 874 bp, Homo sapiens
cgccgtgggacggcgtcgctccccgccggctgccgttagggctgggagccggctgggcgcgggggtagtgagggtgcctctcgccgtggctgcgcggcggcctcgtccgagaggccggcgccggggcagtgaccggcccgtgcccagccgccgcgcagggcgcccggggcagctggccgagccctcgatgcctcccgtctgacggaggcgcccgggaagcgccgcccacctcggccccgcaccctcgccggcctgccgggtctccgccagccctagcagacagagaggggcgccggtccctagtcccccagacctccattcaaggtcaaaactttgcccagctcagccttgctcgaccctgggcagggaagcgcggacatcggcagagggagcccgaggctctccgtgcccttcgcgccgctccccaaggatggataacactaacatatagtcagtgggaaagaaatctcagaaaataactgttagtttgtcactgtcatgggaaatgggaaggaagaaaaacagcacttatcaagcatcttctgtgtacaaactgccatttcagactcagagcagtccttgaaggtcaagaactgtggaatctttcagatgatattctgatacttctggaccaagattgaatttgttcttcatgaaaaatgtctgggaccttttatatggacggggaataccaacgtagagatggtcaagaaaatttgcgctccgacctaaaccaagcacgttgtatggtagttggagagctaaatgtgcggattggctgagttggccagctagagttattcaattaaaaaaaaattaaaaacatctctggaaacattgctcccatcaaatattaaaatgataaaatgttaaa

SEQ ID NO: 277126 - DNA, 973 bp, Homo sapiens
cgccgtgggacggcgtcgctccccgccggctgccgttagggctgggagccggctgggcgcgggggtagtgagggtgcctctcgccgtggctgcgcggcggcctcgtccgagaggccggcgccggggcagtgaccggcccgtgcccagccgccgcgcagggcgcccggggcagctggccgagccctcgatgcctcccgtctgacggaggcgcccgggaagcgccgcccacctcggccccgcaccctcgccggcctgccgggtctccgccagccctagcagacagagaggggcgccggtccctagtcccccagacctccattcaaggtcaaaactttgcccagctcagccttgctcgaccctgggcagggaagcgcggacatcggcagagggagcccgaggctctccgtgcccttcgcgccggtcaagaactgtggaatctttcagatgatattctgatacttctggaccaagattgaatttgttcttcatgaaaaatgtctgggaccttttatatggacggggaataccaacgtagagatggtcaagaaaatttgcgctccgacctaaaccaagcacgttgtatggtagttggagagctaaatgtgggaggagccaagatggccgaataggaaaagctccggtctacagctcccagcgtgagcaacgcagaagacgggtgatttctgcatttccatctgagggtgtactccatctacttttaaaaacaaaaagttcactgtaaaacagcctcaggtaggccgttcagtaggtattccagaagaaggtattgtcatcataggagatggacagctccaagggtgtttattgcccctgaagactttctagtggaacaagatgtggaggtggaagacactgatgttggtgatcctgactcagtgcaggcctaagctaatgtgggtgtttgtgtcttagtttttaactaaaggtttaaaaagtaaaaataaaacattaa

SEQ ID NO: 277127 - DNA, 709 bp, Homo sapiens
cgccgtgggacggcgtcgctccccgccggctgccgttagggctgggagccggctgggcgcgggggtagtgagggtgcctctcgccgtggctgcgcggcggcctcgtccgagaggccggcgccggggcagtgaccggcccgtgcccagccgccgcgcagggcgcccggggcagctggccgagccctcgatgcctcccgtctgacggaggcgcccgggaagcgccgcccacctcggccccgcaccctcgccggcctgccgggtctccgccagccctagcagacagagaggggcgccggtccctagtcccccagacctccattcaaggtcaaaactttgcccagctcagccttgctcgaccctgggcagggaagcgcggacatcggcagagggagcccgaggctctccgtgcccttcgcgccggtcaagaactgtggaatctttcagatgatattctgatacttctggaccaagattgaatttgttcttcatgaaaaatgtctgggaccttttatatggacggggaataccaacgtagagatggtcaagaaaatttgcgctccgacctaaaccaagcacgttgtatggtagttggagagctaaatgtgcggattggctgagttggccagctagagttattcaattaaaaaaaaattaaaaacatctctggaaacattgctcccatcaaatattaaaatgataaaatgttaaa

SEQ ID NO: 277128 - DNA, 260 bp, Homo sapiens
aggagaatcacctgaactggggaggaggaggttgcagtgagccaagattgtgctactgtactccagcctgggcaacagagcaagaccctgtctcaaaataataaataaactagtaacagtgagaatggagaaaagatttagagactgtttataaaacagttaggactttggatctggagaactaagaataagaagtaatggatgatgtggtttttctagtttggaagaccaggtagaccataatgtcatcaatggaatta

SEQ ID NO: 277129 - DNA, 529 bp, Homo sapiens
  misc_feature (455)..(455): n is a, c, g, or t
  misc_feature (505)..(505): n is a, c, g, or t
  misc_feature (527)..(527): n is a, c, g, or t
caggcacttacctgtaattctccccagccatccatcgtacatctctccaacaaacccagatatgtgggctcctagacttactccgatcatgtaaatgtcatcaagagaagctccttctgccaacatctggtcaataaattccttcaagaccatggctggggagaattacaggcctcggaccccctgcaggccctttattcaacgggaaacctcaccaagacagattagatcccagtgatgcgcagtttgttgatgtcatccattccgacactgatgcactgggctacaaggagccattaggaaacatagacttctacccaaatggaggattggatcaacctggctgccccaaaacaatattgggaggatttcagtattttaaatgtgaccaccagaggtctgtatacctgtacctgtcttccctgagagagagctgcaccatcactgcgtatccntgtgactcctaccaggattattaggaatggcaagtgtgtcagcttgcggnacgtcacaaaaagagtcctgtncc

SEQ ID NO: 277130 - DNA, 1812 bp, Homo sapiens
gggcactaataatatgtgcaatcaaatttattaatcagtagaaaaacaacatgtattcaatttaatgttaatccacaaatagctcttggtcagatttatgaaagtctgtgtaagttagaacacaattttacatttttttctctaagcaatatgcaaaagataacaatatttaactacaaatatataaacaattttagtattatactaaggattgtacttgaagaagttacaatgtaatggaaataataacttaccatattacaggtctcaacactatcatgttggcccctattcagagactgtgcagcgtacacaattagtgcagcagcagttcttggtataatatatgacaaccaagtttactggtaagcttgaaaataattcttatgtaaaaattagagattttatgaatttctgatggttcagtaattttttttcagaaatgttatttcagtcacttaatctgccacttctataccatattccaacaggtctgtgagttaacctcatcacaattgctgattgagttcttctcactagtttgcaatttcttcttaatcacttcacagtctccttttttctctcactagtcactggagaccaccacttttccttctccccactggctgcctattcagaaagtttcccaactcctgttgtccattaaagccacaacagttgactttttcttctgctgggttactgctcaccttgccttggttagaagtgttcatggccacaaaagactggagaaggatggtagaggaagtaaaagaagtctttttaaattcctccaaacttctgatgctcattcaggagaaactatagccttcctctaagaaataacaatgcttagcttttcatattaaaaattgtttgctttccttacaatctctctgtgcctagctggtccaagaaaatgaaaaaggtggtgactgagtggacagatactaactttttcaactagtaagcagcaggcacctactaggtccttctcactatgctagatatcataagggataatgaaatgtaaaacacagctacacaggttatatacattgcataactccagaggacaccagaaaaatatgaaaaaaaaaaaatgtaatggtgtccatctggagaaccataaccttgcagcacggcgtaatacctgctatcaagaaacttaaaacctagccagaagcataatttctaaactaatcatcctgtcctctagtccgtctccctaagacactgtgttggtagaatagaaatccttctagaactcagcagttgtctgtaagggatagtgactgtgagagtatccaagctaattcttcctccattagggaaatcagaactgttctttaagatacagcagacagagattcactggctataaaaggtaaatgcaaggttcaaatgtgatggcattagctaactgccagagtacagggaaacagttcttggttccaagggtataattttatattttagaacatcttgttttcttgtgactgtaagccaaattcagctacattcaaatcattaaaaatgctctgtatgacaaactgaaaaatcccagcctaagcctcccatatctgagtaatattttacacaaagttcctataccagaaaacttggacagttgaaataacttaacagttactatattattttataattattatgtatgttggggaatgtattatgccaatgagctgaggcagaaaatgttcaccactatttattaattttacatttattttgaaaatctccaattatcattttcattgcatttttatacctatcatttggaaggaatctaca

SEQ ID NO: 277131 - DNA, 1424 bp, Homo sapiens
tgttgatcttgtttttaaaaaaaaaaaaacaacacagaagtgtccagcttttatcaataaacataataatgctgtaatcaagtctggacaaatctacaaaacaaaaaatatctagaaatgtttgattgttctatggctacttttgttagaaaatcattcaatagatactgcccaaaagctatcaactctaaaatgactttcacttttaatttaaaaacacaaatttctcttttgtaggtatgaaggggctttactgcttttgatatatggattgtatgttttggtgctgtgtttgacattaaaattaaccaatatattataaagaaatgcagtccttgctgcgcctgtcttgccaaagctatggagagaagtgaacaacagccactgatgggctgggaagatgaaggtcaaccattcattcgtcggcaatcaagaactgatagtggaatattttatgaagattctggctactctcagctctctataagtttacatggccttagtcaggtttctgaagatccaccaagtgttttcaacatgcctgaagcagacttaaaaagaattttttgggtattatcccttcctattattacattactttttctaaccacaccagattgtagaaaaaagttttggaaaaactactttgtgataacctttttcatgtctgcaatatggatatccgcatttacatatatcctggtttggatggtcacaataactggggaaacactagaaattcccgatacagtaatgggccttactttattagcagcaggaacaagcataccagacacaattgcaagtgtgttggttgcaagaaaagggaaaggagatatggctatgtctaacatcgtgggatccaatgtgtttgatatgttgtgccttggtattccatggtttattaaaactgcatttataaatggatcagctcctgcagaagtaaacagcagaggactaacttacataaccatctctctcaacatttcaattatttttctttttttagcagttcacttcaatggctggaaactagacagaaagttgggaatagtctgcctattatcatacttggggcttgctacattatcagttctatatgaacttggaattattggaaataatacaaataaggggctgtggaggttgatattattaatagtgttatgcagaaaatatgaatggcagggaggggcagagagaaaaatccatttcttcatttaaatcaaattttaaaaatcttgaaccttagaatctaaaacttacagtaatttaaaaccaaccaaaatcacatcctaatttttctgagccctttcttttcatgaaaaattacatattataaaacagaagtttggggggaaaaaatctatgttttaccatacaataagttgacaaaaactggagaaactagaacaaacaaatcc

SEQ ID NO: 277132 - DNA, 1390 bp, Homo sapiens
gatatgcgacttaataaaaaaattatgctatgattattttatattctttaagtatacattatctggtacatagggcaggcagaggcatcatcaatattatgaagtggagacaactggagtagctaggttagaaaccaggttaatcccttaagcaaaaagttactgaagacaatccacaggagatgtccaattgacacttcataaacactatctacaatatatttaacgaatggcccaagacatttttatagatttaaggccccaaataaagaaatgcggagtatcacatcttacattgtctgccctaaagtttcaattagtttcttttcaccagcaatatcagtaatgaggtactcaaatgttttaaacagccttttaaaaactgatacagctaatttatttcaatataactttctaaataggcatttctaacttaattagccatttgagaaaactcaaaagtgtttactttttccacaacagatccaccaagtgttttcaacatgcctgaagcagacttaaaaagaattttttgggtattatcccttcctattattacattactttttctaaccacaccagattgtagaaaaaagttttggaaaaactactttgtgataacctttttcatgtctgcaatatggatatccgcatttacatatatcctggtttggatggtcacaataactggggaaacactagaaattcccgatacagtaatgggccttactttattagcagcaggaacaagcataccagacacaattgcaagtgtgttggttgcaagaaaagggaaaggagatatggctatgtctaacatcgtgggatccaatgtgtttgatatgttgtgccttggtattccatggtttattaaaactgcatttataaatggatcagctcctgcagaagtaaacagcagaggactaacttacataaccatctctctcaacatttcaattatttttctttttttagcagttcacttcaatggctggaaactagacagaaagttgggaatagtctgcctattatcatacttggggcttgctacattatcagttctatatgaacttggaattattggaaataatacaaataaggggctgtggaggttgatattattaatagtgttatgcagaaaatatgaatggcagggaggggcagagagaaaaatccatttcttcatttaaatcaaattttaaaaatcttgaaccttagaatctaaaacttacagtaatttaaaaccaaccaaaatcacatcctaatttttctgagccctttcttttcatgaaaaattacatattataaaacagaagtttggggggaaaaaatctatgttttaccatacaataagttgacaaaaactggagaaactagaacaaacaaatcc

SEQ ID NO: 277133 - DNA, 1762 bp, Homo sapiens
ggccaaacatgggcgagaagggctctgttgctcggcatcctgtgggccactgcacatctgcctctctcagggacctccctgccccaacgtctcccaagggccacaggaaatagcacccaatgtgttatttctccatcatcggagtttcccgaagggtttttcacgagacaggagcgcagagatggaggcatcataatctatttcctaattatcgtttacatgttcatggccatatctattgtctgtgatgaatacttcctaccctccctggaaatcatcagtgaatcccttggattgtctcaggatgttgcaggcacaactttcatggcagcgggcagttcagctcctgaattagttactgctttcctaggtgtatttatcacaaagggagatattggcattagcaccatccttggatctgcaatttataatctccttggcatctgtgctgcctgtggtttgctatctaatacggtctcaacactatcatgttggcccctattcagagactgtgcagcgtacacaattagtgcagcagcagttcttggtataatatatgacaaccaagtttactggtatgaaggggctttactgcttttgatatatggattgtatgttttggtgctgtgtttgacattaaaattaaccaatatattataaagaaatgcagtccttgctgcgcctgtcttgccaaagctatggagagaagtgaacaacagccactgatgggctgggaagatgaaggtcaaccattcattcgtcggcaatcaagaactgatagtggaatattttatgaagattctggctactctcagctctctataagtttacatggccttagtcaggtttctgaagatccaccaagtgttttcaacatgcctgaagcagacttaaaaagaattttttgggtattatcccttcctattattacattactttttctaaccacaccagattgtagaaaaaagttttggaaaaactactttgtgataacctttttcatgtctgcaatatggatatccgcatttacatatatcctggtttggatggtcacaataactggggaaacactagaaattcccgatacagtaatgggccttactttattagcagcaggaacaagcataccagacacaattgcaagtgtgttggttgcaagaaaagggaaaggagatatggctatgtctaacatcgtgggatccaatgtgtttgatatgttgtgccttggtattccatggtttattaaaactgcatttataaatggatcagctcctgcagaagtaaacagcagaggactaacttacataaccatctctctcaacatttcaattatttttctttttttagcagttcacttcaatggctggaaactagacagaaagttgggaatagtctgcctattatcatacttggggcttgctacattatcagttctatatgaacttggaattattggaaataatacaaataaggggctgtggaggttgatattattaatagtgttatgcagaaaatatgaatggcagggaggggcagagagaaaaatccatttcttcatttaaatcaaattttaaaaatcttgaaccttagaatctaaaacttacagtaatttaaaaccaaccaaaatcacatcctaatttttctgagccctttcttttcatgaaaaattacatattataaaacagaagtttggggggaaaaaatctatgttttaccatacaataagttgacaaaaactggagaaactagaacaaacaaatcc

SEQ ID NO: 277134 - DNA, 469 bp, Homo sapiens
ttcagtgtgtcagaatctagctatcaagttgaaataggttaatctgatcttatcaccagcagacgcatctcagtcatctggaagaaagtgctgttacaagaagtaactctgggtatgcgcttcaggaatgcagttgtggaaaccatgtttgcggctgctttaaactgtttcccaggagtcaaggaaaattcaacaatctgagaccaaaaaggtatcttcggcacagtcttccttggcacagccgtggagaacagagccagggctttgagtcagaggaattgggttgaaacctgcctgtattggttgcaacctggtgaccttggatatcctttttattctctgagccttatataccccctggataaaatatatctgatgaaacctgctgttgcatgttctgggatttaaatgaataacaccgtacctaaagcatttggtgcagggttaggacgtgtagaagcttaagttg

SEQ ID NO: 277135 - DNA, 624 bp, Homo sapiens
atcctttctacacattttttataaaatcctagaataggaaggagatgtagagaacatttgttcaaatctactgcttgacaaaggcacttctgaattcaagttggtgttccagtaaggttgcctgggcacaccaccctcacatcattgcagaacgcactaaactagagcctgccgtcgtttgggccaacccaacggaattgctctcccttgtaatcataaggacctaaaactgaacagcagacgcatctcagtcatctggaagaaagtgctgttacaagaagtaactctgggtatgcgcttcaggaatgcagttgtggaaaccatgtttgcggctgctttaaactgtttcccaggagtcaaggaaaattcaacaatctgagaccaaaaaggtatcttcggcacagtcttccttggcacagccgtggagaacagagccagggctttgagtcagaggaattgggttgaaacctgcctgtattggttgcaacctggtgaccttggtccggtgaggctccccgagcatgggactttttagctccgtctgacgactgatccctgcagttaactgatcattctacaaagccaccatttgctgaatccattgccaaagaatcgatacaggtg

SEQ ID NO: 277136 - DNA, 3041 bp, Homo sapiens
  misc_feature (2450)..(2450): n is a, c, g, or t
ccactttgtcaaatgttcttttggagaaatcctgagaagaaagtttatttggtggttcaggatttgagtgttgctccttatttatcacagttctcatcagcctttgagacccatcttcctttagtggctcttctggtcttttcttcataagtttggctgatgctgttacagatgctagcacttaagaaaacaagactttaaaaaattatgaaatacaggccgggcgcagtggctcatgcctgtaatcctagcattttgggaggccgaggcgggcggatcatgaggtcaggagatcgagaccatcctggctaacacggtgaaaccctgtctctactaaaaatacaaaaaaaaaaaaaaaaaaaattagctgggcgtggtggcgggcgcctgtaggcccagctactcgcgaggctgaggcaggagaatggtgtgaactcgggatgcggagcttgcagtgagctgagatcgcgccactgccctccagcctgggagatagcgaggctctgtctcaaaaaaaaaaaaaaaaaattatgaaatacaacagacattaagagagtgtacaaatataatattgtattataaataatgataaatgatttccccgtgtaaccactgcccaagtgaaaaaatagaacaatggtaaggtattggcagtttctgagggacgtgatgcgaatgttgtcatcagggtgggtgaggatgtactaggcactgtgctaagcattttacatatactatcttattcaagttttacagaagtctaccataaatactattaccaccccattttgtagttaagaaaactaatgataagagaggtcaggtgagtagctggtagttacatagccagtgagtggctaagcaagaattcaaatagaggctttctgaactccagggcccacacttaatctttattctgcattcctcccagggagccttcatgtgcacagcatggcactgactgcagaagtgtgcctagtattgccatagtcaaagggcacatcatgcactcagcttagaaaaagggacagttcccaaagagggggaaaaaaaaaaaaaaaaaagggacagttccttaaaaaaaaaatactttgtccccaacattccttataaaagtcaatttaatgaatttctcagactattattttagatccatcactcagtaacccttgtccatctatatccgtactcctcttcccacctccagctccagatttcctgaacttttgtttctgctgcctgttcttgtcagaaactgtgcaaccttggttctgtgggtatgtgaatgtcaggttggcagggtgcagctgtgtggttccagatgaccagaagccacaagcggttgctgcttctctcttgggattggttggggagtgaagggcagaccgacggatgccttggttgtttttgtgtgtgggtatcatggggcttcaaactgttgtgctctttgttggctggttgattttgtagctcatgctcttgaggtgctctttcaggtctctccctgttttcctctgaattccactgttttgttatctcttgttagcatacaactgaccttgtttttgaagctgtggagagtagctggtggaaatacctcttccagttgggaaaaaatggacttaaaatgtcccatgtccaggctgacctggatgatgacagttggttgatgagttaatttgaacatgagcagaaatgaggtcacttgcctgcctgactccatgtggccatgctggctccaggttgcaaagttctttgagcaagtaccttgtcttgcctaatctcgaatgtctgttctttttatttcttatctcaaataggcattgtgataacattataggtgcaaaagtatgaggtctaaaggcctctgcttccctgtactccctcagtttgtcctgagcagagggagccccaagccagatggattggatggagaacagcccataggcagtttgcagttgtgggcgcgtagctgggagcatgctcagaaactgattcttggcctcacgcctataatcccagcactttgggaggccgaggcgggtggatcacgagatcaggagatcaagaccatcctggctaacatggtgaaaccccgtctctactaaaaacacaaaaaatcagctgggcgtggtcgcgggtgcctgtagccccagctactcaggaggctgaggcaggagaatggcgtgaacccgggaggcagagcttacagtgagccgagatcgcgccactgcactccagcctgggtgacagagcaaaactccgtctcaaaaaaaagaaactctgattcttgcacctctacgctactgctttggagaaaagcaagcagctgcttgtcaggactaaacttgtaacatgcaggcctacctccattaccctgacattcattggttggcttctgtttgagagggcacagtatctttgtatgccatgattgttttcatataacntaataacctgctgctgacttttctcaacatgtcctttctgcttatgatgttctttctccaggctgctttgggttctcttgtaaggcccgtacagcagctgtcactgagatactgcctcatgacaaacctagaactggctagtgaaaagagcttctcaagagttaatatgagctggacacagtggcttgggcctgtaaccccagctactctggaggctgaggcgggaggatcacttgaggccaggagttcaagactggcctgggcaacatagcaagatcccatctctaaaagcttttttaaaaaaattagctgggccgggcgtggtggctcacacctgtaatcccagcactttgggaggccgaggcgggtggatcacaaggtcaagagatctagaccatcctggccaacatgctgaaaccccgtctctactaaaagtacaaaaattagctgggcgtggtggcgcacacctgtagtcccagctactcgggaggctgagggaggagaattgcttgaatccacaaggcagaggttgcagtgagccgagatggcgccactacactccagcctggcaatagagcgagactccgtctc

SEQ ID NO: 277137 - DNA, 1466 bp, Homo sapiens
cttgtaagacagaaaagttctccaagtccccactcgacccaggaagtccagctggcttcgcctctcactggaattacagttacagaggctgagaagtccaagatcaagggaccacatccagtgagagccttcttgctgatggtggattggaaacagtgtcagcatgactctcccacttggaaagacaaaatgggcttaattattagataaggatacgtttccaactgaaggtggcaacgttatgctggaagaacatgtcaggaagaccacaaaatttcatgactgtacttgctacactttcagcagaagagttatacatattttcaattcaacaaagattaagccaaaaagaattcttagaacattcccactcttctttggcacatcaaaaggcaacaaatgtcattttctcccatgtttttatgtgcagtttagaacaaagaccaattatctatgcagctgtccacagtggataaaacaaaaagcatacatttggtccagagttaagtcacctgggttgggcccatccaaggaagtttgatgtttctactctcatgaaaagtaccaatggcactgcacagtgattatcttagatattaaggataaacacaaatttctccttaaatttccatttattggaaatgattggagggagggaacttctccctcacctccacactgcctcttttccaactcttcttccaacacaaaatagtttaaacagcaagcacttagagagcttttagccttgcttgttgattacaaggcccaagttagtgtatggtttgcccatcggaggaaagctaaaacatgggccttcatgggtattaaaattgaagaaaccttttccagcattttttctattttctttaaagtaacaacctatggacttccccatctgacattttcgagtgatcccactgtgtgaatgaaggactacttcagggtttgagggcaaagctgaaatcttagcaacttaccagtgagcaaaggtagaacccagagcccatctctccttttccaggctgctgagtaaagtctggctcaatcaacctatcaatgaagcagtgcttacaacattctccaagaccacccaaaacccaaactggaaatgaatcatgactaatctgactcattttggctcacacagtgcccttccaatttgtatttacctttaccacccaggacctgaccttggacatgtgtaccaggatgtaaggcaataaacctattcacaattccaaaagggcctggtcctctatgaagatttcctgaaggctacttactttctctactcattaaaatttttgcttaacttcaaatttctgaaatataccatatgtgaaaaatttaaatgttaatctgtgcctactgtactacttgaacagagaaaattaactgataaactgtaaatacaaaatgtcaaaattaattcttctgagttttaatatcatctaaataaaaag

SEQ ID NO: 277138 - DNA, 1407 bp, Homo sapiens
cttgtaagacagaaaagttctccaagtccccactcgacccaggaagtccagctggcttcgcctctcactggaattacagatggtggattggaaacagtgtcagcatgactctcccacttggaaagacaaaatgggcttaattattagataaggatacgtttccaactgaaggtggcaacgttatgctggaagaacatgtcaggaagaccacaaaatttcatgactgtacttgctacactttcagcagaagagttatacatattttcaattcaacaaagattaagccaaaaagaattcttagaacattcccactcttctttggcacatcaaaaggcaacaaatgtcattttctcccatgtttttatgtgcagtttagaacaaagaccaattatctatgcagctgtccacagtggataaaacaaaaagcatacatttggtccagagttaagtcacctgggttgggcccatccaaggaagtttgatgtttctactctcatgaaaagtaccaatggcactgcacagtgattatcttagatattaaggataaacacaaatttctccttaaatttccatttattggaaatgattggagggagggaacttctccctcacctccacactgcctcttttccaactcttcttccaacacaaaatagtttaaacagcaagcacttagagagcttttagccttgcttgttgattacaaggcccaagttagtgtatggtttgcccatcggaggaaagctaaaacatgggccttcatgggtattaaaattgaagaaaccttttccagcattttttctattttctttaaagtaacaacctatggacttccccatctgacattttcgagtgatcccactgtgtgaatgaaggactacttcagggtttgagggcaaagctgaaatcttagcaacttaccagtgagcaaaggtagaacccagagcccatctctccttttccaggctgctgagtaaagtctggctcaatcaacctatcaatgaagcagtgcttacaacattctccaagaccacccaaaacccaaactggaaatgaatcatgactaatctgactcattttggctcacacagtgcccttccaatttgtatttacctttaccacccaggacctgaccttggacatgtgtaccaggatgtaaggcaataaacctattcacaattccaaaagggcctggtcctctatgaagatttcctgaaggctacttactttctctactcattaaaatttttgcttaacttcaaatttctgaaatataccatatgtgaaaaatttaaatgttaatctgtgcctactgtactacttgaacagagaaaattaactgataaactgtaaatacaaaatgtcaaaattaattcttctgagttttaatatcatctaaataaaaag

SEQ ID NO: 277139 - DNA, 636 bp, Homo sapiens
attttaaatatatttcaaagaaaagagttcacatttaaataaagtaataaatgattacaagtagggtttattacaggcatgcatggctgtttcaatatttgttttgtttttcttcccaagatggtggattggaaacagtgtcagcatgactctcccacttggaaagacaaaatggtgagtagaaattcatactgtgaacttttttctaagaagcaatgcaggaactgaacagaaaaacagaaaccatagaccctttgaaagaagcagcaggctgcagcctacacccactgtgagccaggtgaaaaattgtaagtcctcagagtgtgacagggggagagactgcctccaggatatacatccccaccaggtaacctggcaattcagcccacaggggaaggccttaaccatacccagcactggaactaatatagggagtggtggggtaatataaaagtaggagcagcagcaagcagagccttgcatgcattcctagtctccagcacagaccgagggaagccactcctgattctacgtcacagagggcctcacggaagtcaactagctcaggcagaggttgcaggttgaaagaagctcccaactgaaattcatataatcttgagtggggatgaactccct

SEQ ID NO: 277140 - DNA, 674 bp, Homo sapiens
aaatatatttcaaagaaaagagttcacatttaaataaagtaataaatgattacaagtagggtttattacaggcatgcatggctgtttcaatatttgaaaatcaatcaatctaaactaccatgtggataggctaagaaaaatcacattttgttttgtttttcttcccaagatggtggattggaaacagtgtcagcatgactctcccacttggaaagacaaaatggtgagtagaaattcatactgtgaacttttttctaagaagcaatgcaggaactgaacagaaaaacagaaaccatagaccctttgaaagaagcagcaggctgcagcctacacccactgtgagccaggtgaaaaattgtaagtcctcagagtgtgacagggggagagactgcctccaggatatacatccccaccaggtaacctggcaattcagcccacaggggaaggccttaaccatacccagcactggaactaatatagggagtggtggggtaatataaaagtaggagcagcagcaagcagagccttgcatgcattcctagtctccagcacagaccgagggaagccactcctgattctacgtcacagagggcctcacggaagtcaactagctcaggcagaggttgcaggttgaaagaagctcccaactgaaattcatataatcttgagtgggg

SEQ ID NO: 277141 - DNA, 821 bp, Homo sapiens
  misc_feature (793)..(793): n is a, c, g, or t
  misc_feature (821)..(821): n is a, c, g, or t
gctagcggaacgactctcttaatttttccaccgctacacaaagcgtggatacccatcaacgaagttttgatattggaattcagattggctatcagcgacgcaataaggatgtgttggcttgggttaaaaaacgcagaagaactattcgtcgagaagatttgatcagcttcctgtgtggaaaagttcctccaccacgaaactctagagctcccccaagactgactgtagtgtcccctaaccgagctacttcaacggaaactagctcatctgtagagactgatttgcaacccttccgggaagccatagctctgcatggtcttagtggtgcaatggctagtataagcgtgcgttcgagtaccccaggctctcctacacatgtaagcagtggatcgaatgctagtcgaaggagaaatggactccatgatgtcgatttgaacactttcatatcagaagaaatggcactccacttggacaatggtggaactagaaagcgtacctcagcccagtgtggcgatgtcattacagactcaccaacccataaacgcaacagaatgatctaaactgcaaacattttcacacccaccatgctgcttgaaagccacttgatcctcaacatatactataattggcaaagggaaactgaggccatcttcccttgttcactgtttaagacaagtgaattctatagtggttgccataaaaggaagttctaggtatttatagtagatgcctcttggaattatggctttcttaaaactataatcctagcagaggacatcagattttgtgtagncggtggcaagatcatcctaggccaacan

SEQ ID NO: 277142 - DNA, 1810 bp, Homo sapiens
  misc_feature (1782)..(1782): n is a, c, g, or t
  misc_feature (1810)..(1810): n is a, c, g, or t
gcccccttggctcggacgcaaccactgtcagctcctccccctcctcctccttcatccttcctgacattcactcccttcccccagccaattggttacgtcaggcagacaggccgaagaaccaatcacgacgctgtgctcagaagccgccacgcggaaccggccggatccgactaataggggcccttggagcggccacgcctcaaccgggcagggtagcttgggcccagtgggcggtgcttctcctgtcagcatgtgggcggggtagggcggggaccagcagccgcagagccgtcctcggcggtggcgacgacgacgacgttgctcagtcttggggtgggctccgcggtgcaggccgagctgcgcggagggctcggcgatcagcggcggcggcggcagtggggaggccgcagcgccatgggggggcgttagacaggctgcggcggccgaggcgaggggcggcagcggttatctggtccgcggcgaccttcggccgggcccgggggtgggaaggcctggggcgggggtcgtccctggttgcacggggccgcggggcggggctcgccggccgtcggggtgcaggaggcctgggccgctgaaaggagaaggcgccgtcggtcgccaggccctgccgccgggccgcttgacgacgacgctcccgcgggggccccgcctgaggaggacgcggcggcggtggcggcgaggccgcgggaggccgcggaggatggaggagcggaaggaggagggcgaggccgagatccaggagcacgggcccgagcactggttctccaagtgggagcggcagtgcctggccgaggccgaacaggacgagcagctgccccccgagctgcaggaggaggcggcggccgccgcgcagcccgagcacaagcagcagaagctgtggcacctcttccagaactcggccaccgccgtggcccagctctacaaagaccgagtgtgtcagcagccaggactttctctctgggtccccttccaaaacgcagccaccgccgtcaccaatctctacaaagaaagcgtggatacccatcaacgaagttttgatattggaattcagattggctatcagcgacgcaataaggatgtgttggcttgggttaaaaaacgcagaagaactattcgtcgagaagatttgatcagcttcctgtgtggaaaagttcctccaccacgaaactctagagctcccccaagactgactgtagtgtcccctaaccgagctacttcaacggaaactagctcatctgtagagactgatttgcaacccttccgggaagccatagctctgcatggtcttagtggtgcaatggctagtataagcgtgcgttcgagtaccccaggctctcctacacatgtaagcagtggatcgaatgctagtcgaaggagaaatggactccatgatgtcgatttgaacactttcatatcagaagaaatggcactccacttggacaatggtggaactagaaagcgtacctcagcccagtgtggcgatgtcattacagactcaccaacccataaacgcaacagaatgatctaaactgcaaacattttcacacccaccatgctgcttgaaagccacttgatcctcaacatatactataattggcaaagggaaactgaggccatcttcccttgttcactgtttaagacaagtgaattctatagtggttgccataaaaggaagttctaggtatttatagtagatgcctcttggaattatggctttcttaaaactataatcctagcagaggacatcagattttgtgtagncggtggcaagatcatcctaggccaacan

SEQ ID NO: 277143 - DNA, 1483 bp, Homo sapiens
acagcccctgctctgccctgccctgcaaggcagcctcactgcttgcccctctccattacatctgctatggagtccaactgagcctcatctgccccttgaacgcacactctttctcctctgggagtctctgaagtgggtaatatcctctgcttataatatgcttccccttaaaccctctactctcttcctagctagctttgactcctctgtcacttgtccgctttggcatcacctcctcatagaagacttctatgactcccgagattctcaggagcatggcaggtgaagtgctcctcccctgaatggatggagattaaggagtgtgtgttattcatgcttaattcaccagtgcttagctgagtacctggcataaaatagttactgtggtggccaaagtaataacccccaccgccgtcaccaatctctacaagaaagcgtggatacccatcaacgaagttttgatattggaattcagattggctatcagcgacgcaataaggatgtgttggcttgggttaaaaaacgcagaagaactattcgtcgagaagatttgatcagcttcctgtgtggaaaagttcctccaccacgaaactctagagctcccccaagactgactgtagtgtcccctaaccgagctacttcaacggaaactagctcatctgtagagactgatttgcaacccttccgggaagccatagctctgcatggtaaagccgtttaaacatatttctttggaaaaatggttaagagggtgcctgtggacccatttttcacggttaggtttaggtccagatatactgttttttgtcttacagtaaacagcttgctctagaaatgtttaatagaatgtaagctaagaacttaatatgggcgatttctgtcagctaacctatcctagaaaatgtttttagaaagttagtttgagcttattggtgttaaaatgacatatctttctgcagtgttgattagaatttatcgctttacacttatgtgttgtacgtgtttttttcctcttctgaagtcaaagaggaagttcttgtgtcttaagaattctgttatatttctaatggtccatgacaggcaagtaaggtgggaaattgttgggttagttctcatgggacctgggacctcccttgacacctttcttacttggtttgctgtagatggtgggagaggatggatgtaagacttgaccttctgcctgtcgtccctcaggtcccttgcactttaagaggcaggaccagcagagtgcagccagtgggcaggtggatctctatctccccaggccagacctgtcataagaaggcactcttggctaagggattttagtattgctggagaaacccgggaaatgtagtcagtgataagtctgttgttgcttgttgctgtctaatacagacttccaaatagagctgggagagttaacctgtgtgacagcattgaatactgctgtaggaaaaaaagcaacagaataataagactt

SEQ ID NO: 277144 - DNA, 447 bp, Homo sapiens
gagcgtggcctgaggcatgtgcaatatttagacatctgttgaatgatgtgatgcaagttattttaggtaatttcattaaagatacctaatctctctgtttctgttaaatttttttttttaacaagccaagctccaggactgtgataagtaaacactgaatttagaccattaagattaaatgttacatataacattttcattatgactgaaatcatttcagtttatattactgatgggctcagaggccacatcatggtattcactttggttaaattgtaaaatggttttctttagaagggaatacgggctctaatggtcatgatacatgttttctttttctttttttctaacagaaagcgtggatacccatcaacgaagttttgatattggaattcagattggctatcagcgacgcaataaggatgtgttggcttgggttaaaaaacg

SEQ ID NO: 277145 - DNA, 2080 bp, Homo sapiens
gcccccttggctcggacgcaaccactgtcagctcctccccctcctcctccttcatccttcctgacattcactcccttcccccagccaattggttacgtcaggcagacaggccgaagaaccaatcacgacgctgtgctcagaagccgccacgcggaaccggccggatccgactaataggggcccttggagcggccacgcctcaaccgggcagggtagcttgggcccagtgggcggtgcttctcctgtcagcatgtgggcggggtagggcggggaccagcagccgcagagccgtcctcggcggtggcgacgacgacgacgttgctcagtcttggggtgggctccgcggtgcaggccgagctgcgcggagggctcggcgatcagcggcggcggcggcagtggggaggccgcagcgccatgggggggcgttagacaggctgcggcggccgaggcgaggggcggcagcggttatctggtccgcggcgaccttcggccgggcccgggggtgggaaggcctggggcgggggtcgtccctggttgcacggggccgcggggcggggctcgccggccgtcggggtgcaggaggcctgggccgctgaaaggagaaggcgccgtcggtcgccaggccctgccgccgggccgcttgacgacgacgctcccgcgggggccccgcctgaggaggacgcggcggcggtggcggcgaggccgcgggaggccgcggaggatggaggagcggaaggaggagggcgaggccgagatccaggagcacgggcccgagcactggttctccaagtgggagcggcagtgcctggccgaggccgaacaggacgagcagctgccccccgagctgcaggaggaggcggcggccgccgcgcagcccgagcacaagcagcagaagctgtggcacctcttccagaactcggccaccgccgtggcccagctctacaaagaccgagtgtgtcagcagccaggactttctctctgggtccccttccaaaacgcagccaccgccgtcaccaatctctacaaagaaagcgtggatacccatcaacgaagttttgatattggaattcagattggctatcagcgacgcaataaggatgtgttggcttgggttaaaaaacgcagaagaactattcgtcgagaagatttgatcagcttcctgtgtggaaaagttcctccaccacgaaactctagagctcccccaagactgactgtagtgtcccctaaccgagctacttcaacggaaactagctcatctgtagagactgatttgcaacccttccgggaagccatagctctgcatggtaaagccgtttaaacatatttctttggaaaaatggttaagagggtgcctgtggacccatttttcacggttaggtttaggtccagatatactgttttttgtcttacagtaaacagcttgctctagaaatgtttaatagaatgtaagctaagaacttaatatgggcgatttctgtcagctaacctatcctagaaaatgtttttagaaagttagtttgagcttattggtgttaaaatgacatatctttctgcagtgttgattagaatttatcgctttacacttatgtgttgtacgtgtttttttcctcttctgaagtcaaagaggaagttcttgtgtcttaagaattctgttatatttctaatggtccatgacaggcaagtaaggtgggaaattgttgggttagttctcatgggacctgggacctcccttgacacctttcttacttggtttgctgtagatggtgggagaggatggatgtaagacttgaccttctgcctgtcgtccctcaggtcccttgcactttaagaggcaggaccagcagagtgcagccagtgggcaggtggatctctatctccccaggccagacctgtcataagaaggcactcttggctaagggattttagtattgctggagaaacccgggaaatgtagtcagtgataagtctgttgttgcttgttgctgtctaatacagacttccaaatagagctgggagagttaacctgtgtgacagcattgaatactgctgtaggaaaaaaagcaacagaataataagactt

SEQ ID NO: 277146 - DNA, 491 bp, Homo sapiens
ttctttaggtattacatgaaacctttcctaaacatacatttctgatgaacggcttaattcaaggagtaaagggtttgttgtcattccttagtgccccgcttattggtgctctttctgatgtttggggccgaaaatccttcttgctgctaacggtgtttttcacatgtgccccaattcctttaatgaagatcagcccatggtggtactttgctgttatctctgtttctggggtttttgcagtgactttttctgtggtatttgcatacgtagcagatataacccaagagcatgaaagaagtatggcttatggactggtatgtatgtttattctataccttttgtatctgctgagaaatgccttgtttttaagataaatattattataaggagtgcaaacctttgcattacaagatttttgcgtaaaatatattttgtaataaaatcattcattagactacatttaaaatttttttgcggtatgaggctatgta

SEQ ID NO: 277147 - DNA, 2464 bp, Homo sapiens
ttctttaggtattacatgaaacctttcctaaacatacatttctgatgaacggcttaattcaaggagtaaagggtttgttgtcattccttagtgccccgcttattggtgctctttctgatgtttggggccgaaaatccttcttgctgctaacggtgtttttcacatgtgccccaattcctttaatgaagatcagcccatggtggtactttgctgttatctctgtttctggggtttttgcagtgactttttctgtggtatttgcatacgtagcagatataacccaagagcatgaaagaagtatggcttatggactggtttcagcaacatttgctgcaagtttagtcaccagtcctgcaattggagcttatcttggacgagtatatggggacagcttggtggtggtcttagctacagcaatagctttgctagatatttgttttatccttgttgctgtgccagagtcgttgcctgagaaaatgcggccagcatcctggggagcacccatttcctgggaacaagctgacccttttgcgtccttaaaaaaagtcggccaagattccatagtgctgctgatctgcattacagtgtttctctcctacctaccggaggcaggccaatattccagcttttttttatacctcagacagataatgaaattttcaccagaaagtgttgcagcgtttatagcagtccttggcattctttccattattgcacagaccatagtcttgagtttacttatgaggtcaattggaaataagaacaccattttactgggtctaggatttcaaatattacagttggcatggtatggctttggttcagaaccttggatgatgtgggctgctggggcagtagcagccatgtctagcatcacctttcctgctgtcagtgcacttgtttcacgaactgctgatgctgatcaacagggtgtcgttcaaggaatgataacaggaattcgaggattatgcaatggtctgggaccggccctctatggattcattttctacatattccatgtggaacttaaagaactgccaataacaggaacagacttgggaacaaacacaagccctcagcaccactttgaacagaattccatcatccctggccctcccttcctatttggagcctgttcagtactgctggctctgcttgttgccttgtttattccggaacataccaatttaagcttaaggtccagcagttggagaaagcactgtggcagtcacagccatcctcataatacacaagcgccaggagaggccaaagaacctttactccaggacacaaatgtgtgacgactgaaatcaggaagatttttctatcagcacccaggtcttagttttcacctctagttctggatgtacattccatttccatccacagtgtactttaagattgtcttaagaaatgtatctgcatgaactccgtgggaactaaaggaagtgggaacttagaaccagacagttttccaaagatgttacaatttcttttgaaaaaccttttgtttattagcaccaatttcttgccactaagctatttgttttattatacatcctttaattaaaaactatatatgtaacttcttagatattagcaaatgtctctgctaccatttccttaaggtgttgagctttaactctatgctgactcagtgagacacagtaggtagtatggttgtggacctatttgttttaacattgtaaaattttgagtcagattttaatattgtaaaatcttgggtcaaataattcaaagccttaatgcagatgcactaaaacaaagaaatggtaaatgaattgtttgcatttaaaaaaaaaaactcttaagaaaactgtactaaatctgaatcatgttttgagcttgtttgcagtacttttaaacattattcactactgtttttgaagtgagaaagtatcagccatttagcatttaagttggggtatttagagcctgtaatctaaatgctggctcaaatttattccccagctacttcttataccactattcttttaatgtttgcataatcataagcacctcaacacttgaatacataatctaaaaattatatagtaaagctggtagccttgaaaatgtcagtgtgatatctattatgtagataaatatatatagtggcctttcaggactgtcacagtaacactttatttacagagctaatgtttgtcctaaattttcaggaccctagaggagagctttatacaattaccgatgtgaatttctctaaagtgtatatttttgtgtccagttatattatttaaaaaagtgttactttgtaaaaattgtatataaagaactgtatagtttacactgttttcatcttgtgtgtggttattgcttaatgctttttaaacttggaacactcactatggttaaataaggtcttaaaagaaatgtaaatattctgttaataaagttaaatattttaatgatttttttttta

SEQ ID NO: 277148 - DNA, 2350 bp, Homo sapiens
ttctttaggtattacatgaaacctttcctaaacatacatttctgatgaacggcttaattcaaggagtaaagggtttgttgtcattccttagtgccccgcttattggtgctctttctgatgtttggggccgaaaatccttcttgctgctaacggtgtttttcacatgtgccccaattcctttaatgaagatcagcccatggtggtactttgctgttatctctgtttctggggtttttgcagtgactttttctgtggtatttgcatacgtagcagatataacccaagagcatgaaagaagtatggcttatggactggtttcagcaacatttgctgcaagtttagtcaccagtcctgcaattggagcttatcttggacgagtatatggggacagcttggtggtggtcttagctacagcaatagctttgctagatatttgttttatccttgttgctgtgccagagtcgttgcctgagaaaatgcggccagcatcctggggagcacccatttcctgggaacaagctgacccttttgcgataatgaaattttcaccagaaagtgttgcagcgtttatagcagtccttggcattctttccattattgcacagaccatagtcttgagtttacttatgaggtcaattggaaataagaacaccattttactgggtctaggatttcaaatattacagttggcatggtatggctttggttcagaaccttggatgatgtgggctgctggggcagtagcagccatgtctagcatcacctttcctgctgtcagtgcacttgtttcacgaactgctgatgctgatcaacagggtgtcgttcaaggaatgataacaggaattcgaggattatgcaatggtctgggaccggccctctatggattcattttctacatattccatgtggaacttaaagaactgccaataacaggaacagacttgggaacaaacacaagccctcagcaccactttgaacagaattccatcatccctggccctcccttcctatttggagcctgttcagtactgctggctctgcttgttgccttgtttattccggaacataccaatttaagcttaaggtccagcagttggagaaagcactgtggcagtcacagccatcctcataatacacaagcgccaggagaggccaaagaacctttactccaggacacaaatgtgtgacgactgaaatcaggaagatttttctatcagcacccaggtcttagttttcacctctagttctggatgtacattccatttccatccacagtgtactttaagattgtcttaagaaatgtatctgcatgaactccgtgggaactaaaggaagtgggaacttagaaccagacagttttccaaagatgttacaatttcttttgaaaaaccttttgtttattagcaccaatttcttgccactaagctatttgttttattatacatcctttaattaaaaactatatatgtaacttcttagatattagcaaatgtctctgctaccatttccttaaggtgttgagctttaactctatgctgactcagtgagacacagtaggtagtatggttgtggacctatttgttttaacattgtaaaattttgagtcagattttaatattgtaaaatcttgggtcaaataattcaaagccttaatgcagatgcactaaaacaaagaaatggtaaatgaattgtttgcatttaaaaaaaaaaactcttaagaaaactgtactaaatctgaatcatgttttgagcttgtttgcagtacttttaaacattattcactactgtttttgaagtgagaaagtatcagccatttagcatttaagttggggtatttagagcctgtaatctaaatgctggctcaaatttattccccagctacttcttataccactattcttttaatgtttgcataatcataagcacctcaacacttgaatacataatctaaaaattatatagtaaagctggtagccttgaaaatgtcagtgtgatatctattatgtagataaatatatatagtggcctttcaggactgtcacagtaacactttatttacagagctaatgtttgtcctaaattttcaggaccctagaggagagctttatacaattaccgatgtgaatttctctaaagtgtatatttttgtgtccagttatattatttaaaaaagtgttactttgtaaaaattgtatataaagaactgtatagtttacactgttttcatcttgtgtgtggttattgcttaatgctttttaaacttggaacactcactatggttaaataaggtcttaaaagaaatgtaaatattctgttaataaagttaaatattttaatgatttttttttta

SEQ ID NO: 277149 - DNA, 2877 bp, Homo sapiens
ttctttaggtattacatgaaacctttcctaaacatacatttctgatgaacggcttaattcaaggagtaaagggtttgttgtcattccttagtgccccgcttattggtgctctttctgatgtttggggccgaaaatccttcttgctgctaacggtgtttttcacatgtgccccaattcctttaatgaagatcagcccatggtggtactttgctgttatctctgtttctggggtttttgcagtgactttttctgtggtatttgcatacgtagcagatataacccaagagcatgaaagaagtatggcttatggactggtttcagcaacatttgctgcaagtttagtcaccagtcctgcaattggagcttatcttggacgagtatatggggacagcttggtggtggtcttagctacagcaatagctttgctagatatttgttttatccttgttgctgtgccagagtcgttgcctgagaaaatgcggccagcatcctggggagcacccatttcctgggaacaagctgacccttttgcgtccttaaaaaaagtcggccaagattccatagtgctgctgatctgcattacagtgtttctctcctacctaccggaggcaggccaatattccagcttttttttatacctcagacagataatgaaattttcaccagaaagtgttgcagcgtttatagcagtccttggcattctttccattattgcacagaccatagtcttgagtttacttatgaggtcaattggaaataagaacaccattttactgggtctaggatttcaaatattacagttggcatggtatggctttggttcagaaccttggatgatgtgggctgctggggcagtagcagccatgtctagcatcacctttcctgctgtcagtgcacttgtttcacgaactgctgatgctgatcaacagggtgtcgttcaaggaatgataacaggaattcgaggattatgcaatggtctgggaccggccctctatggattcattttctacatattccatgtggaacttaaagaactgccaataacaggaacagacttgggaacaaacacaagccctcagcaccactttgaacagaattccatcatccctggccctcccttcctatttggagcctgttcagtactgctggctctgcttgttgccttgtttattccggaacataccaatttaagcttaaggtccagcagttggagaaagcactgtggcagtcacagccatcctcataatacacaagcgccaggagaggccaaagaacctttactccaggacacaaatgtgtgacgactgaaatcaggaagatttttctatcagcacccaggtcttagttttcacctctagttctggatgtacattccatttccatccacagtgtactttaagattgtcttaagaaatgtatctgcatgaactccgtgggaactaaaggaagtgggaacttagaaccagacagttttccaaagatgttacaatttcttttgaaaaaccttttgtttattagcaccaatttcttgccactaagctatttgttttattatacatcctttaattaaaaactatatatgtaacttcttagatattagcaaatgtctctgctaccatttccttaaggtgttgagctttaactctatgctgactcagtgagacacagtaggtagtatggttgtggacctatttgttttaacattgtaaaattttgagtcagattttaatattgtaaaatcttgggtcaaataattcaaagccttaatgcagatgcactaaaacaaagaaatggtaaatgaattgtttgcatttaaaaaaaaaaactcttaagaaaactgtactaaatctgaatcatgttttgagcttgtttgcagtacttttaaacattattcactactgtttttgaagtgagaaagtatcagccatttagcatttaagttggggtatttagagcctgtaatctaaatgctggctcaaatttattccccagctacttcttataccactattcttttaatgtttgcataatcataagcacctcaacacttgaatacataatctaaaaattatatagtaaagctggtagccttgaaaatgtcagtgtgatatctattatgtagataaatatatatagtggcctttcaggactgtcacagtaacactttatttacagagctaatgtttgtcctaaattttcaggaccctagaggagagctttatacaattaccgatgtgaatttctctaaagtgtatatttttgtgtccagttatattatttaaaaaagtgttactttgtaaaaattgtatataaagaactgtatagtttacactgttttcatcttgtgtgtggttattgcttaatgctttttaaacttggaacactcactatggttaaataaggtcttaaaagaaatgtaaatattctgttaataaagttaaatattttaatgattttttttttaaaaaagtcttgatctgtgagttcctacagggtctgttttggctttgttaccatatttttacagtaacaaatcaaagcattattcattctttctttgcatccatttcttttccctcactaaaaaatgctcttcaaggaagacaagaggaaagaaacaaaaatgcagtatgcgttttgaagtacttgattttcaaagtgtagatgctgcataatagtttattaacaaagctcaaagtttacagaaataacattaaatgcaacactttttgattattaacacatgtacaattttacactgcaaaacaattgcaactaaaagtttaggaggtaaagaattagcacacttggaagtctgtatacatttaatacaaatttgcaagatatcagaatgatctctcctgaaaattcaacttt

SEQ ID NO: 277150 - DNA, 311 bp, Homo sapiens
ataatgaaattttcaccagaaagtgttgcagcgtttatagcagtccttggcattctttccattattgcacaggtgagtttctttttttagttagagtgatgtcagtgaccctggctggccatccaaactggggcctcatctagtgatggtatcttggtggaatcaacaaagtcaggagtctgaggttgataggttcagaaattcaatttgtttgtgtagctagtgttgatcagatttttgggactgacacatttaatataggatatataaacgtaaaagctagtttattgatgtatactaggatatatgtc

SEQ ID NO: 277151 - DNA, 311 bp, Homo sapiens
gtttttgttttgctgctctccttataggatgatgtgggctgctggggcagtagcagccatgtctagcatcacctttcctgctgtcagtgcacttgtttcacgaactgctgatgctgatcaacagggtgtcgttcaaggaatgataacaggaattcgaggattatgcaatggtctgggaccggccctctatggattcattttctacatattccatgtggaacttaaagaactgccaataacaggaacagacttgggaacaaacacaagccctcagcaccactttgaacagcttagtcaagacatagacctca

SEQ ID NO: 277152 - DNA, 2332 bp, Homo sapiens
gcaagacccagttcccccactctcgcccccacaagaaaaaaagataaatggcacaggtaggaagagaaaagggagggtgtgcaacagaaggcctgacataaatcaagattatgaaaggagttatgtggtgttgaggaaaaaagtagcctgactaatctctgtctatccttaatttattgcaggtttcagcaacatttgctgcaagtttagtcaccagtcctgcaattggagcttatcttggacgagtatatggggacagcttggtggtggtcttagctacagcaatagctttgctagatatttgttttatccttgttgctgtgccagagtcgttgcctgagaaaatgcggccagcatcctggggagcacccatttcctgggaacaagctgacccttttgcgtccttaaaaaaagtcggccaagattccatagtgctgctgatctgcattacagtgtttctctcctacctaccggaggcaggccaatattccagcttttttttatacctcagacagataatgaaattttcaccagaaagtgttgcagcgtttatagcagtccttggcattctttccattattgcacagaccatagtcttgagtttacttatgaggtcaattggaaataagaacaccattttactgggtctaggatttcaaatattacagttggcatggtatggctttggttcagaaccttggatgatgtgggctgctggggcagtagcagccatgtctagcatcacctttcctgctgtcagtgcacttgtttcacgaactgctgatgctgatcaacagggtgtcgttcaaggaatgataacaggaattcgaggattatgcaatggtctgggaccggccctctatggattcattttctacatattccatgtggaacttaaagaactgccaataacaggaacagacttgggaacaaacacaagccctcagcaccactttgaacagaattccatcatccctggccctcccttcctatttggagcctgttcagtactgctggctctgcttgttgccttgtttattccggaacataccaatttaagcttaaggtccagcagttggagaaagcactgtggcagtcacagccatcctcataatacacaagcgccaggagaggccaaagaacctttactccaggacacaaatgtgtgacgactgaaatcaggaagatttttctatcagcacccaggtcttagttttcacctctagttctggatgtacattccatttccatccacagtgtactttaagattgtcttaagaaatgtatctgcatgaactccgtgggaactaaaggaagtgggaacttagaaccagacagttttccaaagatgttacaatttcttttgaaaaaccttttgtttattagcaccaatttcttgccactaagctatttgttttattatacatcctttaattaaaaactatatatgtaacttcttagatattagcaaatgtctctgctaccatttccttaaggtgttgagctttaactctatgctgactcagtgagacacagtaggtagtatggttgtggacctatttgttttaacattgtaaaattttgagtcagattttaatattgtaaaatcttgggtcaaataattcaaagccttaatgcagatgcactaaaacaaagaaatggtaaatgaattgtttgcatttaaaaaaaaaaactcttaagaaaactgtactaaatctgaatcatgttttgagcttgtttgcagtacttttaaacattattcactactgtttttgaagtgagaaagtatcagccatttagcatttaagttggggtatttagagcctgtaatctaaatgctggctcaaatttattccccagctacttcttataccactattcttttaatgtttgcataatcataagcacctcaacacttgaatacataatctaaaaattatatagtaaagctggtagccttgaaaatgtcagtgtgatatctattatgtagataaatatatatagtggcctttcaggactgtcacagtaacactttatttacagagctaatgtttgtcctaaattttcaggaccctagaggagagctttatacaattaccgatgtgaatttctctaaagtgtatatttttgtgtccagttatattatttaaaaaagtgttactttgtaaaaattgtatataaagaactgtatagtttacactgttttcatcttgtgtgtggttattgcttaatgctttttaaacttggaacactcactatggttaaataaggtcttaaaagaaatgtaaatattctgttaataaagttaaatattttaatgatttttttttta

SEQ ID NO: 277153 - DNA, 2336 bp, Homo sapiens
ttctttaggtattacatgaaacctttcctaaacatacatttctgatgaacggcttaattcaaggagtaaagggtttgttgtcattccttagtgccccgcttattggtgctctttctgatgtttggggccgaaaatccttcttgctgctaacggtgtttttcacatgtgccccaattcctttaatgaagatcagcccatggtggtactttgctgttatctctgtttctggggtttttgcagtgactttttctgtggtatttgcatacgtagcagatataacccaagagcatgaaagaagtatggcttatggactggtttcagcaacatttgctgcaagtttagtcaccagtcctgcaattggagcttatcttggacgagtatatggggacagcttggtggtggtcttagctacagcaatagctttgctagatatttgttttatccttgttgctgtgccagagtcgttgcctgagaaaatgcggccagcatcctggggagcacccatttcctgggaacaagctgacccttttgcgtccttaaaaaaagtcggccaagattccatagtgctgctgatctgcattacagtgtttctctcctacctaccggaggcaggccaatattccagcttttttttatacctcagacagataatgaaattttcaccagaaagtgttgcagcgtttatagcagtccttggcattctttccattattgcacagaccatagtcttgagtttacttatgaggtcaattggaaataagaacaccattttactgggtctaggatttcaaatattacagttggcatggtatggctttggttcagaaccttggatgatgtgggctgctggggcagtagcagccatgtctagcatcacctttcctgctgtcagtgcacttgtttcacgaactgctgatgctgatcaacagggtgtcgttcaaggaatgataacaggaattcgaggattatgcaatggtctgggaccggccctctatggattcattttctacatattccatgtggaacttaaagaactgccaataacaggaacagacttgggaacaaacacaagccctcagcaccactttgaacagaattccatcatccctggccctcccttcctatttggagcctgttcagtactgctggctctgcttgttgccttgtttattccggaacataccaatttaagcttaaggtccagcagttggagaaagcactgtggcagtcacagccatcctcataatacacaagcgccaggagaggccaaagaacctttactccaggacacaaatgtgtgacgactgaaatcaggaagatttttctatcagcacccaggtcttagttttcacctctagttctggatgtacattccatttccatccacagtgtactttaagattgtcttaagaaatgtatctgcatgaactccgtgggaactaaaggaagtgggaacttagaaccagacagttttccaaagatgttacaatttcttttgaaaaaccttttgtttattagcaccaatttcttgccactaagctatttgttttattatacatcctttaattaaaaactatatatgtaacttcttagatattagcaaatgtctctgctaccatttccttaaggtgttgagctttaactctatgctgactcagtgagacacagtaggtagtatggttgtggacctatttgttttaacattgtaaaattttgagtcagattttaatattgtaaaatcttgggtcaaataattcaaagccttaatgcagatgcactaaaacaaagaaatggtaaatgaattgtttgcatttaaaaaaaaaaactcttaagaaaactgtactaaatctgaatcatgttttgagcttgtttgcagtacttttaaacattattcactactgtttttgaagtgagaaagtatcagccatttagcatttaagttggggtatttagagcctgtaatctaaatgctggctcaaatttattccccagctacttcttataccactattcttttaatgtttgcataatcataagcacctcaacacttgaatacataatctaaaaattatatagtaaagctggtagccttgaaaatgtcagtgtgatatctattatgtagataaatatatatagtggcctttcaggactgtcacagtaacactttatttacagagctaatgtttgtcctaaattttcaggaccctagaggagagctttatacaattaccgatgtgaatttctctaaagtgtatatttttgtgtccagttatattatttaaaaaagtgttactttgtaaaaattgtatataaagaactgtatagtttacactgtt

SEQ ID NO: 277154 - DNA, 1305 bp, Homo sapiens
gcagccagctaattaatcccatccggttattacatggggattctgagggataaagggagatggagaagctggagggggcatttgggttgatgcagcacttgtgaaggctgaatggcaatgacagtggctgccctcggtccagaacacggggtgggaacacgtcctcctcactgtcactggctccctctgcagttggctcccagcctgcggggcacttaggtagatggtagcatgggcagggggccaggtcggaggacccatgctcgagaaacacattcgcagacacatccgctagggctcccagttctttaatctgggggacaggtctccccctaaaacactcactctcccacaatgggaagaaccctggtgtccagagctacctcctcctccccaggtccccaagctaggccagggaagtgactctggctgttagccacagcccacgcctacccttgccctgtgattcagacacccgagttcagagccagcctccaagagtatcttacatcccagcgtctcctggaaggccgtatgatccagcactggggagaggagggaaatccccaggactcgaatgcccatcccacccttggtgtagtgaggactcatcctgctggaaaggcccctgaagaacttcaagttccaatgtcccgtttttacagatggggaaactgacatgaagaggagtccaaagtgacacagtcaggccagaaatgttgcttctgaagtcctgagtccacctcctagcactgccaagcagtccacctggaggtgatgagaacttccaggctttggtaatggacaactctgtatccctggagccttcattccttttggcattacagaaccacaagaagtcatctagaatcattgagattctcaactccattgggcaaactggaaccagcaaaatctcagatatctagaattgccactgcttccttgactctgtgatcagtctacagccacagaatcctgattccctttggacattctagaatggcactttaaaaaaaaacaacccacccagtggatcctttcaaagcactgcttattctcttggctgggtgctctacagccagaagttggagttatctaatatcaagaactcttaatctgtcacttcagtctttctaaacccacagactaacaatgttttgtgcattctagaaacattactctttagtttctggagtagttcaactctccacgtaaaatctgtcctagactcaccagtgcttgcctctgtggtcaacctagactcacagaatctcaactaatgagctttctggaaccacaggt

SEQ ID NO: 277155 - DNA, 911 bp, Homo sapiens
ggctttcgggccccgccggaagcccgtccagcgcccaacaaaagcggcgcgacaagtctacgactgagccgaacgcttctgggcgccgcgcgccagggggaaacgttcgcggcggaacgttcaggagaaaacgctccagcaactcccagccgaccccgcccctccccgacctaccatagacgccgtcctccatggcggctaggaaggcccgcggggaatccggggcggtcccgccagtcgggcctggatccgcgttggcccgcgggctcggatggggaaactgacatgaagaggagtccaaagtgacacagtcaggccagaaatgttgcttctgaagtcctgagtccacctcctagcactgccaagcagtccacctggaggtgatgagaacttccaggctttggtaatggacaactctgtatccctggagccttcattccttttggcattacagaaccacaagaagtcatctagaatcattgagattctcaactccattgggcaaactggaaccagcaaaatctcagatatctagaattgccactgcttccttgactctgtgatcagtctacagccacagaatcctgattccctttggacattctagaatggcactttaaaaaaaaacaacccacccagtggatcctttcaaagcactgcttattctcttggctgggtgctctacagccagaagttggagttatctaatatcaagaactcttaatctgtcacttcagtctttctaaacccacagactaacaatgttttgtgcattctagaaacattactctttagtttctggagtagttcaactctccacgtaaaatctgtcctagactcaccagtgcttgcctctgtggtcaacctagactcacagaatctcaactaatgagctttctggaaccacaggt

SEQ ID NO: 277156 - DNA, 774 bp, Homo sapiens
ctccgaaacaacagaaagcacttgacaggcttgctctccaatgagaagccccggaaaagtgtcgcgcggaggcggagccacgcggtacagccacctctgcgcctgctcaaaggccctggacacttggagtctagatggggaaactgacatgaagaggagtccaaagtgacacagtcaggccagaaatgttgcttctgaagtcctgagtccacctcctagcactgccaagcagtccacctggaggtgatgagaacttccaggctttggtaatggacaactctgtatccctggagccttcattccttttggcattacagaaccacaagaagtcatctagaatcattgagattctcaactccattgggcaaactggaaccagcaaaatctcagatatctagaattgccactgcttccttgactctgtgatcagtctacagccacagaatcctgattccctttggacattctagaatggcactttaaaaaaaaacaacccacccagtggatcctttcaaagcactgcttattctcttggctgggtgctctacagccagaagttggagttatctaatatcaagaactcttaatctgtcacttcagtctttctaaacccacagactaacaatgttttgtgcattctagaaacattactctttagtttctggagtagttcaactctccacgtaaaatctgtcctagactcaccagtgcttgcctctgtggtcaacctagactcacagaatctcaactaatgagctttctggaaccacaggt

SEQ ID NO: 277157 - DNA, 514 bp, Homo sapiens
ctgggcctcccccttcccttgtccactaattagccctgtgccctacagggtctcaccttcaccttcaccttccaggtcaggccagaaatgttgcttctgaagtcctgagtccacctcctagcactgccaagcagtccacctggaggtgatgagaacttccaggctttggtaatggacaactctgtatccctggagccttcattccttttggcattacagaaccacaagaagtcatctagaatcattgagattctcaactccattgggcaaactggaaccagcaaaatctcagatatctagaattgccactgcttccttgactctgtgatcagtctacagccacagaatcctgattccctttggacattctagaatggcactttaaaaaaaaacaacccacccagtggatcctttcaaagcactgcttattctcttggctgggtgctctacagccagaagttggagttatctaatatcaagaactcttaatctgtcacttcagtctttctaaacc

SEQ ID NO: 277158 - DNA, 670 bp, Homo sapiens
gctttttcgccccgcccttcaaatgcgaaagcgactgccttcttggaacactcaaaactagcatctgatgaatgcctacattcagtccacaaagcaacaatcttataagctgctcgtcgggcatgatggctcacacctgtaattccagcactctgggaggccaaggcaggtggatcgccggagctccggaattcaagatcagcctggccaacaggggaaaactccgtttctactaaaaatacaaaaattagctgggtgtggtggcactcacctgtagtcctagctactaggaaggctgaggcaggagaatcgcttgaacccaggaggcggaggttgcagtgagccgacagtgccactgcactccagcctgggcaacagagagactccatctcaatcagtcaatcactaagctgctaccaagggagccatttaagtcttgagctgctacagctcctccctttaacaagaataccatagtactttagaagatacctgcctctactaaatttggcacttcattctcagacataccactctttcaattctgatccaattctactattaagacatctaaactaaaaagggcaagagtgagttattaaacttgggctcaagttctacaagtaacctatattacccaagatatttctgacaagtagctccagagtag

SEQ ID NO: 277159 - DNA, 290 bp, Homo sapiens
gttgaaatggagtctcactctgtcacccagctgctaccaagggagccatttaagtcttgagctgctacagctcctccctttaacaagaataccatagtactttagaagatacctgcctctactaaatttggcacttcattctcagacataccactctttcaattctgatccaattctactattaagacatctaaactaaaaagggcaagagtgagttattaaacttgggctcaagttctacaagtaacctatattacccaagatatttctgacaagtagctccagagtag

SEQ ID NO: 277160 - DNA, 541 bp, Homo sapiens
gcagatattaaatcaatatgtgctgaagctgctttatgtgctttacgacgacgctacccacagatctataccactagtgagaaactgcagttggatctctcttcaattaatatctcagctaaggatttcgaggtagctatgcaaaagatgataccagcctcccaaagagctgtgacatcacctgggcaggcactgtccaccgttgtgaaaccactcctgcaaaacactgttgacaagattttagaagccctgcagagagtatttccacatgcagaattcagaacaaataaaacattagactcaggtataaaacttgattgaccatttaaagttagtttttataatcagtaaagtgaaatgtttcatacataccagaaatatttatttgtaaaagaatctcttgaaaagaatttggtaatgctttacctgggatatttgaaggaaatttactccatggattgcccttaatttaacttattgtaagtttggggtgcatttttacatttacttattaattcatatctacacaaatgactagaaa

SEQ ID NO: 277161 - DNA, 1900 bp, Homo sapiens
gcagatattaaatcaatatgtgctgaagctgctttatgtgctttacgacgacgctacccacagatctataccactagtgagaaactgcagttggatctctcttcaattaatatctcagctaaggatttcgaggtagctatgcaaaagatgataccagcctcccaaagagctgtgacatcacctgggcaggcactgtccaccgttgtgaaaccactcctgcaaaacactgttgacaagattttagaagccctgcagagagtatttccacatgcagaattcagaacaaataaaacattagactcagatatttcttgtcctctgctagaaagtgacttggcttacagtgatgatgatgttccatcagtttatgaaaatggactttctcagaaatcttctcataaggcaaaagacaattttaattttcttcatttgaatagaaatgcttgttaccaacctatgtcttttcgaccaagaatattgatagtaggagaaccaggatttgggcaaggttctcacttggcaccagctgtcattcatgctttggaaaagtttactgtatatacattagacattcctgttctttttggagttagtactacatcccctgaagaaacatgtgcccaggtgattcgtgaagctaagagaacagcaccaagtatagtgtatgttcctcatatccacgtgtggtgggaaatagttggaccgacacttaaagccacatttaccacattattacagaatattccttcatttgctccagttttactacttgcaacttctgacaaaccccattccgctttgccagaagaggtgcaagaattgtttatccgtgattatggagagatttttaatgtccagttaccggataaagaagaacggacaaaattttttgaagatttaattctaaaacaagctgctaagcctcctatatcaaaaaagaaagcagttttgcaggctttggaggtactcccagtagcaccaccacctgagccaagatcactgacagcagaagaagtgaaacgactagaagaacaagaagaagatacatttagagaactgaggattttcttaagaaatgttacacataggcttgctattgacaagcgattccgagtgtttactaagcctgttgaccctgatgaggttcctgattatgtcactgtaataaagcaaccaatggacctttcatctgtaatcagatctaatctgtagtaatgccttagaatacaatccagatagagatcctggagatcgtcttattaggcatagagcctgtgctttaagagatactgcctatgccataattaaagaagaacttgatgaagactttgagcagctctgtgaagaaattcaggaatctagaaagaaaagaggttgtagctcctccaaatatgccccgtcttactaccatgtgatgccaaagcaaaattccactcttgttggtgataaaagatcagacccagagcagaatgaaaagctaaagacaccgagtactcctgtggcttgcagcactcctggtaagtactcaagtagttttcatttatgaaattataactttattcttttctaatgccattaactttctcccttattttcctttatttgtgttaatgcagtgaattacattgattttgttactattaagacaactttgcattcttgaaataaatccaagtttataatgtaccacttgcaacccagaagtcaccatctaattgtggactgtcttgatttgaaactgatgtctgtaaattctggtctatttcttactcccccttattcttagaaggtaactccacgttacctattcaaagcctgtagggttttctaaggcctgccttccttggcagacttctaattccaatttttgttctttaagcccctttgtcagactgcttag

SEQ ID NO: 277162 - DNA, 1953 bp, Homo sapiens
gcagatattaaatcaatatgtgctgaagctgctttatgtgctttacgacgacgctacccacagatctataccactagtgagaaactgcagttggatctctcttcaattaatatctcagctaaggatttcgaggtagctatgcaaaagatgataccagcctcccaaagagctgtgacatcacctgggcaggcactgtccaccgttgtgaaaccactcctgcaaaacactgttgacaagattttagaagccctgcagagagtatttccacatgcagaattcagaacaaataaaacattagactcagatatttcttgtcctctgctagaaagtgacttggcttacagtgatgatgatgttccatcagtttatgaaaatggactttctcagaaatcttctcataaggcaaaagacaattttaattttcttcatttgaatagaaatgcttgttaccaacctatgtcttttcgaccaagaatattgatagtaggagaaccaggatttgggcaaggttctcacttggcaccagctgtcattcatgctttggaaaagtttactgtatatacattagacattcctgttctttttggagttagtactacatcccctgaagaaacatgtgcccaggtgattcgtgaagctaagagaacagcaccaagtatagtgtatgttcctcatatccacgtgtggtgggaaatagttggaccgacacttaaagccacatttaccacattattacagaatattccttcatttgctccagttttactacttgcaacttctgacaaaccccattccgctttgccagaagaggtgcaagaattgtttatccgtgattatggagagatttttaatgtccagttaccggataaagaagaacggacaaaattttttgaagatttaattctaaaacaagctgctaagcctcctatatcaaaaaagaaagcagttttgcaggctttggaggtactcccagtagcaccaccacctgagccaagatcactgacagcagaagaagtgaaacgactagaagaacaagaagaagatacatttagagaactgaggattttcttaagaaatgttacacataggcttgctattgacaagcgattccgagtgtttactaagcctgttgaccctgatgaggttcctgattatgtcactgtaataaagcaaccaatggacctttcatctgtaatcagtaaaattgatctacacaagtatctgactgtgaaagactatttgagagatattgatctaatctgtagtaatgccttagaatacaatccagatagagatcctggagatcgtcttattaggcatagagcctgtgctttaagagatactgcctatgccataattaaagaagaacttgatgaagactttgagcagctctgtgaagaaattcaggaatctagaaagaaaagaggttgtagctcctccaaatatgccccgtcttactaccatgtgatgccaaagcaaaattccactcttgttggtgataaaagatcagacccagagcagaatgaaaagctaaagacaccgagtactcctgtggcttgcagcactcctggtaagtactcaagtagttttcatttatgaaattataactttattcttttctaatgccattaactttctcccttattttcctttatttgtgttaatgcagtgaattacattgattttgttactattaagacaactttgcattcttgaaataaatccaagtttataatgtaccacttgcaacccagaagtcaccatctaattgtggactgtcttgatttgaaactgatgtctgtaaattctggtctatttcttactcccccttattcttagaaggtaactccacgttacctattcaaagcctgtagggttttctaaggcctgccttccttggcagacttctaattccaatttttgttctttaagcccctttgtcagactgcttag

SEQ ID NO: 277163 - DNA, 1987 bp, Homo sapiens
ccccaagccatcactggcagcttgggcagaagctggagggccttctgagacaggtgggcgaggtctgccgccaggacatccaggacttcactcaggccacactggacacagcaaggagcctctgcccacagatgctgcagggatccagctggagggagcagctagagggggtcctggcaggctcgaggggcctcccggagctgctcccagagcagctgctgcaagatgccttcactaggctcagggacatgcggctatcaatcacggggaccttggcagagagcattgtggctcaggctttggcaggcctgagtgcagcccgggatcagctggtggagagtctggctcagcaggcaacagtgacaatgccccctgccctaccagcaccggatggaggtgagcccagcctccttgagcctggggaattggaaggtcttttcttccccgaggagaaggaagaggagaaggagaaggatgacagtcctccacagaaatggcctgagctcagccacggtcttcacctggtccccttcattcacagtgctgctgaggaagcggagccggagcccgagctggcggctccgggagaagatgcagagccgcaggcggggccgtccgcgcgcggctctccgagccctgccgcccctgggcccccggccggcccgctgccccgcatggacctgccactggcggggcagcccctgcgccatccgacccgggcccggccgcggccgcgccgccagcaccaccaccgcccgccgccggggggcccccaggtacccccagccttgccgcaggaagggaatgggctcagtgcccgcgtggacgagggcgtggaggaattcttctccaaaaggctgatccagcaggatcgcctctgggcccccgaggaggacccggccactgaggggggcgccactcctgtcccccgtacactgcgaaagaagctgggcaccctctttgccttcaagaagcctcgttcaacgcggggtccacggactgatctagagaccagccctggggcagctccccgaacccgaaaaactacatttggcgacctactgcggccgccaacccgtcccagccgtggtgaggagcttggtggggctgagggggacaccagcagccctgaccctgccggcaggagccgacctcgctacacaagagatagcaaggcctactcgatgatactgctgcctgccgaggaggaggcaacgctgggtgccagacccgacaagcggcggcccctggagcggggagaaacagaactggctccatcctttgaacagcgggtacaagtaatgctgcagaggataggcgtcagccgaggcagcgggggtgccgaaggcaagaggaagcaaagcaaagatggcgagatcaagaaagctggctcagatggtgacattatggacagttccacggaggcccctcccatctcgatcaagtcccgcacccactctgtgtctgctgacccttcctgcagacctggcccagggagccaggggcctgagtctgccacctggaagacactggggcagcagttgaatgcggagctcaggagccgtggttggggccaacaggatggtccaggccctccctcccctggtcaaagcccaagtccctgcagaaccagcccctccccagacagcctgggcctcccagaggacccttgcttgggccccagaaatgaagggcggcgagcagtgtctgtgcatgaggaccagctccaggcccctgctgaacggcccctgaggctgcagcgctcccccgtcctcaaacgcaggccaaaactcgaggcacctccatccccaagcctaggatctggccttggaaccgagcctctgcccccacagcccacagagccctccagccctgagcggagcccaccctccccagccacagaccaaagaggcggcggccccaatccctgatcctctcctctcctgccgcatgagattattttattaaaaaactcaaaggaagcaga

SEQ ID NO: 277164 - DNA, 2020 bp, Homo sapiens
ccccaagccatcactggcagcttgggcagaagctggagggccttctgagacaggtgggcgaggtctgccgccaggacatccaggacttcactcaggccacactggacacagcaaggagcctctgcccacagatgctgcagggatccagctggagggagcagctagagggggtcctggcaggctcgaggggcctcccggagctgctcccagagcagctgctgcaagatgccttcactaggctcagggacatgcggctatcaatcacggggaccttggcagagagcattgtggctcaggctttggcaggcctgagtgcagcccgggatcagctggtggagagtctggctcagcaggcaacagtgacaatgccccctgccctaccagcaccggatggaggtgagcccagcctccttgagcctggggaattggaaggtcttttcttccccgaggagaaggaagaggagaaggagaaggatgacagtcctccacagaaatggcctgagctcagccacggtcttcacctggtccccttcattcacagtgctgctgaggaagcggagccggagcccgagctggcggctccgggagaagatgcagagccgcaggcggggccgtccgcgcgcggctctccgagccctgccgcccctgggcccccggccggcccgctgccccgcatggacctgccactggcggggcagcccctgcgccatccgacccgggcccggccgcggccgcgccgccagcaccaccaccgcccgccgccggggggcccccaggtacccccagccttgccgcaggaagggaatgggctcagtgcccgcgtggacgagggcgtggaggaattcttctccaaaaggctgatccagcaggatcgcctctgggcccccgaggaggacccggccactgaggggggcgccactcctgtcccccgtacactgcgaaagaagctgggcaccctctttgccttcaagaagcctcgttcaacgcggggtccacggactgatctagagaccagccctggggcagctccccgaacccgaaaaactacatttggcgacctactgcggccgccaacccgtcccagccgtggtgaggagcttggtggggctgagggggacaccagcagccctgaccctgccggcaggagccgacctcgctacacaagagatagcaaggcctactcgatgatactgctgcctgccgaggaggaggcaacgctgggtgccagacccgacaagcggcggcccctggagcggggagaaacagaactggctccatcctttgaacagcgggtacaagtaatgctgcagaggataggcgtcagccgaggcagcgggggtgccgaaggcaagaggaagcaaagcaaagatggcgagatcaagaaagctggctcagatggtgacattatggacagttccacggaggcccctcccatctcgatcaagtcccgcacccactctgtgtctgctgacccttcctgcagacctggcccagggagccaggggcctgagtctgccacctggaagacactggggcagcagttgaatgcggagctcaggagccgtggttggggccaacaggatggtccaggccctccctcccctggtcaaagcccaagtccctgcagaaccagcccctccccagacagcctgggcctcccagaggacccttgcttgggccccagaaatgaagatggccagctgaggccgaggcctctctcggcagggcggcgagcagtgtctgtgcatgaggaccagctccaggcccctgctgaacggcccctgaggctgcagcgctcccccgtcctcaaacgcaggccaaaactcgaggcacctccatccccaagcctaggatctggccttggaaccgagcctctgcccccacagcccacagagccctccagccctgagcggagcccaccctccccagccacagaccaaagaggcggcggccccaatccctgatcctctcctctcctgccgcatgagattattttattaaaaaactcaaaggaagcaga

SEQ ID NO: 277165 - DNA, 2378 bp, Homo sapiens
ccccaagccatcactggcagcttgggcagaagctggagggccttctgagacaggtgggcgaggtctgccgccaggacatccaggacttcactcaggccacactggacacagcaaggagcctctgcccacagatgctgcagggatccagctggagggagcagctagagggggtcctggcaggctcgaggggcctcccggagctgctcccagagcagctgctgcaagatgccttcactaggctcagggacatgcggctatcaatcacggggaccttggcagagagcattgtggctcaggctttggcaggcctgagtgcagcccgggatcagctggtggagagtctggctcagcaggcaacagtgacaatgccccctgccctaccagcaccggatggaggtgagcccagcctccttgagcctggggaattggaaggtcttttcttccccgaggagaaggaagaggagaaggagaaggatgacagtcctccacagaaatggcctgagctcagccacggtcttcacctggtccccttcattcacagtgctgctgaggaagcggagccggagcccgagctggcggctccgggagaagatgcagagccgcaggcggggccgtccgcgcgcggctctccgagccctgccgcccctgggcccccggccggcccgctgccccgcatggacctgccactggcggggcagcccctgcgccatccgacccgggcccggccgcggccgcgccgccagcaccaccaccgcccgccgccggggggcccccaggtacccccagccttgccgcaggaagggaatgggctcagtgcccgcgtggacgagggcgtggaggaattcttctccaaaaggctgatccagcaggatcgcctctgggcccccgaggaggacccggccactgaggggggcgccactcctgtcccccgtacactgcgaaagaagctgggcaccctctttgccttcaagaagcctcgttcaacgcggggtccacggactgatctagagaccagccctggggcagctccccgaacccgaaaaactacatttggcgacctactgcggccgccaacccgtcccagccgtggtgaggagcttggtggggctgagggggacaccagcagccctgaccctgccggcaggagccgacctcgctacacaagagatagcaaggcctactcgatgatactgctgcctgccgaggaggaggcaacgctgggtgccagacccgacaagcggcggcccctggagcggggagaaacagaactggctccatcctttgaacagcgggtacaagtaatgctgcagaggataggcgtcagccgaggcagcgggggtgccgaaggcaagaggaagcaaagcaaagatggcgagatcaagaaagctggctcagatggtctggtacctgagtccccagctccgccttgcaggtgacattatggacagttccacggaggcccctcccatctcgatcaagtcccgcacccactctgtgtctgctgacccttcctgcagacctggcccagggagccaggggcctgagtctgccacctggaagacactggggcagcagttgaatgcggagctcaggagccgtggttggggccaacaggatggtccaggccctccctcccctggtcaaagcccaagtccctgcagaaccagcccctccccagacagcctgggcctcccagaggacccttgcttgggccccagaaatgaagggcggcgagcagtgtctgtgcatgaggaccagctccaggcccctgctggtgaggggagacacctccacgtgtgcttgaatgcaggagatgtgggagggtgggcttctggggctcccttcatagctttggtccttggagggagccaccagtgtgtgaggtctcaagaaatcagggagccagaagaccaggtgcaagggtttgacagcaagcccttccaactagcactggctccacttcccgaagagcagcctctgccaggggtgaggacgcagggacgggggatgctctgaaggcagcagtgtgtgtgagtgcatgcttatgtgcactggaggtggaagagaggggcaggggatggacagaccccaagccttagcaacccaccccaagcctttctgtgtcccttagaacggcccctgaggctgcagcgctcccccgtcctcaaacgcaggccaaaactcgaggcacctccatccccaagcctaggatctggccttggaaccgagcctctgcccccacagcccacagagccctccagccctgagcggagcccaccctccccagccacagaccaaagaggcggcggccccaatccctgatcctctcctctcctgccgcatgagattattttattaaaaaactcaaaggaagcaga

SEQ ID NO: 277166 - DNA, 383 bp, Homo sapiens
aagtcggcctgaatttagaaatattcaagtgtgcaaagagttctaagagggctgtactgggtttgccatgttcttgtccagcccatggtgggcattcagtggcaggattataagaacaagaacgaacaaaaggctagggtgtggggagcgggcagggctggaatctgattgccctgtttcctgcagagcaaagatggcgagatcaagaaagctggctcagatggtaagtgggaccctggggtgtggcagtacatttgccaggaggtgtccttatagacagcccccaaggcacttgctctccttggggaggaaggggagaggccaggtttttcttcccctcacctccaaggtctggtacctgagtccccagctccgccttgcag

SEQ ID NO: 277167 - DNA, 2344 bp, Homo sapiens
ccccaagccatcactggcagcttgggcagaagctggagggccttctgagacaggtgggcgaggtctgccgccaggacatccaggacttcactcaggccacactggacacagcaaggagcctctgcccacagatgctgcagggatccagctggagggagcagctagagggggtcctggcaggctcgaggggcctcccggagctgctcccagagcagctgctgcaagatgccttcactaggctcagggacatgcggctatcaatcacggggaccttggcagagagcattgtggctcaggctttggcaggcctgagtgcagcccgggatcagctggtggagagtctggctcagcaggcaacagtgacaatgccccctgccctaccagcaccggatggaggtgagcccagcctccttgagcctggggaattggaaggtcttttcttccccgaggagaaggaagaggagaaggagaaggatgacagtcctccacagaaatggcctgagctcagccacggtcttcacctggtccccttcattcacagtgctgctgaggaagcggagccggagcccgagctggcggctccgggagaagatgcagagccgcaggcggggccgtccgcgcgcggctctccgagccctgccgcccctgggcccccggccggcccgctgccccgcatggacctgccactggcggggcagcccctgcgccatccgacccgggcccggccgcggccgcgccgccagcaccaccaccgcccgccgccggggggcccccaggtacccccagccttgccgcaggaagggaatgggctcagtgcccgcgtggacgagggcgtggaggaattcttctccaaaaggctgatccagcaggatcgcctctgggcccccgaggaggacccggccactgaggggggcgccactcctgtcccccgtacactgcgaaagaagctgggcaccctctttgccttcaagaagcctcgttcaacgcggggtccacggactgatctagagaccagccctggggcagctccccgaacccgaaaaactacatttggcgacctactgcggccgccaacccgtcccagccgtggtgaggagcttggtggggctgagggggacaccagcagccctgaccctgccggcaggagccgacctcgctacacaagagatagcaaggcctactcgatgatactgctgcctgccgaggaggaggcaacgctgggtgccagacccgacaagcggcggcccctggagcggggagaaacagaactggctccatcctttgaacagcgggtacaagtaatgctgcagaggataggcgtcagccgaggcagcgggggtgccgaaggcaagaggaagcaaagcaaagatggcgagatcaagaaagctggctcagatggtgacattatggacagttccacggaggcccctcccatctcgatcaagtcccgcacccactctgtgtctgctgacccttcctgcagacctggcccagggagccaggggcctgagtctgccacctggaagacactggggcagcagttgaatgcggagctcaggagccgtggttggggccaacaggatggtccaggccctccctcccctggtcaaagcccaagtccctgcagaaccagcccctccccagacagcctgggcctcccagaggacccttgcttgggccccagaaatgaagggcggcgagcagtgtctgtgcatgaggaccagctccaggcccctgctggtgaggggagacacctccacgtgtgcttgaatgcaggagatgtgggagggtgggcttctggggctcccttcatagctttggtccttggagggagccaccagtgtgtgaggtctcaagaaatcagggagccagaagaccaggtgcaagggtttgacagcaagcccttccaactagcactggctccacttcccgaagagcagcctctgccaggggtgaggacgcagggacgggggatgctctgaaggcagcagtgtgtgtgagtgcatgcttatgtgcactggaggtggaagagaggggcaggggatggacagaccccaagccttagcaacccaccccaagcctttctgtgtcccttagaacggcccctgaggctgcagcgctcccccgtcctcaaacgcaggccaaaactcgaggcacctccatccccaagcctaggatctggccttggaaccgagcctctgcccccacagcccacagagccctccagccctgagcggagcccaccctccccagccacagaccaaagaggcggcggccccaatccctgatcctctcctctcctgccgcatgagattattttattaaaaaactcaaaggaagcaga

SEQ ID NO: 277168 - DNA, 1939 bp, Homo sapiens
ccccaagccatcactggcagcttgggcagaagctggagggccttctgagacaggtgggcgaggtctgccgccaggacatccaggacttcactcaggccacactggacacagcaaggagcctctgcccacagatgctgcagggatccagctggagggagcagctagagggggtcctggcaggctcgaggggcctcccggagctgctcccagagcagctgctgcaagatgccttcactaggctcagggacatgcggctatcaatcacggggaccttggcagagagcattgtggctcaggctttggcaggcctgagtgcagcccgggatcagctggtggagagtctggctcagcaggcaacagtgacaatgccccctgccctaccagcaccggatggaggtgagcccagcctccttgagcctggggaattggaaggtcttttcttccccgaggagaaggaagaggagaaggagaaggatgacagtcctccacagaaatggcctgagctcagccacggtcttcacctggtccccttcattcacagtgctgctgaggaagcggagccggagcccgagctggcggctccgggagaagatgcagagccgcaggcggggccgtccgcgcgcggctctccgagccctgccgcccctgggcccccggccggcccgctgccccgcatggacctgccactggcggggcagcccctgcgccatccgacccgggcccggccgcggccgcgccgccagcaccaccaccgcccgccgccggggggcccccaggtacccccagccttgccgcaggaagggaatgggctcagtgcccgcgtggacgagggcgtggaggaattcttctccaaaaggctgatccagcaggatcgcctctgggcccccgaggaggacccggccactgaggggggcgccactcctgtcccccgtacactgcgaaagaagctgggcaccctctttgccttcaagaagcctcgttcaacgcggggtccacggactgatctagagaccagccctggggcagctccccgaacccgaaaaactacatttggcgacctactgcggccgccaacccgtcccagccgtggtgaggagcttggtggggctgagggggacaccagcagccctgaccctgccggcaggagccgacctcgctacacaagagatagcaaggcctactcgatgatactgctgcctgccgaggaggaggcaacgctgggtgccagacccgacaagcggcggcccctggagcggggagaaacagaactggctccatcctttgaacagcgggtacaagtaatgctgcagaggataggcgtcagccgaggcagcgggggtgccgaaggcaagaggaagcaaagcaaagatggcgagatcaagaaagctggctcagatggtgacattatggacagttccacggaggcccctcccatctcgatcaagtcccgcacccactctgtgtctgctgacccttcctgcagacctggcccagggagccaggggcctgagtctgccacctggaagacactggggcagcagttgaatgcggagctcaggagccgtggttggggccaacaggatggtccaggccctccctcccctggtcaaagcccaagtccctgcagaaccagcccctccccagacagcctgggcctcccagaggacccttgcttgggccccagaaatgaagaacggcccctgaggctgcagcgctcccccgtcctcaaacgcaggccaaaactcgaggcacctccatccccaagcctaggatctggccttggaaccgagcctctgcccccacagcccacagagccctccagccctgagcggagcccaccctccccagccacagaccaaagaggcggcggccccaatccctgatcctctcctctcctgccgcatgagattattttattaaaaaactcaaaggaagcaga

SEQ ID NO: 277169 - DNA, 2061 bp, Homo sapiens
gatcatggctgaggccctacctgccatctttggctgcttggtattgcaggtggagagtctggctcagcaggcaacagtgacaatgccccctgccctaccagcaccggatggaggtgagcccagcctccttgagcctggggaattggaaggtcttttcttccccgaggagaaggaagaggagaaggagaaggatgacagtcctccacagaaatggcctgagctcagccacggtcttcacctggtccccttcattcacagtgctgctgaggaagcggagccggagcccgagctggcggctccgggagaagatgcagagccgcaggcggggccgtccgcgcgcggctctccgagccctgccgcccctgggcccccggccggcccgctgccccgcatggacctgccactggcggggcagcccctgcgccatccgacccgggcccggccgcggccgcgccgccagcaccaccaccgcccgccgccggggggcccccaggtacccccagccttgccgcaggaagggaatgggctcagtgcccgcgtggacgagggcgtggaggaattcttctccaaaaggctgatccagcaggatcgcctctgggcccccgaggaggacccggccactgaggggggcgccactcctgtcccccgtacactgcgaaagaagctgggcaccctctttgccttcaagaagcctcgttcaacgcggggtccacggactgatctagagaccagccctggggcagctccccgaacccgaaaaactacatttggcgacctactgcggccgccaacccgtcccagccgtggtgaggagcttggtggggctgagggggacaccagcagccctgaccctgccggcaggagccgacctcgctacacaagagatagcaaggcctactcgatgatactgctgcctgccgaggaggaggcaacgctgggtgccagacccgacaagcggcggcccctggagcggggagaaacagaactggctccatcctttgaacagcgggtacaagtaatgctgcagaggataggcgtcagccgaggcagcgggggtgccgaaggcaagaggaagcaaagcaaagatggcgagatcaagaaagctggctcagatggtgacattatggacagttccacggaggcccctcccatctcgatcaagtcccgcacccactctgtgtctgctgacccttcctgcagacctggcccagggagccaggggcctgagtctgccacctggaagacactggggcagcagttgaatgcggagctcaggagccgtggttggggccaacaggatggtccaggccctccctcccctggtcaaagcccaagtccctgcagaaccagcccctccccagacagcctgggcctcccagaggacccttgcttgggccccagaaatgaagggcggcgagcagtgtctgtgcatgaggaccagctccaggcccctgctggtgaggggagacacctccacgtgtgcttgaatgcaggagatgtgggagggtgggcttctggggctcccttcatagctttggtccttggagggagccaccagtgtgtgaggtctcaagaaatcagggagccagaagaccaggtgcaagggtttgacagcaagcccttccaactagcactggctccacttcccgaagagcagcctctgccaggggtgaggacgcagggacgggggatgctctgaaggcagcagtgtgtgtgagtgcatgcttatgtgcactggaggtggaagagaggggcaggggatggacagaccccaagccttagcaacccaccccaagcctttctgtgtcccttagaacggcccctgaggctgcagcgctcccccgtcctcaaacgcaggccaaaactcgaggcacctccatccccaagcctaggatctggccttggaaccgagcctctgcccccacagcccacagagccctccagccctgagcggagcccaccctccccagccacagaccaaagaggcggcggccccaatccctgatcctctcctctcctgccgcatgagattattttattaaaaaactcaaaggaagcaga

SEQ ID NO: 277170 - DNA, 248 bp, Homo sapiens
gccgccacctccccgggctcggcgctcggtgctcttctggtgctgtcccctcaggtgctgctgaggaagcggagccggagcccgagctggcggctccgggagaagatgcagagccgcaggcggggccgtccgcgcgcggctctccgagccctgccgcccctgggcccccggccggcccgctgccccgcatggacctgccactggcggggcagcccctgcgccatccgacccgggcccggccgcggccg

SEQ ID NO: 277171 - DNA, 1681 bp, Homo sapiens
tgccgccaccgccgcggcccgcgctgtaaccgcggctgccgctgctgctccgggcgggcgttggtgccgtgtgccgaggcgccctgtcaggcgatggggagcggctgggcggggagagccgacggccgcggcggcgcctgaggaacgcagccgggctcgggagcggcgagggcgggccggtccagcggcggaggagcgaggcggggcgaggcaggcggcgcggggaccccgcgccaagcagcggcggcctcggaggaagaggggtcgccgcccaggtttcttgcggccgccgctcttgtcgtcgcagtatttcctgttcggattatcttttgcttccccccagctgcctccttaccctcacactcccactcctccgtttccgcggtcgaagctgccttcggccccgggtggtctcccccgcccggggaccccctgtgcctcccctcccgggctgcgggggagcccctccgagaccatgaggaaattcaacatcaggaaggtgctggacggcctgaccgccggctcgtcctcggcgtcgcagcagcaacagcagcagcatccgcctgggaaccgggagccggagatccaggaaacgctccagtccgagcactttcagctctgcaagactgttcgccatggatttccctatcaaccctcagccctggcctttgatcctgtacagaagatcctggcagtgggaactcagactggtgctttaaggctctttggtcgtccaggagtagaatgttattgccagcatgacagtggagctgcagtaatccagctccagttcctgattaatgagggagcgcttgtgagtgccttggctgatgacaccttacacttatggaatttacgtcagaagaggcctgccatactacattcgcttaaattttgcagagaaagggttacattttgccatctgcctttccagagtaagtggctctatgtgggcactgaacgaggtaatatacatattgtcaatgtggagtccttcacactctcaggctacgtcattatgtggaataaagccattgaactgtcatctaaatctcacccaggacctgtggtccatataagtgataatccaatggacgagggaaagcttttgattggctttgaatctggaacagtagttttatgggacctcaaatcaaagaaagccgactacagatacacatatgatgaggctatccactctgttgcttggcatcatgaaggaaaacaatttatttgcagtcattcagatggcaccttgactatatggaatgtaaggtcccctgctaaaccagtacagacaatcactccacatggaaaacagttaaaggatgggaagaagccagaaccatgcaaacctatcctcaaggtggaattcaaaacgactagatctggggtttgttgagatccaacagatatattccaacaatagctatattccaacaatagattaaatgaactctaagaggtgtatcatctgtttgactcttgcatccttcattgtgtgacctgtagcatagttatctgacttctttgtggttcattttcctcacttatgacatagatggataaaatgtcagacattagttgtttaattgagatgataatgtatgtaaaacatttcaagcagtttctggtatataataaactctataaatgattgagaagccatttttttaaggaa

SEQ ID NO: 277172 - DNA, 1189 bp, Homo sapiens
tgccgccaccgccgcggcccgcgctgtaaccgcggctgccgctgctgctccgggcgggcgttggtgccgtgtgccgaggcgccctgtcaggcgatggggagcggctgggcggggagagccgacggccgcggcggcgcctgaggaacgcagccgggctcgggagcggcgagggcgggccggtccagcggcggaggagcgaggcggggcgaggcaggcggcgcggggaccccgcgccaagcagcggcggcctcggaggaagaggggtcgccgcccaggtttcttgcggccgccgctcttgtcgtcgcagtatttcctgttcggattatcttttgcttccccccagctgcctccttaccctcacactcccactcctccgtttccgcggtcgaagctgccttcggccccgggtggtctcccccgcccggggaccccctgtgcctcccctcccgggctgcgggggagcccctccgagaccatgaggaaattcaacatcaggaaggtgctggacggcctgaccgccggctcgtcctcggcgtcgcagcagcaacagcagcagcatccgcctgggaaccgggagccggagatccaggaaacgctccagtccgagcactttcagctctgcaagactgttcgccatggatttccctatcaaccctcagccctggcctttgatcctgtacagaagatcctggcagtgggaactcagactggtgctttaaggctctttggtcgtccaggagtagaatgttattgccagcatgacagtggagctgcagtaatccagctccagttcctgattaatgagggagcgcttgtgagtgccttggctgatgacaccttacacttatggaatttacgtcagaagaggcctgccatactacattcgcttaaattttgcagagaaagggttacattttgccatctgcctttccagagtaagtggctctatgtgggcactgaacgaggtaatatacatattgtcaatgtggagtccttcacactctcaggctacgtcattatgtggaataaagccattgaactgtcatctaaatctcacccaggacctgtggtccatataagtgataatccaatggacgagggaaaggtagaattttttgtaaaaaattatatattaaatgcacaaattttagtatttttcaataaacatgctatttcaggatcacactta

SEQ ID NO: 277173 - DNA, 261 bp, Homo sapiens
accgccgcggcccgcgctgtaaccgcggctgccgctgctgctccgggcgggcgttggtgccgtgtgccgaggcgccctgtcaggcgatggggagcggctgggcggggagagccgacggccgcggcggcgcctgaggaacgcagccgggctcgggagcggcgagggcgggccggtccagcggcggaggagcgaggcggggcgaggcaggcggcgcggggacccacaccaggcgccttgtgtgcgaggccgagcggcggccgc

SEQ ID NO: 277174 - DNA, 1673 bp, Homo sapiens
tgccgccaccgccgcggcccgcgctgtaaccgcggctgccgctgctgctccgggcgggcgttggtgccgtgtgccgaggcgccctgtcaggcgatggggagcggctgggcggggagagccgacggccgcggcggcgcctgaggaacgcagccgggctcgggagcggcgagggcgggccggtccagcggcggaggagcgaggcggggcgaggcaggcggcgcggggaccccgcgccaagcagcggcggcctcggaggaagaggggtcgccgcccaggtttcttgcggccgccgctcttgtcgtcgcagtatttcctgttcggattatcttttgcttccccccagctgcctccttaccctcacactcccactcctccgtttccgcggtcgaagctgccttcggccccgggtggtctcccccgcccggggaccccctgtgcctcccctcccgggctgcgggggagcccctccgagaccatgaggaaattcaacatcaggaaggtgctggacggcctgaccgccggctcgtcctcggcgtcgcagcagcaacagcagcagcatccgcctgggaaccgggagccggagatccaggaaacgctccagtccgagcactttcagctctgcaagactgttcgccatggatttccctatcaaccctcagccctggcctttgatcctgtacagaagatcctggcagtgggaactcagactggtgctttaaggctctttggtcgtccaggagtagaatgttattgccagcatgacagtggagctgcagtaatccagctccagttcctgattaatgagggagcgcttgtgagtgccttggctgatgacaccttacacttatggaatttacgtcagaagaggcctgccatactacattcgcttaaattttgcagagaaagggttacattttgccatctgcctttccagagtaagtggctctatgtgggcactgaacgaggtaatatacatattgtcaatgtggagtccttcacactctcaggctacgtcattatgtggaataaagccattgaactgtcatctaaatctcacccaggacctgtggtccatataagtgataatccaatggacgagggaaagcttttgattggctttgaatctggaacagtagttttatgggacctcaaatcaaagaaagccgactacagatacacatatgatgaggctatccactctgttgcttggcatcatgaaggaaaacaatttatttgcagtcattcagatggcaccttgactatatggaatgtaaggtcccctgctaaaccagtacagacaatcactccacatggaaaacagttaaaggatgggaagaagccagaaccatgcaaacctatcctcaaggtggaattcaaaacgactagatctggggagccttttattattttatcaggaggtttgtcatatgatactgtaggaagaagaccttgcttaacagtgatgcatgggaaaagcactgctgtgctagaaatggactattcaattgttgattttctaacgctgtgtgaaacaccatacccaaatgattttcaagaaccatatgctgtggttgttcttctagaaaaggatttagtacttatagaccttgcacaaaatggatatcctatatttgaaatccctaccctttgagtatacatgagtcccctgttac

SEQ ID NO: 277175 - DNA, 1268 bp, Homo sapiens
tgccgccaccgccgcggcccgcgctgtaaccgcggctgccgctgctgctccgggcgggcgttggtgccgtgtgccgaggcgccctgtcaggcgatggggagcggctgggcggggagagccgacggccgcggcggcgcctgaggaacgcagccgggctcgggagcggcgagggcgggccggtccagcggcggaggagcgaggcggggcgaggcaggcggcgcggggaccccgcgccaagcagcggcggcctcggaggaagaggggtcgccgcccaggtttcttgcggccgccgctcttgtcgtcgcagtatttcctgttcggattatcttttgcttccccccagctgcctccttaccctcacactcccactcctccgtttccgcggtcgaagctgccttcggccccgggtggtctcccccgcccggggaccccctgtgcctcccctcccgggctgcgggggagcccctccgagaccatgaggaaattcaacatcaggaaggtgctggacggcctgaccgccggctcgtcctcggcgtcgcagcagcaacagcagcagcatccgcctgggaaccgggagccggagatccaggaaacgctccagtccgagcactttcagctctgcaaggtgaacggagcgcgcagccccgcgacaccgtcattgaaaaattggggttgttttaagggggctactcgggctttacatgggaatgcaagggaagagaacgccaataataataataataactctaataaaaggctcgctcctcccttggcaaacgtttcttcggtgggttgttttggagattgataccttactccttttcattgatttttctctctcccctttgcacatgcagcaatcagttcaaggttgcttcaaactattatccgacctttaatcgtattctgacactgccagtaataacctggaagcttttatattcaagcgttttaatatgattcaccaacttcgaagtttcctttggaaacggtgtctaatgaatgttgtttatcaaaaagccaaacctgttctaccacacctttgctcatcacttttcccttaaaatgtggtgtaagtggcttacgatatgaaatcacagggttctttttatcattatgtttgttaaaaagtactgagatttttgcctgttaatggcacgataattgccatagcgttctgtaattcaggaaagaatgatgcagcgaattaagtcaccagctgcttaatgaggaaacacaaacttgcctcggttttaatacctgccttt

SEQ ID NO: 277176 - DNA, 3451 bp, Homo sapiens
  misc_feature (1)..(1): n is a, c, g, or t
ngaggcccaagacccgcgggcttgcggaccggacgcaggcggcagatttgcagcccgggatgcgccagggaacagcctgcgcccccctccctcctctccgcccgctggccgggccaactccggcttctgccgcgcgtgcctggctcggagctccgctgcggaaaacccgagcgcgggcggctccccgcctcgccgcccgggaaaatccgggggtggccgccagggatctccaagcggcctgggctgggcggccggagcttccctcccggatttgcgccccgaacctggcgccctgaagctagaggcccgtcggtccagtccttgcctcccatcttctctccgcagagcgcccagacgacggcgagatgacggccgggagccccgaagaatgcggggaggtgcggaggagccccgagggccgcgtctctcgcttgggccgccgcctgggccgccgccggcgcccgcgctccccgcccgagcctctgcgggtgcgggcgcggctgcggctgcgctcgccgtcgggggcgttcgcggcgctgggggcgctcgtggtactggtgggtatgggcattgcagtggccggctactggccgcaccgggccggggccccagggtcccgggccgccaatgccagctcgccccagatgagcgagctgcgacgcgagggtcgcggcgggggccgggctcacggcccgcacgagcggctgcggctcctcgggccggtgatcatgggcgtcggcctgttcgtgttcatctgcgccaacacactgctgtatgagaaccgagacttggagacgcgacggctccgccagggggtgctgcgggcccaggcgctccggccccccgacggcccgggctgggactgcgccctccttcccagccccggccctaggagtccccgagccgtaggctgcgcagagccagaaatctgggacccgtccccgcgtcggggtacttcacccgtcccgtcagtgcggagtctgcgttcagagcccgctaatcctcgcttggggttacctgccttgctcaacagctacccgctgaagggccccgggctgcccccaccctggggtccacggacgcagactggccatgtgatcatcaccgtgcagccgtctggctcctgcattgaacattccaagtctctggatctgggccttggggagctcctccttggggccccagcagctcgggactgtgctcaccgaagctggccacggctggaccgcctcagtcttgggggctatgccaaattgggaggaggaggggacttgggggcccgggtctgaagagaggggagacagcctgctctgaggctgcagcatggaccatgctaataggaccaaaggaccaggagtcccaacgtctaatagatgtttcagtcacatcccaggctggggatggatgctctgaccacagcagctgtgaagggcatcctgacctgcatgcgggcagagaaatgccagctgcaccagggctcagtgagctggagagggtgcgtttcactgtggggtgtggaggactcgcctcaggaatttcttcagcctctgtaagtggccttagccctaacagggctggaggtccaggccagggtgactgggagatgtacccagtgtcttggcaaacccaagaaagtggtgggcaagggcccctaagactgggaggtaggttgggatgttacaggctggggcaggctccctccaaggcggcactggtgatggagtgtggggcctctgggaagatggaccacgggatgagactctccactgccatctgggacggggactgagccttgaactcctaccacctcaatccctttcttccctcagccatctggggtatatccctctagagctacactactgccaatgccttcatactgagttctgggcccctctgcaaataagtctgagaagccccttctctccttcctttatcgtggcctatgctgcagaatctcactgcagctggcaaaaggcattggccagctctcagaaatccctttactcaacgttgaagctgcattttggtcaatgtgggtaacttactttagaaaatgacttgagtttaggtctcccccacccatatttaatttttcccaagttgctggtagaagagaaatttaaaagtggatcaatcctcacagagagagttctttttgttgttgtttattgaaaaaaatgcaatacaagaagcaagaccaaacagatatctaaacactacaaccacttctactacgaaaggccaaaacagcagacttgattattgcctgtgtagtctaaagattctgccaatctgattctgctgcccgagttcctattttttcaagaaatgtaaacaactacttgatatgattcataattttaaaaaaatttacaaagctccttcatttttgtcaccaaaataatacatttgagagagatttgtagaaacaaccagcctggggctgagatcctgggcagaaatttcccgtgagcatcaaaaggcgtcagtcaggccgcagctctggctccagttcccgaggtttgttgtctcctcacccccagctgccaagcatccccccaacacacactgatgggcccagcggtggaggggggggtggggacggggatgggtcacggggccctgacgggtcccgcagttaggctccctgagccctcggcttataaatacaggtcttgctttgtgggtgggtgccagagtcctcatgtggcttggaggaaatctttatttctcaaattaaaataaaattgcagcgagagttaaaaaaaaaaaaaaaaaaaaaaaaaaaaaaaaaaaaaaaaaaaaaaaaaaaaaaaaaaaaaaaaaaaaaaaaaaaaaaaaaaaaaaaaaaaaggggggggggaggcgcaagaaaataaatattactcatcaggggggagagcaacgaattaagaagcgacgacacacgcagtagtttttagtagaggaaacaggggacgccacataagggaaggggatttattaataatacaacgaggaggtgggcggggagattataaaacaacgagttgtaagaggaagacaaaaaataatgagacaagaagcagggagagccaacttatgtgaaaggagaagagagacacaaaatcaaatattggcgggggaggggcggagaaccaaacaagaggaggggagaacacaaacacatcccacagtacaggagacgtatatataccgaccgcgcgcatgaggagggcggataatatataaacaacataccggataagagaggtgagattagataaggaggtggagagaaaaaacaagaagcgaggcaagtataatgtatacgcggtgtgggagagagtgagagaagtaatatgtttgtgaagataggaggaagagtatagtgatatttggtgcgagatatcatttcattagggaaggggggcgagctgtgtgtataagctatgagaaggaagaggac

SEQ ID NO: 277177 - DNA, 2764 bp, Homo sapiens
  misc_feature (1)..(1): n is a, c, g, or t
ngaggcccaagacccgcgggcttgcggaccggacgcaggcggcagatttgcagcccgggatgcgccagggaacagcctgcgcccccctccctcctctccgcccgctggccgggccaactccggcttctgccgcgcgtgcctggctcggagctccgctgcggaaaacccgagcgcgggcggctccccgcctcgccgcccgggaaaatccgggggtggccgccagggatctccaagcggcctgggctgggcggccggagcttccctcccggatttgcgccccgaacctggcgccctgaagctagaggcccgtcggtccagtccttgcctcccatcttctctccgcagagcgcccagacgacggcgagatgacggccgggagccccgaagaatgcggggaggtgcggaggagccccgagggccgcgtctctcgcttgggccgccgcctgggccgccgccggcgcccgcgctccccgcccgagcctctgcgggtgcgggcgcggctgcggctgcgctcgccgtcgggggcgttcgcggcgctgggggcgctcgtggtactggtgggtatgggcattgcagtggccggctactggccgcaccgggccggggccccagggtcccgggccgccaatgccagctcgccccagatgagcgagctgcgacgcgagggtcgcggcgggggccgggctcacggcccgcacgagcggctgcggctcctcgggccggtgatcatgggcgtcggcctgttcgtgttcatctgcgccaacacactgctgtatgagaaccgagacttggagacgcgacggctccgccagggggtgctgcgggcccaggcgctccggccccccgacggcccgggctgggactgcgccctccttcccagccccggccctaggagtccccgagccgtaggctgcgcagagccagaaatctgggacccgtccccgcgtcggggtacttcacccgtcccgtcagtgcggagtctgcgttcagagcccgctaatcctcgcttggggttacctgccttgctcaacagctacccgctgaagggccccgggctgcccccaccctggggtccacggacgcagactggccatgtgatcatcaccgtgcagccgtctggctcctgcattgaacattccaagtctctggatctgggccttggggagctcctccttggggccccagcagctcgggactgtgctcaccgaagctggccacggctggaccgcctcagtcttgggggctatgccaaattgggaggaggaggggacttgggggcccgggtctgaagagaggggagacagcctgctctgaggctgcagcatggaccatgctaataggaccaaaggaccaggagtcccaacgtctaatagatgtttcagtcacatcccaggctggggatggatgctctgaccacagcagctgtgaagggcatcctgacctgcatgcgggcagagaaatgccagctgcaccagggctcagtgagctggagagggtgcgtttcactgtggggtgtggaggactcgcctcaggaatttcttcagcctctgtaagtggccttagccctaacagggctggaggtccaggccagggtgactgggagatgtacccagtgtcttggcaaacccaagaaagtggtgggcaagggcccctaagactgggaggtaggttgggatgttacaggctggggcaggctccctccaaggcggcactggtgatggagtgtggggcctctgggaagatggaccacgggatgagactctccactgccatctgggacggggactgagccttgaactcctaccacctcaatccctttcttccctcagccatctggggtatatccctctagagctacactactgccaatgccttcatactgagttctgggcccctctgcaaataagtctgagaagccccttctctccttcctttatcgtggcctatgctgcagaatctcactgcagctggcaaaaggcattggccagctctcagaaatccctttactcaacgttgaagctgcattttggtcaatgtgggtaacttactttagaaaatgacttgagtttaggtctcccccacccatatttaatttttcccaagttgctggtagaagagaaatttaaaagtggatcaatcctcacagagagagttctttttgttgttgtttattgaaaaaaatgcaatacaagaagcaagaccaaacagatatctaaacactacaaccacttctactacgaaaggccaaaacagcagacttgattattgcctgtgtagtctaaagattctgccaatctgattctgctgcccgagttcctattttttcaagaaatgtaaacaactacttgatatgattcataattttaaaaaaatttacaaagctccttcatttttgtcaccaaaataatacatttgagagagatttgtagaaacaaccagcctggggctgagatcctgggcagaaatttcccgtgagcatcaaaaggcgtcagtcaggccgcagctctggctccagttcccgaggtttgttgtctcctcacccccagctgccaagcatccccccaacacacactgatgggcccagcggtggaggggggggtggggacggggatgggtcacggggccctgacgggtcccgcagttaggctccctgagccctcggcttataaatacaggtcttgctttgtgggtgggtgccagagtcctcatgtggcttggaggaaatctttatttctcaaattaaaataaaattgcagcgagagtt

SEQ ID NO: 277178 - DNA, 3549 bp, Homo sapiens
  misc_feature (1)..(1): n is a, c, g, or t
ngaggcccaagacccgcgggcttgcggaccggacgcaggcggcagatttgcagcccgggatgcgccagggaacagcctgcgcccccctccctcctctccgcccgctggccgggccaactccggcttctgccgcgcgtgcctggctcggagctccgctgcggaaaacccgagcgcgggcggctccccgcctcgccgcccgggaaaatccgggggtggccgccagggatctccaagcggcctgggctgggcggccggagcttccctcccggatttgcgccccgaacctggcgccctgaagctagaggcccgtcggtccagtccttgcctcccatcttctctccgcagagcgcccagacgacggcgagatgacggccgggagccccgaagaatgcggggaggtgcggaggagccccgagggccgcgtctctcgcttgggccgccgcctgggccgccgccggcgcccgcgctccccgcccgagcctctgcgggtgcgggcgcggctgcggctgcgctcgccgtcgggggcgttcgcggcgctgggggcgctcgtggtactggtgggtatgggcattgcagtggccggctactggccgcaccgggccggggccccagggtcccgggccgccaatgccagctcgccccagatgagcgagctgcgacgcgagggtcgcggcgggggccgggctcacggcccgcacgagcggctgcggctcctcgggccggtgatcatgggcgtcggcctgttcgtgttcatctgcgccaacacactgctgtatgagaaccgagacttggagacgcgacggctccgccagggggtgctgcgggcccaggcgctccggccccccgacggcccgggctgggactgcgccctccttcccagccccggccctaggagtccccgagccgtaggctgcgcagagccagaaatctgggacccgtccccgcgtcggggtacttcacccgtcccgtcagtgcggagtctgcgttcagagcccgctaatcctcgcttggggttacctgccttgctcaacagctacccgctgaagggccccgggctgcccccaccctggggtccacggacgcagactggccatgtgatcatcaccgtgcagccgtctggctcctgcattgaacattccaagtctctggatctgggccttggggagctcctccttggggccccagcagctcgggactgtgctcaccgaagctggccacggctggaccgcctcagtcttgggggctatgccaaattgggaggaggaggggacttgggggcccgggtctgaagagaggggagacagcctgctctgaggctgcagcatggaccatgctaataggaccaaaggaccaggagtcccaacgtctaatagatgtttcagtcacatcccaggctggggatggatgctctgaccacagcagctgtgaagggcatcctgacctgcatgcgggcagagaaatgccagctgcaccagggctcagtgagctggagagggtgcgtttcactgtggggtgtggaggactcgcctcaggaatttcttcagcctctgtaagtggccttagccctaacagggctggaggtccaggccagggtgactgggagatgtacccagtgtcttggcaaacccaagaaagtggtgggcaagggcccctaagactgggaggtaggttgggatgttacaggctggggcaggctccctccaaggcggcactggtgatggagtgtggggcctctgggaagatggaccacgggatgagactctccactgccatctgggacggggactgagccttgaactcctaccacctcaatccctttcttccctcagccatctggggtatatccctctagagctacactactgccaatgccttcatactgagttctgggcccctctgcaaataagtctgagaagccccttctctccttcctttatcgtggcctatgctgcagaatctcactgcagctggcaaaaggcattggccagctctcagaaatccctttactcaacgttgaagctgcattttggtcaatgtgggtaacttactttagaaaatgacttgagtttaggtctcccccacccatatttaatttttcccaagttgctggtagaagagaaatttaaaagtggatcaatcctcacagagagagttctttttgttgttgtttattgaaaaaaatgcaatacaagaagcaagaccaaacagatatctaaacactacaaccacttctactacgaaaggccaaaacagcagacttgattgtgacatcaggtgacctagtaatcagctgtgtattctagctggtgcctctaccagcttcccatgtgaccttgaacatgtcattgaatgctcgctaggcctctgtttctttatctgtgaaatgggcttgatattcctcctctaccccaaccgatagtgcagaatgaaaagtaactgaaagtccttcctccagggcaccatagtgtctgggtgaaaagtagaatataaactcggtagacttctggtcccttcattggtcatggaatggaccagtgcttgcttcattgagcaacagttctgttgttcagaattcctggatttcacctcacttctgctctccctgcaggtgaatgtgatgttcatgcttgccattcttctgacattcttccacccctttctggtatatcgggaatgccgtacttggaaagaaagtccctctgcaattgcatagttcagaagccctcacttttcagccccgaggatggttttgttcatcttccaccacctttgaggacctcgtgtcccaaaagactttgcctatcccagcaaaacacacacacacacacacacacacacacaataaagacacacaaggacgtctgcgcagcaagaaaagaatctcagttgccaagcagattgatatcacacagactcaaagcaaaggcatgtggaacttctatatttcaaaacagaagtgtctccttgcacttagccttggcagacccttgactccaggggagatgacctgggggaggaagtgtgtcaactatttctttaggcctgtttggctccgaagcctatatgtgcctggatcctctgccacgggttaaattttcaggtgaagagtgaggttgtcatggcctcagctatgcttcctggctctccctcaagagtgcagccttggctagagaactcacagctctgggaaaaagaggagcagacagggttccctgggcccagtctcagcccagccactgatgctggatgaccttggcctgaccctggtctggtctcagaatcacttttcccatctgtaaaattgagatgaattttggtgttgaaagttcttcctggagcagatgtcctagaaggttttaggaatagtgacagagtcaggccaccccaagggccatgggagccagctgacctgcttgaccgaaggatttctgacagactatctttggggatgttttcaagaagggatataagttatttactttgggcatttaaaagaaaatttctctcgggaataattttatagaaaaataaagcttctgtgtctaaggc

SEQ ID NO: 277179 - DNA, 501 bp, Homo sapiens
aagttaccacttcccaacttatcctatgagagtcaccacagccaccctccattgcagagaattgccccacacatctgctgcgcacccatggactcgtgacgatgactgaggttttgtggaagacgttgacccgcacaacaggtccatacttcttagccctggaaaccaaagtgacccgaaggaaactgtcaaccacctgaggtatgaccatcaccaaccccgcccagctgagaaaccgatgtttcccgtcccagaaggtgctcaatgcatgctaccaaaagagtgctgtcctggggcccaggagccctgggggcaaggctctgccctgttgctcacttgccgagtcatgtcccccagcaggcctcagtttccacagccatggaatagggttggaaacactccttctttgattgtcccaaaaggttgtcctgggaatcaaatgattcgcatctttgaaagtactttgaaaaatgtaaaaaagtgacacaccaaacaatgact

SEQ ID NO: 277180 - DNA, 631 bp, Homo sapiens
gagactaggaaggcggagggaggctgctattggcagggcctcagtggagacctcccggggtcccgggacgcagacggacgggcctgaatcgctcgccttggtgaaatgggatccagcgctgccaactgcggcaactgcggttaaaggagacgaccccgtgcagcaggaggaggttatttagaataaggaagaatgcgccgggctcattggtcgctacaggggcataaattttttctaggattccagagtatggctgctccagtcccagattcggctcgacttacagacctcagcgcaggacgtggacgccctgcaaaggaggacatttcagcggacggcagagaatacagatttatgccagcgccctgcggaaggagcctctggcgggtcatctccatttatgggagatcgcagagcggttccctctcaggatcttcaccttcaggattactgccattgactgctgaaacaaagagagaatttaacaacttctgagagatatcacaacaccaggcaggaaaaaacaagtcaggtttcttatgccacagccaccttgaacgtcaatctggggagtggcggatactgccgtcgcactccttttccatacttattgagggtgggatacataact

SEQ ID NO: 277181 - DNA, 784 bp, Homo sapiens
aggttaatgatgagatcataagaatagggccttaatccaatccaggactggtgtccttataagaagaccagagaacttgctctctttctctctctctccatgtgaacaaagaaaagaacatgtgaagacacagcgagaaggcggctgactgcaagccaggaagacagccctcaccagaaaccaaattttggggtaccttgatcttggacttccagcttccagaactgtgagaaaataaatttctgttgcttaagccacccagtcggtggtattttgttatgacagcccatgagaatgcatcatatctcaatgatatcttgggtaggtgtgacaattatgcagtttcttcaggtaaaatttataaacagcccattgccacagattttgggacattacagcaacaaaaacaacaaataataaatcaaacttagaataaagactagaatgaaataagacagaagaaaatatcagaagtgaaatttcactaaataaagggctcacagaaaagaaatttaatcagcaaaatatggtcatcactctttagagatgtctaaaaattagttgtgagactttcttcaactaaattggaggaagggcaatttctccccaattccacattgtgtcagcatgctactcctaatatgttttctttggaaaatgaatgcaagaccacaatatgaatacactgagctccatccatccattcattcatccatccatccatccaaccataccatccatccatccaaccatcatcaatccatctctcattcattcactcagt

SEQ ID NO: 277182 - DNA, 337 bp, Homo sapiens
aggttaatgatgagatcataagaatagggccttaatccaatccaggactggtgtccttataagaagaccagagaacttgctctctttctctctctctccatgtgaacaaagaaaagaacatgtgaagacacagcgagaaggcggctgactgcaagccaggaagacagccctcaccagaaaccaaattttggggtaccttgatcttggacttccagcttccagaactgtgagaaaataaatttctgttgcttaagccacccagtcggtggtattttgtcacacctacccaagatatcattgagatatgatgcattctcatgggctgtcataacaaaat

SEQ ID NO: 277183 - DNA, 2140 bp, Homo sapiens
ggatccctgcgggttcgcgagggtgggacgggaacgcgggctggaagtcgggccgagggaaaagtctgaagacgcttatgtccaaggggatcctgcaggtgcatcctccgatctgcgactgcccgggctgccgaatatcctccccggtgaaccgggggcggctggcagacaagaggacagtcgccctgcctgccgcccggaacctgaagaaggagcgaactcccgagcttctcggccccgccgacccgtgacaggacgggagtggccccacctgtgggcggctggccaggcttgaagcaggaggatggtccgcacatccgtatcatgaagagaagagtccacacccactgggacgtgaacatctctttccgagaggcgtcctgcagccaggacggcaaccttcccaccctcatatccagcgtccaccgcagccgccacctcgttatgcccgagcatcagagccgctgtgaattccagagaggcagcctggagattggcctgcgacccgccggtgacctgttgggcaagaggctgggccgctccccccgtatcagcagcgactgcttttcagagaagagggcacgaagcgaatcgcctcaagaggcgctgctgctgccgcgggagctggggcccagcatggccccggaggaccattaccgccggcttgtgtcagcactgagcgaggccagcacctttgaggaccctcagcgcctctaccacctgggcctccccagccacgatctcctgagggtccggcaggaggtggcggctgcagctctgaggggccccagtggcctggaagcccacctgccctcctccacggcaggtcagcgtcggaagcagggcctggctcagcaccgggagggcgccgccccagctgccgccccgtccttctcggagagggagctgcctcagccgccccccttgctgtcgccgcagaatgcccctcacgtcgccctgggcccccatctcaggccccccttcctgggggtgccctcggctctgtgccagaccccaggctacggcttcctgccccccgcgcaggcggagatgttcgcccggcagcaggagctcctgcggaagcagaacctggcccggctggagctgcccgccgactcctgcggcagaaggagctggagagcgcgcgcccacagctgctggccccgagaccgccctggccccaacgacggcccgaggagctgcagcgtccgcgggccctgctggtgctgaaccacggcgcgggcactgctggccctgccccccaggcccccgggctccggactcccgaacccgttccggacctctgcccgtcgagccccccggaaggggggtccgggccctgcctcagcgcggcccagcgagtccaaggagatgacgggggctaggctctgggcacaagatggctcggaagacgagccccccaaagactcggacggagaggaccccgagacggcagctgttgggtgcagggggcccactccgggccaagctccagctggaggggccggcgccgaggggaaggggcttttcccagggtccacactgcccctgggcttcccttatgccgtcagcccctacttccacacaggcgcggtagggggactctccatggatggggaggaggccccagcccctgaggacgtcaccaagtggaccgtggatgacgtctgcagcttcgtggggggcctgtctggctgtggagagtacactcgggtcttcagggagcaggggatcgacggggagaccctgccactgctgacggaggagcacctgctgaccaacatggggctgaagctggggcccgccctcaagatccgggcccaggctctgcaggtggccaggcgcctgggccgagttttctacgtggccagcttccccgtggctctgccactgcagccaccaaccctgcgggccccggagcgagaactcggcacaggagagcagcccttgtcccccacgacggccacgtgcccctatggagggggccacgcccttgccggtcaaacttcacccaagcaggagaatgggaccttggctctacttccaggggcccccgacccttcccagctctgtgtcgaggttgccgggggtagggtggggcacacaaatctccaggagccacactcaacacaatggccct

SEQ ID NO: 277184 - DNA, 2188 bp, Homo sapiens
ggatccctgcgggttcgcgagggtgggacgggaacgcgggctggaagtcgggccgagggaaaagtctgaagacgcttatgtccaaggggatcctgcaggtgcatcctccgatctgcgactgcccgggctgccgaatatcctccccggtgaaccgggggcggctggcagacaagaggacagtcgccctgcctgccgcccggaacctgaagaaggagcgaactcccgagcttctcggccccgccgacccgtgacaggacgggagtggccccacctgtgggcggctggccaggcttgaagcaggaggatggtccgcacatccgtatcatgaagagaagagtccacacccactgggacgtgaacatctctttccgagaggcgtcctgcagccaggacggcaaccttcccaccctcatatccagcgtccaccgcagccgccacctcgttatgcccgagcatcagagccgctgtgaattccagagaggcagcctggagattggcctgcgacccgccggtgacctgttgggcaagaggctgggccgctccccccgtatcagcagcgactgcttttcagagaagagggcacgaagcgaatcgcctcaagaggcgctgctgctgccgcgggagctggggcccagcatggccccggaggaccattaccgccggcttgtgtcagcactgagcgaggccagcacctttgaggaccctcagcgcctctaccacctgggcctccccagccacggtgaggacccaccctggcatgatccccctcatcacctccccagccacgatctcctgagggtccggcaggaggtggcggctgcagctctgaggggccccagtggcctggaagcccacctgccctcctccacggcaggtcagcgtcggaagcagggcctggctcagcaccgggagggcgccgccccagctgccgccccgtccttctcggagagggagctgcctcagccgccccccttgctgtcgccgcagaatgcccctcacgtcgccctgggcccccatctcaggccccccttcctgggggtgccctcggctctgtgccagaccccaggctacggcttcctgccccccgcgcaggcggagatgttcgcccggcagcaggagctcctgcggaagcagaacctggcccggctggagctgcccgccgactcctgcggcagaaggagctggagagcgcgcgcccacagctgctggccccgagaccgccctggccccaacgacggcccgaggagctgcagcgtccgcgggccctgctggtgctgaaccacggcgcgggcactgctggccctgccccccaggcccccgggctccggactcccgaacccgttccggacctctgcccgtcgagccccccggaaggggggtccgggccctgcctcagcgcggcccagcgagtccaaggagatgacgggggctaggctctgggcacaagatggctcggaagacgagccccccaaagactcggacggagaggaccccgagacggcagctgttgggtgcagggggcccactccgggccaagctccagctggaggggccggcgccgaggggaaggggcttttcccagggtccacactgcccctgggcttcccttatgccgtcagcccctacttccacacaggcgcggtagggggactctccatggatggggaggaggccccagcccctgaggacgtcaccaagtggaccgtggatgacgtctgcagcttcgtggggggcctgtctggctgtggagagtacactcgggtcttcagggagcaggggatcgacggggagaccctgccactgctgacggaggagcacctgctgaccaacatggggctgaagctggggcccgccctcaagatccgggcccaggctctgcaggtggccaggcgcctgggccgagttttctacgtggccagcttccccgtggctctgccactgcagccaccaaccctgcgggccccggagcgagaactcggcacaggagagcagcccttgtcccccacgacggccacgtgcccctatggagggggccacgcccttgccggtcaaacttcacccaagcaggagaatgggaccttggctctacttccaggggcccccgacccttcccagctctgtgtcgaggttgccgggggtagggtggggcacacaaatctccaggagccacactcaacacaatggccct

SEQ ID NO: 277185 - DNA, 1665 bp, Homo sapiens
  misc_feature (18)..(18): n is a, c, g, or t
  misc_feature (40)..(40): n is a, c, g, or t
  misc_feature (43)..(44): n is a, c, g, or t
  misc_feature (55)..(55): n is a, c, g, or t
aaggcatgagattgtcanacgaaaagcccgccgccgtttnatnntcgtagcgccnataacttacggcgttagtacgagctgggtgggaatcggccgaggagctggggcccagcatggccccggaggaccattaccgccggcttgtgtcagcactgagcgaggccagcacctttgaggaccctcagcgcctctaccacctgggcctccccagccacggtgaggacccaccctggcatgatccccctcatcacctccccagccacgatctcctgagggtccggcaggaggtggcggctgcagctctgaggggccccagtggcctggaagcccacctgccctcctccacggcaggtcagcgtcggaagcagggcctggctcagcaccgggagggcgccgccccagctgccgccccgtccttctcggagagggagctgcctcagccgccccccttgctgtcgccgcagaatgcccctcacgtcgccctgggcccccatctcaggccccccttcctgggggtgccctcggctctgtgccagaccccaggctacggcttcctgccccccgcgcaggcggagatgttcgcccggcagcaggagctcctgcggaagcagaacctggcccggctggagctgcccgccgactcctgcggcagaaggagctggagagcgcgcgcccacagctgctggccccgagaccgccctggccccaacgacggcccgaggagctgcagcgtccgcgggccctgctggtgctgaaccacggcgcgggcactgctggccctgccccccaggcccccgggctccggactcccgaacccgttccggacctctgcccgtcgagccccccggaaggggggtccgggccctgcctcagcgcggcccagcgagtccaaggagatgacgggggctaggctctgggcacaagatggctcggaagacgagccccccaaagactcggacggagaggaccccgagacggcagctgttgggtgcagggggcccactccgggccaagctccagctggaggggccggcgccgaggggaaggggcttttcccagggtccacactgcccctgggcttcccttatgccgtcagcccctacttccacacaggcgcggtagggggactctccatggatggggaggaggccccagcccctgaggacgtcaccaagtggaccgtggatgacgtctgcagcttcgtggggggcctgtctggctgtggagagtacactcgggtcttcagggagcaggggatcgacggggagaccctgccactgctgacggaggagcacctgctgaccaacatggggctgaagctggggcccgccctcaagatccgggcccaggctctgcaggtggccaggcgcctgggccgagttttctacgtggccagcttccccgtggctctgccactgcagccaccaaccctgcgggccccggagcgagaactcggcacaggagagcagcccttgtcccccacgacggccacgtgcccctatggagggggccacgcccttgccggtcaaacttcacccaagcaggagaatgggaccttggctctacttccaggggcccccgacccttcccagctctgtgtcgaggttgccgggggtagggtggggcacacaaatctccaggagccacactcaacacaatggccct

SEQ ID NO: 277186 - DNA, 1526 bp, Homo sapiens
gcgtaacccggccgctagcgcgggggcgctgggccccgctgggatcgatgcgggcggcctggccggctgggctctgcgggctggcacccggcccggggcgggacccacctccgctttcggccacgatctcctgagggtccggcaggaggtggcggctgcagctctgaggggccccagtggcctggaagcccacctgccctcctccacggcaggtcagcgtcggaagcagggcctggctcagcaccgggagggcgccgccccagctgccgccccgtccttctcggagagggagctgcctcagccgccccccttgctgtcgccgcagaatgcccctcacgtcgccctgggcccccatctcaggccccccttcctgggggtgccctcggctctgtgccagaccccaggctacggcttcctgccccccgcgcaggcggagatgttcgcccggcagcaggagctcctgcggaagcagaacctggcccggctggagctgcccgccgactcctgcggcagaaggagctggagagcgcgcgcccacagctgctggccccgagaccgccctggccccaacgacggcccgaggagctgcagcgtccgcgggccctgctggtgctgaaccacggcgcgggcactgctggccctgccccccaggcccccgggctccggactcccgaacccgttccggacctctgcccgtcgagccccccggaaggggggtccgggccctgcctcagcgcggcccagcgagtccaaggagatgacgggggctaggctctgggcacaagatggctcggaagacgagccccccaaagactcggacggagaggaccccgagacggcagctgttgggtgcagggggcccactccgggccaagctccagctggaggggccggcgccgaggggaaggggcttttcccagggtccacactgcccctgggcttcccttatgccgtcagcccctacttccacacaggcgcggtagggggactctccatggatggggaggaggccccagcccctgaggacgtcaccaagtggaccgtggatgacgtctgcagcttcgtggggggcctgtctggctgtggagagtacactcgggtcttcagggagcaggggatcgacggggagaccctgccactgctgacggaggagcacctgctgaccaacatggggctgaagctggggcccgccctcaagatccgggcccaggctctgcaggtggccaggcgcctgggccgagttttctacgtggccagcttccccgtggctctgccactgcagccaccaaccctgcgggccccggagcgagaactcggcacaggagagcagcccttgtcccccacgacggccacgtgcccctatggagggggccacgcccttgccggtcaaacttcacccaagcaggagaatgggaccttggctctacttccaggggcccccgacccttcccagctctgtgtcgaggttgccgggggtagggtggggcacacaaatctccaggagccacactcaacacaatggccct

SEQ ID NO: 277187 - DNA, 1614 bp, Homo sapiens
ggatccctgcgggttcgcgagggtgggacgggaacgcgggctggaagtcgggccgagggaaaagtctgaagacgcttatgtccaaggggatcctgcaggtgcatcctccgatctgcgactgcccgggctgccgaatatcctccccggtgaaccgggggcggctggcagacaagaggacagtcgccctgcctgccgcccggaacctgaagaaggagcgaactcccgagcttctcggccccgccgacccgtgacaggacgggagtggccccacctgtgggcggctggccaggcttgaagcaggaggatggtccgcacatccgtatcatgaagagaagagtccacacccactgggacgtgaacatctctttccgagaggcgtcctgcagccaggacggcaaccttcccaccctcatatccagcgtccaccgcagccgccacctcgttatgcccgagcatcagagccgctgtgaattccagagaggcagcctggagattggcctgcgacccgccggtgacctgttgggcaagaggctgggccgctccccccgtatcagcagcgactgcttttcagagaagagggcacgaagcgaatcgcctcaagaggcgctgctgctgccgcgggagctggggcccagcatggccccggaggaccattaccgccggcttgtgtcagcactgagcgaggccagcacctttgaggaccctcagcgcctctaccacctgggcctccccagccacgatctcctgagggtccggcaggaggtggcggctgcagctctgaggggccccagtggcctggaagcccacctgccctcctccacggcaggtcagcgtcggaagcagggcctggctcagcaccgggagggcgccgccccagctgccgccccgtccttctcggagagggagctgcctcagccgccccccttgctgtcgccgcagaatgcccctccactccgggccaagctccagctggaggggccggcgccgaggggaaggggcttttcccagggtccacactgcccctgggcttcccttatgccgtcagcccctacttccacacaggcgcggtagggggactctccatggatggggaggaggccccagcccctgaggacgtcaccaagtggaccgtggatgacgtctgcagcttcgtggggggcctgtctggctgtggagagtacactcgggtcttcagggagcaggggatcgacggggagaccctgccactgctgacggaggagcacctgctgaccaacatggggctgaagctggggcccgccctcaagatccgggcccaggctctgcaggtggccaggcgcctgggccgagttttctacgtggccagcttccccgtggctctgccactgcagccaccaaccctgcgggccccggagcgagaactcggcacaggagagcagcccttgtcccccacgacggccacgtgcccctatggagggggccacgcccttgccggtcaaacttcacccaagcaggagaatgggaccttggctctacttccaggggcccccgacccttcccagctctgtgtcgaggttgccgggggtagggtggggcacacaaatctccaggagccacactcaacacaatggccct

SEQ ID NO: 277188 - DNA, 988 bp, Homo sapiens
tacatgtgggcttttaaaaactccatcctttataaatagtcaaggtttgggccacacaaagtatatttttatcatggaaaaatttcaactcctcaagccgtaatgttgaacagaattggagtattttctttataatttcttgaacaggcaaatgaaagcttattatagaatgcatgtattttcttttattttttaatacaatagctgccgtccaaggagatgacgggggctaggctctgggcacaagatggctcggaagacgagccccccaaagactcggacggagaggaccccgagacggcagctgttgggtgcagggggcccactccgggccaagctccagctggaggggccggcgccgaggggaaggggcttttcccagggtccacactgcccctgggcttcccttatgccgtcagcccctacttccacacaggcgcggtagggggactctccatggatggggaggaggccccagcccctgaggacgtcaccaagtggaccgtggatgacgtctgcagcttcgtggggggcctgtctggctgtggagagtacactcgggtcttcagggagcaggggatcgacggggagaccctgccactgctgacggaggagcacctgctgaccaacatggggctgaagctggggcccgccctcaagatccgggcccaggctctgcaggtggccaggcgcctgggccgagttttctacgtggccagcttccccgtggctctgccactgcagccaccaaccctgcgggccccggagcgagaactcggcacaggagagcagcccttgtcccccacgacggccacgtgcccctatggagggggccacgcccttgccggtcaaacttcacccaagcaggagaatgggaccttggctctacttccaggggcccccgacccttcccagctctgtgtcgaggttgccgggggtagggtggggcacacaaatctccaggagccacactcaacacaatggccct

SEQ ID NO: 277189 - DNA, 250 bp, Homo sapiens
ttctgcctgacactcaaacccaacagatcactgtttttaaaaaatttccgtgagctgcacaaacagctcctcttggctctgctgggctggaggatggagcagcacccgggtcctgaccctccctccctcccccttccaggtcttcagggagcaggggatcgacggggagaccctgccactgctgacggaggagcacctgctgaccaacatggggctgaagctggggcccgccctcaagatccgggcccag

SEQ ID NO: 277190 - DNA, 1376 bp, Homo sapiens
accgcagttgtgccccgccgaccatgcgccgcctcccgcgggccctgctgctgcagctgcgcctcgccctgctggtggccgcgggggccccggaggtgctggtcagcgcgccgcggagcctggtgtgggggcccgggctgcaggcggccgtcgtcctgccggtccgctatttctacctgcaggcggtcaactcggagggccagaacctcactcgctctcccgcaggtgaaacaccattcaaagtcgtagtcaaatctctttcacctaaagagttggtccggatacatgtccctaaacctttggacaggaatgatggaacatttttgatgagatataggatgtatgaaactgtcgatgaaggcctgaagatagaggtcctttatggtgatgaacatgtggctcagtctccctatattttgaaaggaccagtgtaccatgagtactgtgagtgtccggaagatcctcaggcctggcagaagactctttcttgtccaaccaaggaaccacagattgcaaaagattttgcttcctttcccagcatcaatctccagcaaatgctaaaagaagtccccaaaaggtttggggatgagagaggtgccattgttcattacacgattctcaataaccatgtttaccggagatctttagggaaatacacagacttcaagatgttctctgatgagattttgttatcattgacaagaaaggtccttctcccagatttagaattttatgttaatcttggagattggcccttggagcatcgaaaagtcaatggaacccctagccccatacctatcatttcatggtgtggctctctggattcaagagatgttgtccttccaacgtatgacatcacccactccatgcttgaagccatgcggggtgttacaaatgatctcctctctattcagggaaatacagggccttcctggatcaataaaacagagagagctttcttcagaggtagagacagccgagaggagaggctccagttggtacagctgtccaaagaaaatcctcagctactagatgcaggaattacaggatatttctttttccaagagaaagaaaaggagcttggaaaagccaagttgatgggtttctttgatttctttaagtacaagtatcaagtaaatgtggatgggaccgtggctgcttacagatatccatatctcatgctgggcgacagtctggttttaaagcaggactcgccatattatgaacatttctacatggcactagaaccttggaagcattatgttccaattaaaagaaatctgagtgatttattagagaaagttaaatgggctaaggaaaatgatgaagaagccaagaagattgcaaaagaaggacagttgatggctagggaccta

SEQ ID NO: 277191 - DNA, 243 bp, Homo sapiens
tgacatgatacgactcgagctcggtaccatatatatccatatctcatgctgggcgacagtctggttttaaagcaggactcgccatattatgaacatttctacatggcactagaaccttggaagcattatgttccaattaaaagaaatctgagtgatttattagagaaagttaaatgggctaaggaaaatgatgaagaagccaagaagattgcaaaagaaggacagttgatggctagggaccta

SEQ ID NO: 277192 - DNA, 397 bp, Homo sapiens
gcacgagctcactgacattctactccaagtcggagatgcacatccactccaagtcacacaccgagaccaagccccacaagtgcccacattgctccaagaccttcgccaacagctcctacctggcccagcacatccgtatacactcaggggctaagccctacagttgtaactttgtgggaggctttgtgttatctgtgaaactccaaaacaggggtgttgcggagaagggagagttcaaggcaaacgcaaggactggacttagctccctaggtgccacagtcagatgccggacacggatttatatataaatatatatatataaatatattatacccactcatcacggccatctttgttgtaaccatttctgtgtttataaatgcattatctctgagaa

SEQ ID NO: 277193 - DNA, 1295 bp, Homo sapiens
agtagcccaggccgaggctcaagctcaagcccaggctcaggctcaggctcaagcccaggcccaggcccaggcctcccaggcatcacagcagcagcagcagcagcagcagcagcagcagcagcagcagcaacagccaccaccacacttccagtctcctggggcagccccccagggtgggggtggtggggacagcaatcccaaccctccaccccagtgttcctttgacctgaccccgtataagacggcggagcatcataaggacatctgcctcactgtcaccaccagcaccatccaggtggagcacctggccagctcttagagatccgtgctgccacccactgggaagaggaagaagtagtcctggtgtcttctttctccaactcttggtgggaaaagtccttttcttccttgacaggccttggctccatctccttgggcctctgtcacggctttccttcacaggataccatcctttttctgaactcttcttcaaaaggaacatcagccctcctgattgcaaaggaatactgagctgatggtgtcatccagcagcctcccctcccaagcaaagcttctaaaactgggggtcggtgctcaagggaaggatttgctatgacctcatagaaccttgtccagtgtggccacttaccctatccttaccctccttatcctcaaagtttgggctgatgtaagactagaggctggccctcccagataacagagaaaagggagccccaaatgcaaccagcctcttgttctattcttgcctgcaaaagaacagaggtttctcaaatgcctcagtccctgagagccatttcttcccctacatcgtctcactttgcttcctattgactgctggtagaaggagatttggggtaggggctagacctccttttatttgaagggggcaagggctgagatgtggtccccaaggggccagaaattcccaagttggtcacaggtggcttagaagtgtgtgttatggttttacggatttccttgaagcctctctccttctctgcctacaaagaccctatactctcagtctccccaacccacccccaaggagctgtgggaggctttgtgttatctgtgaaactccaaaacaggggtgttgcggagaagggagagttcaaggcaaacgcaaggactggacttagctccctaggtgccacagtcagatgccggacacggatttatatataaatatatatatataaatatattatacccactcatcacggccatctttgttgtaaccatttctgtgtttataaatgcattatctctgagaa

SEQ ID NO: 277194 - DNA, 957 bp, Homo sapiens
gtgaaggaaagccgtgacagaggcccaaggagatggagccaaggcctgtcaaggaagaaaaggacttttcccaccaagacttggctccatctccttgggcctctgtcacggctttccttcacaggataccatcctttttctgaactcttcttcaaaaggaacatcagccctcctgattgcaaaggaatactgagctgatggtgtcatccagcagcctcccctcccaagcaaagcttctaaaactgggggtcggtgctcaagggaaggatttgctatgacctcatagaaccttgtccagtgtggccacttaccctatccttaccctccttatcctcaaagtttgggctgatgtaagactagaggctggccctcccagataacagagaaaagggagccccaaatgcaaccagcctcttgttctattcttgcctgcaaaagaacagaggtttctcaaatgcctcagtccctgagagccatttcttcccctacatcgtctcactttgcttcctattgactgctggtagaaggagatttggggtaggggctagacctccttttatttgaagggggcaagggctgagatgtggtccccaaggggccagaaattcccaagttggtcacaggtggcttagaagtgtgtgttatggttttacggatttccttgaagcctctctccttctctgcctacaaagaccctatactctcagtctccccaacccacccccaaggagctgtgggaggctttgtgttatctgtgaaactccaaaacaggggtgttgcggagaagggagagttcaaggcaaacgcaaggactggacttagctccctaggtgccacagtcagatgccggacacggatttatatataaatatatatatataaatatattatacccactcatcacggccatctttgttgtaaccatttctgtgtttataaatgcattatctctgagaa

SEQ ID NO: 277195 - DNA, 1242 bp, Homo sapiens
agtagcccaggccgaggctcaagctcaagcccaggctcaggctcaggctcaagcccaggcccaggcccaggcctcccaggcatcacagcagcagcagcagcagcagcagcagcagcagcagcagcagcaacagccaccaccacacttccagtctcctggggcagccccccagggtgggggtggtggggacagcaatcccaaccctccaccccagtgttcctttgacctgaccccgtataagacggcggagcatcataaggacatctgcctcactgtcaccaccagcaccatccaggtggagcacctggccagctcttagagatccgtgctgccacccactgggaagaggaagaagtagtcctggtgtcttctttctccaactcttggtgggaaaagtccttttcttccttgacaggccttggctccatctccttgggcctctgtcacggctttccttcacaggataccatcctttttctgaactcttcttcaaaaggaacatcagccctcctgattgcaaaggaatactgagctgatggtgtcatccagcagcctcccctcccaagcaaagcttcttgtccagtgtggccacttaccctatccttaccctccttatcctcaaagtttgggctgatgtaagactagaggctggccctcccagataacagagaaaagggagccccaaatgcaaccagcctcttgttctattcttgcctgcaaaagaacagaggtttctcaaatgcctcagtccctgagagccatttcttcccctacatcgtctcactttgcttcctattgactgctggtagaaggagatttggggtaggggctagacctccttttatttgaagggggcaagggctgagatgtggtccccaaggggccagaaattcccaagttggtcacaggtggcttagaagtgtgtgttatggttttacggatttccttgaagcctctctccttctctgcctacaaagaccctatactctcagtctccccaacccacccccaaggagctgtgggaggctttgtgttatctgtgaaactccaaaacaggggtgttgcggagaagggagagttcaaggcaaacgcaaggactggacttagctccctaggtgccacagtcagatgccggacacggatttatatataaatatatatatataaatatattatacccactcatcacggccatctttgttgtaaccatttctgtgtttataaatgcattatctctgagaa

SEQ ID NO: 277196 - DNA, 1247 bp, Homo sapiens
agtagcccaggccgaggctcaagctcaagcccaggctcaggctcaggctcaagcccaggcccaggcccaggcctcccaggcatcacagcagcagcagcagcagcagcagcagcagcagcagcagcagcaacagccaccaccacacttccagtctcctggggcagccccccagggtgggggtggtggggacagcaatcccaaccctccaccccagtgttcctttgacctgaccccgtataagacggcggagcatcataaggacatctgcctcactgtcaccaccagcaccatccaggtggagcacctggccagctcttagagatccgtgctgccacccactgggaagaggaagaagtagtcctggtgtcttctttctccaactcttggtgggaaaagtccttttcttccttgacaggccttggctccatctccttgggcctctgtcacggctttccttcacaggataccatcctttttctgaactcttcttcaaaaggaacatcagccctcctgattgcaaaggaatactgagctgatggtgtcatccagcagcctcccctcccaagcaaagcttctaaaactgggggtcggtgctcaagggaaggatttgctatgacctcatagaaccttgtccagtgtggccacttaccctatccttaccctccttatcctcaaagtttgggctgatgtaagactagaggctggccctcccagataacagagaaaagggagccccaaatgcaaccagcctcttgttctattcttgcctgcaaaagaacagaggtttctcaaatgcctcagtccctgagagccatttcttcccctacatcgtctcactttgcttcctattgactgctggtagaaggagatttggggtaggggctagacctccttttatttgaagggggcaagggctgagatgtggtccccaaggggccagaaattcccaagttggtcacaggtggcttagaagtgtgtgttatggttttacggatttccttgaagcctctctccttctctgcctacaaagaccctatactctcagtctccccaacccacccccaaggagctgtgggaggctttgtgttatctgtgaaactccaaaacaggggtgttgcggagaagggagagttcaaggcaaacgcaaggactggacttagctccctaggtgccacagtcagatgccggacacggatttatatataaatatatatatataaatatattatacccactcatcacggcca

SEQ ID NO: 277197 - DNA, 1415 bp, Homo sapiens
agtagcccaggccgaggctcaagctcaagcccaggctcaggctcaggctcaagcccaggcccaggcccaggcctcccaggcatcacagcagcagcagcagcagcagcagcagcagcagcagcagcagcaacagccaccaccacacttccagtctcctggggcagccccccagggtgggggtggtggggacagcaatcccaaccctccaccccagtgttcctttgacctgaccccgtataagacggcggagcatcataaggacatctgcctcactgtcaccaccagcaccatccaggtggagcacctggccagctcttagagatccgtgctgccacccactgggaagaggaagaagtagtcctggtgtcttctttctccaactcttggtgggaaaagtccttttcttccttgacaggccttggctccatctccttgggcctctgtcacggctttccttcacaggataccatcctttttctgaactcttcttcaaaaggaacatcagccctcctgattgcaaaggaatactgagctgatggtgtcatccagcagcctcccctcccaagcaaagcttctaaaactgggggtcggtgctcaagggaaggatttgctatgacctcatagaaccttgtccagtgtggccacttaccctatccttaccctccttatcctcaaagtttgggctgatgtaagactagaggctggccctcccagataacagagaaaagggagccccaaatgcaaccagcctcttgttctattcttgcctgcaaaagaacagaggtttctcaaatgcctcagtccctgagagccatttcttcccctacatcgtctcactttgcttcctattgactgctggtagaaggagatttggggtaggggctagacctccttttatttgaagggggcaagggctgagatgtggtccccaaggggccagaaattcccaagttggtcacaggtggcttagaagtgtgtgttatggttttacggatttccttgaagcctctctccttctctgcctacaaagaccctatactctcagtctccccaacccacccccaaggagctgtgggaggctttgtgttatctgtgaaactccaaaacaggggtgttgcggagaagggagagttcaaggcaaacgcaaggactggacttagctccctaggtgccacagtcagatgccggacacggatttatatataaatatatatatataaatatattatacccactcatcacggccatctttgttgtaaccatttctgtgtttataaatgcattatctctgagaaaaaaaaaaaaaggccgcggttacaacgccggacctggaaaccttgcgtacccaactaattgcttggagacatcccctttcggcagctggcgaatagcaaagaggcccgcccgatcgtctt

SEQ ID NO: 277198 - DNA, 1114 bp, Homo sapiens
agtagcccaggccgaggctcaagctcaagcccaggctcaggctcaggctcaagcccaggcccaggcccaggcctcccaggcatcacagcagcagcagcagcagcagcagcagcagcagcagcagcagcaacagccaccaccacacttccagtctcctggggcagccccccagggtgggggtggtggggacagcaatcccaaccctccaccccagtgttcctttgacctgaccccgtataagacggcggagcatcataaggacatctgcctcactgtcaccaccagcaccatccaggtggagcacctggccagctcttagagatccgtgctgccacccactgggaagaggaagaagtagtcctggtgtcttctttctccaactcttggtgggaaaagtccttttcttccttgacaggccttggctccatctccttgggcctctgtcacggctttccttcacaggataccatcctttttctgaactcttcttcaaaaggaacatcagccctcctgattgcaaaggaatactgagctgatggtgtcatccagcagcctcccctcccaagcaaagcttctaaaactgggggtcggtgctcaagggaaggatttgctatgacctcatagaaccttgtccagtgtggccacttaccctatccttaccctccttatcctcaaagtttgggctgatgtaagactagaggctggccctcccagataacagagaaaagggagccccaaatgcaaccagcctcttgttctattcttgcctgcaaaagaacagaggtttctcaaatgcctcagtccctgagagccatttcttcccctacatcgtctcactttgcttcctattgactgctggtagaaggagatttggggtaggggctagacctccttttatttgaagggggcaagggctgagatgtggtccccaaggggccagaaattcccaagttggtcacaggtggcttagaagtgtgtgttatggttttacggatttccttgaagcctctctccttctctgcctacaaagaccctatactctcagtctccccaacccacccccaaggagcctccttgcttctactatttaacccccatgatctatttcttcaaa

SEQ ID NO: 277199 - DNA, 1158 bp, Homo sapiens
  misc_feature (16)..(16): n is a, c, g, or t
  misc_feature (23)..(23): n is a, c, g, or t
ccaggctggtacgccncgagtantggatatcgtcgaccaggccgtcgggggacagcaatcccaaccctccaccccagtgttcctttgacctgaccccgtataagacggcggagcatcataaggacatctgcctcactgtcaccaccagcaccatccaggtggagcacctggccagctcttagagatccgtgctgccacccactgggaagaggaagaagtagtcctggtgtcttctttctccaactcttggtgggaaaagtccttttcttccttgacaggccttggctccatctccttgggcctctgtcacggctttccttcacaggataccatcctttttctgaactcttcttcaaaaggaacatcagccctcctgattgcaaaggaatactgagctgatggtgtcatccagcagcctcccctcccaagcaaagcttctaaaactgggggtcggtgctcaagggaaggatttgctatgacctcatagaaccttgtccagtgtggccacttaccctatccttaccctccttatcctcaaagtttgggctgatgtaagactagaggctggccctcccagataacagagaaaagggagccccaaatgcaaccagcctcttgttctattcttgcctgcaaaagaacagaggtttctcaaatgcctcagtccctgagagccatttcttcccctacatcgtctcactttgcttcctattgactgctggtagaaggagatttggggtaggggctagacctccttttatttgaagggggcaagggctgagatgtggtccccaaggggccagaaattcccaagttggtcacaggtggcttagaagtgtgtgttatggttttacggatttccttgaagcctctctccttctctgcctacaaagaccctatactctcagtctccccaacccacccccaaggagctgtgggaggctttgtgttatctgtgaaactccaaaacaggggtgttgcggagaagggagagttcaaggcaaacgcaaggactggacttagctccctaggtgccacagtcagatgccggacacggatttatatataaatatatatatataaatatattatacccactcatcacggccatctttgttgtaaccatttctgtgtttataaatgcattatctctgagaa

SEQ ID NO: 277200 - DNA, 1566 bp, Homo sapiens
agtagcccaggccgaggctcaagctcaagcccaggctcaggctcaggctcaagcccaggcccaggcccaggcctcccaggcatcacagcagcagcagcagcagcagcagcagcagcagcagcagcagcaacagccaccaccacacttccagtctcctggggcagccccccagggtgggggtggtggggacagcaatcccaaccctccaccccagtgttcctttgacctgaccccgtataagacggcggagcatcataaggacatctgcctcactgtcaccaccagcaccatccaggtggagcacctggccagctcttagagatccgtgctgccacccactgggaagaggaagaagtagtcctggtgtcttctttctccaactcttggtgggaaaagtccttttcttccttgacaggccttggctccatctccttgggcctctgtcacggctttccttcacaggataccatcctttttctgaactcttcttcaaaaggaacatcagccctcctgattgcaaaggaatactgagctgatggtgtcatccagcagcctcccctcccaagcaaagcttctaaaactgggggtcggtgctcaagggaaggatttgctatgacctcatagaaccttgtccagtgtggccacttaccctatccttaccctccttatcctcaaagtttgggctgatgtaagactagaggctggccctcccagataacagagaaaagggagccccaaatgcaaccagcctcttgttctattcttgcctgcaaaagaacagaggtttctcaaatgcctcagtccctgagagccatttcttcccctacatcgtctcactttgcttcctattgactgctggtagaaggagatttggggtaggggctagacctccttttatttgaagggggcaagggctgagatgtggtccccaaggggccagaaattcccaagttggtcacaggtggcttagaagtgtgtgttatggttttacggatttccttgaagcctctctccttctctgcctacaaagaccctatactctcagtctccccaacccacccccaaggagctgtgggaggctttgtgttatctgtgaaactccaaaacaggggtgttgcggagaagggagagttcaaggcaaacgcaaggactggacttagctccctaggtgccacagtcagatgccggacacggatttatatataaatatatatatataaatatattatacccactcatcacggccatctttgttgtaaccatttctgtgtttataaatgcattatctctgagaattttcatatttgatgttttgtttatttttgtcctttttttccctctctccacccctgtcctctagccacagcatttttctttttgtcttttttttttttttttaaatcatggcagatttcagaggaaaggaaattaaaaaaaaaatcaggaaaccagttgttataaagtaatttaaaaatgaagaaaaaaagaaaaaaacttatgtacaaaccaaggggtgtttttagaacattgtatagaaataaattcatgtaaaaggatcagaggcag

SEQ ID NO: 277201 - DNA, 780 bp, Homo sapiens
cctcgctttgcttcactcgcgccccttccggcttcccttccttctcactctcttgccgtagctgcgccgccaccggggcctcacgtgacactagactctcccggcacgtgacgtgagaaaggggccgggctggggcgggataagccgcttctcccctccttccggaagcgtaacactgaacgtgcctgcgcaatgggtgtcgggtccgctttttcccaatccggacgtaatcgtggtttttgttctgcaataggcggcttagagggaggggctttttcgcctatacctactgtagcttctccacgtatggaccctaaaggctactgctgctactacggggctagacagttactgtctcagctctaggatgtgcgttcttccactagaagctcttctgagggaggtaaccgcgccccgcgggcaaggaattgcgcctgcgtctgaggggagggtgcgccagtgaagagccctactgcgcatgtgtgactagaagggtagtccctgactgtgaagggaaatctggccccctcctgtcggggaggcgtcctgtaggcgtgcgcccaatggggctgtcagtattggcatttctccccactccccgcaggctctatgcgctattcctacagtacgctgggaggctttgggcaagttacttacccaacctggggtttagtgtcctcagcctatcaaaagagggccttagattcattgatttctacgatctcctccatttcaaacactaactagttcagtaaaactttacagcagtgtttcagatat

SEQ ID NO: 277202 - DNA, 3117 bp, Homo sapiens
cctcgctttgcttcactcgcgccccttccggcttcccttccttctcactctcttgccgtagctgcgccgccaccggggcctcacgtgacactagactctcccggcacgtgacgtgagaaaggggccgggctggggcgggataagccgcttctcccctccttccggaagcgtaacactgaacgtgcctgcgcaatgggtgtcgggtccgctttttcccaatccggacgtaatcgtggtttttgttctgcaataggcggcttagagggaggggctttttcgcctatacctactgtagcttctccacgtatggaccctaaaggctactgctgctactacggggctagacagttactgtctcagctctaggatgtgcgttcttccactagaagctcttctgagggaggtaattaaaaaacagtggaatggaaaaacagtgctgtagtcatcctgtaatatgctccttgtcaacaatgtatacattcctgctaggtgccatattcattgctttaagctcaagtcgcatcttactagtgaagtattctgccaatgaagaaaacaagtatgattatcttccaactactgtgaatgtgtgctcagaactggtgaagctagttttctgtgtgcttgtgtcattctgtgttataaagaaagatcatcaaagtagaaatttgaaatatgcttcctggaaggaattctctgatttcatgaagtggtccattcctgcctttctttatttcctggataacttgattgtcttctatgtcctgtcctatcttcaaccagccatggctgttatcttctcaaattttagcattataacaacagctcttctattcaggatagtgctgaagaggcgtctaaactggatccagtgggcttccctcctgactttatttttgtctattgtggccttgactgccgggactaaaactttacagcacaacttggcaggacgtggatttcatcacgatgcctttttcagcccttccaattcctgccttcttttcagaagtgagtgtcccagaaaagacaattgtacagcaaaggaatggacttttcctgaagctaaatggaacaccacagccagagttttcagtcacatccgtcttggcatgggccatgttcttattatagtccagtgttttatttcttcaatggctaatatctataatgaaaagatactgaaggaagggaaccagctcactgaaagcatcttcatacagaacagcaaactctatttctttggcattctgtttaatgggctgactctgggccttcagaggagtaaccgtgatcagattaagaactgtggatttttttatggccacagtgcattttcagtagcccttatttttgtaactgcattccagggcctttcagtggctttcattctgaagttcctggataacatgttccatgtcttgatggcccaggttaccactgtcattatcacaacagtgtctgtcctggtctttgacttcaggccctccctggaatttttcttggaagccccatcagtccttctctctatatttatttataatgccagcaagcctcaagttccggaatacgcacctaggcaagaaaggatccgagatctaagtggcaatctttgggagcgttccagtggggatggagaagaactagaaagacttaccaaacccaagagtgatgagtcagatgaagatactttctaactggtacccacatagtttgcagctctcttgaaccttattttcacattttcagtgtttgtaatatttatcttttcactttgataaaccagaaatgtttctaaatcctaatattctttgcatatatctagctactccctaaatggttccatccaaggcttagagtacccaaaggctaagaaattctaaagaactgatacaggagtaacaatatgaagaattcattaatatctcagtacttgataaatcagaaagttatatgtgcagattattttccttggccttcaagcttccaaaaaacttgtaataatcatgttagctatagcttgtatatacacatagagatcaatttgccaaatattcacaatcatgtagttctagtttacatgccaaagtcttccctttttaacattataaaagctaggttgtctcttgaattttgaggccctagagatagtcattttgcaagtaaagagcaacgggaccctttctaaaaacgttggttgaaggacctaaatacctggccataccatagatttgggatgatgtagtctgtgctaaatattttgctgaagaagcagtttctcagacacaacatctcagaattttaatttttagaaattcatgggaaattggatttttgtaataatcttttgatgttttaaacattggttccctagtcaccatagttaccacttgtattttaagtcatttaaacaagccacggtggggcttttttctcctcagtttgaggagaaaaatcttgatgtcattactcctgaattattacattttggagaataagagggcattttattttattagttactaattcaagctgtgactattgtatatctttccaagagttgaaatgctggcttcagaatcataccagattgtcagtgaagctgatgcctaggaacttttaaagggatcctttcaaaaggatcacttagcaaacacatgttgacttttaactgatgtatgaatattaatactctaaaaatagaaagaccagtaatatataagtcactttacagtgctacttcacacttaaaagtgcatggtatttttcatggtattttgcatgcagccagttaactctcgtagatagagaagtcaggtgatagatgatattaaaaattagcaaacaaaagtgacttgctcagggtcatgcagctgggtgatgatagaagagtgggctttaactggcaggcctgtatgtttacagactaccatactgtaaatatgagctttatggtgtcattctcagaaacttatacatttctgctctcctttctcctaagtttcatgcagatgaatataaggtaatatactattatataattcatttgtgatatccacaataatatgactggcaagaattggtggaaatttgtaattaaaataattattaaaccta

SEQ ID NO: 277203 - DNA, 1795 bp, Homo sapiens
cctcgctttgcttcactcgcgccccttccggcttcccttccttctcactctcttgccgtagctgcgccgccaccggggcctcacgtgacactagactctcccggcacgtgacgtgagaaaggggccgggctggggcgggataagccgcttctcccctccttccggaagcgtaacactgaacgtgcctgcgcaatgggtgtcgggtccgctttttcccaatccggacgtaatcgtggtttttgttctgcaataggcggcttagagggaggggctttttcgcctatacctactgtagcttctccacgtatggaccctaaaggctactgctgctactacggggctagacagttactgtctcagctctaggatgtgcgttcttccactagaagctcttctgagggaggtaattaaaaaacagtggaatggaaaaacagtgctgtagtcatcctgtaatatgctccttgtcaacaatgtatacattcctgctaggtgccatattcattgctttaagctcaagtcgcatcttactagtgaagtattctgccaatgaagaaaacaagtatgattatcttccaactactgtgaatgtgtgctcagaactggtgaagctagttttctgtgtgcttgtgtcattctgtgttataaagaaagatcatcaaagtagaaatttgaaatatgcttcctggaaggaattctctgatttcatgaagtggtccattcctgcctttctttatttcctggataacttgattgtcttctatgtcctgtcctatcttcaaccagccatggctgttatcttctcaaattttagcattataacaacagctcttctattcaggatagtgctgaagaggcgtctaaactggatccagtgggcttccctcctgactttatttttgtctattgtggccttgactgccgggactaaaactttacagcacaacttggcaggacgtggatttcatcacgatgcctttttcagcccttccaattcctgccttcttttcagaagtgagtgtcccagaaaagacaattgtacagcaaaggaatggacttttcctgaagctaaatggaacaccacagccagagttttcagtcacatccgtcttggcatgggccatgttcttattatagtccagtgttttatttcttcaatggctaatatctataatgaaaagatactgaaggaagggaaccagctcactgaaagcatcttcatacagaacagcaaactctatttctttggcattctgtttaatgggctgactctgggccttcagaggagtaaccgtgatcagattaagaactgtggatttttttatggccacagtgcattttcagtagcccttatttttgtaactgcattccagggcctttcagtggctttcattctgaagttcctggataacatgttccatgtcttgatggcccaggttaccactgtcattatcacaacagtgtctgtcctggtctttgacttcaggccctccctggaatttttcttggaagccccatcagtccttctctctatatttatttataatgccagcaagcctcaagttccggaatacgcacctaggcaagaaaggatccgagatctaagtggcaatctttgggagcgttccagtggggatggagaagaactagaaagacttaccaaacccaagagtgatgagtcagatgaagatactttctaactggtacccacatagtttgcagctctcttgaaccttattttcacattttcagtgtttgtaatatttatcttttcactttgataaaccagaaatgtttc

SEQ ID NO: 277204 - DNA, 3413 bp, Homo sapiens
cctcgctttgcttcactcgcgccccttccggcttcccttccttctcactctcttgccgtagctgcgccgccaccggggcctcacgtgacactagactctcccggcacgtgacgtgagaaaggggccgggctggggcgggataagccgcttctcccctccttccggaagcgtaacactgaacgtgcctgcgcaatgggtgtcgggtccgctttttcccaatccggacgtaatcgtggtttttgttctgcaataggcggcttagagggaggggctttttcgcctatacctactgtagcttctccacgtatggaccctaaaggctactgctgctactacggggctagacagttactgtctcagctctaggatgtgcgttcttccactagaagctcttctgagggaggtaattaaaaaacagtggaatggaaaaacagtgctgtagtcatcctgtaatatgctccttgtcaacaatgtatacattcctgctaggtgccatattcattgctttaagctcaagtcgcatcttactagtgaagtattctgccaatgaagaaaacaagtatgattatcttccaactactgtgaatgtgtgctcagaactggtgaagctagttttctgtgtgcttgtgtcattctgtgttataaagaaagatcatcaaagtagaaatttgaaatatgcttcctggaaggaattctctgatttcatgaagtggtccattcctgcctttctttatttcctggataacttgattgtcttctatgtcctgtcctatcttcaaccagccatggctgttatcttctcaaattttagcattataacaacagctcttctattcaggatagtgctgaagaggcgtctaaactggatccagtgggcttccctcctgactttatttttgtctattgtggccttgactgccgggactaaaactttacagcacaacttggcaggacgtggatttcatcacgatgcctttttcagcccttccaattcctgccttcttttcagaagtgagtgtcccagaaaagacaattgtacagcaaaggaatggacttttcctgaagctaaatggaacaccacagccagagttttcagtcacatccgtcttggcatgggccatgttcttattatagtccagtgttttatttcttcaatggctaatatctataatgaaaagatactgaaggaagggaaccagctcactgaaagcatcttcatacagaacagcaaactctatttctttggcattctgtttaatgggctgactctgggccttcagaggagtaaccgtgatcagattaagaactgtggatttttttatggccacagtgcattttcagtagcccttatttttgtaactgcattccagggcctttcagtggctttcattctgaagttcctggataacatgttccatgtcttgatggcccaggttaccactgtcattatcacaacagtgtctgtcctggtctttgacttcaggccctccctggaatttttcttggaagccccatcagtccttctctctatatttatttataatgccagcaagcctcaagttccggaatacgcacctaggcaagaaaggatccgagatctaagtggcaatctttgggagcgttccagtggggatggagaagaactagaaagacttaccaaacccaagagtgatgagtcagatgaagatactttctaactggtacccacatagtttgcagctctcttgaaccttattttcacattttcagtgtttgtaatatttatcttttcactttgataaaccagaaatgtttctaaatcctaatattctttgcatatatctagctactccctaaatggttccatccaaggcttagagtacccaaaggctaagaaattctaaagaactgatacaggagtaacaatatgaagaattcattaatatctcagtacttgataaatcagaaagttatatgtgcagattattttccttggccttcaagcttccaaaaaacttgtaataatcatgttagctatagcttgtatatacacatagagatcaatttgccaaatattcacaatcatgtagttctagtttacatgccaaagtcttccctttttaacattataaaagctaggttgtctcttgaattttgaggccctagagatagtcattttgcaagtaaagagcaacgggaccctttctaaaaacgttggttgaaggacctaaatacctggccataccatagatttgggatgatgtagtctgtgctaaatattttgctgaagaagcagtttctcagacacaacatctcagaattttaatttttagaaattcatgggaaattggatttttgtaataatcttttgatgttttaaacattggttccctagtcaccatagttaccacttgtattttaagtcatttaaacaagccacggtggggcttttttctcctcagtttgaggagaaaaatcttgatgtcattactcctgaattattacattttggagaataagagggcattttattttattagttactaattcaagctgtgactattgtatatctttccaagagttgaaatgctggcttcagaatcataccagattgtcagtgaagctgatgcctaggaacttttaaagggatcctttcaaaaggatcacttagcaaacacatgttgacttttaactgatgtatgaatattaatactctaaaaatagaaagaccagtaatatataagtcactttacagtgctacttcacacttaaaagtgcatggtatttttcatggtattttgcatgcagccagttaactctcgtagatagagaagtcaggtgatagatgatattaaaaattagcaaacaaaagtgacttgctcagggtcatgcagctgggtgatgatagaagagtgggctttaactggcaggcctgtatgtttacagactaccatactgtaaatatgagctttatggtgtcattctcagaaacttatacatttctgctctcctttctcctaagtttcatgcagatgaatataaggtaatatactattatataattcatttgtgatatccacaataatatgactggcaagaattggtggaaatttgtaattaaaataattattaaacctaaaaaaaaaataatgacaacaacccacgcaacgatatagacacaacgactacgcagcacaaacaaacgaacaggaggggggcgcaccaaagaaaaatcccccgggggccaaaatttcacgtctccccccgctctttcttgcacaaagaggcgcccaaaaggaggggcgtctttaataacacagagacagcggccgcgttaaaaacgtgccgggtcggggaaaacgcgacacggggcacctatcggaacaagaaccccttctgtcgcgggacaaatgtcgcaacaacccccaacagaa

SEQ ID NO: 277205 - DNA, 2808 bp, Homo sapiens
aggtggaacgagagacttggaaaagaaagggacatagacaaagtatagagaaagaaaaaagggggcccaggggaccggcgctcagcacacggaggatctctgccagcctctgagttccattagtatttattgatcattattgggtgtttctcggagagtgggatgtggcaggatcataggatagtagtggagagagggtcaacaggtaaacacgtgaacaaaggtctctgcatcataaacaagaaaacaagtatgattatcttccaactactgtgaatgtgtgctcagaactggtgaagctagttttctgtgtgcttgtgtcattctgtgttataaagaaagatcatcaaagtagaaatttgaaatatgcttcctggaaggaattctctgatttcatgaagtggtccattcctgcctttctttatttcctggataacttgattgtcttctatgtcctgtcctatcttcaaccagccatggctgttatcttctcaaattttagcattataacaacagctcttctattcaggatagtgctgaagaggcgtctaaactggatccagtgggcttccctcctgactttatttttgtctattgtggccttgactgccgggactaaaactttacagcacaacttggcaggacgtggatttcatcacgatgcctttttcagcccttccaattcctgccttcttttcagaagtgagtgtcccagaaaagacaattgtacagcaaaggaatggacttttcctgaagctaaatggaacaccacagccagagttttcagtcacatccgtcttggcatgggccatgttcttattatagtccagtgttttatttcttcaatggctaatatctataatgaaaagatactgaaggaagggaaccagctcactgaaagcatcttcatacagaacagcaaactctatttctttggcattctgtttaatgggctgactctgggccttcagaggagtaaccgtgatcagattaagaactgtggatttttttatggccacagtgcattttcagtagcccttatttttgtaactgcattccagggcctttcagtggctttcattctgaagttcctggataacatgttccatgtcttgatggcccaggttaccactgtcattatcacaacagtgtctgtcctggtctttgacttcaggccctccctggaatttttcttggaagccccatcagtccttctctctatatttatttataatgccagcaagcctcaagttccggaatacgcacctaggcaagaaaggatccgagatctaagtggcaatctttgggagcgttccagtggggatggagaagaactagaaagacttaccaaacccaagagtgatgagtcagatgaagatactttctaactggtacccacatagtttgcagctctcttgaaccttattttcacattttcagtgtttgtaatatttatcttttcactttgataaaccagaaatgtttctaaatcctaatattctttgcatatatctagctactccctaaatggttccatccaaggcttagagtacccaaaggctaagaaattctaaagaactgatacaggagtaacaatatgaagaattcattaatatctcagtacttgataaatcagaaagttatatgtgcagattattttccttggccttcaagcttccaaaaaacttgtaataatcatgttagctatagcttgtatatacacatagagatcaatttgccaaatattcacaatcatgtagttctagtttacatgccaaagtcttccctttttaacattataaaagctaggttgtctcttgaattttgaggccctagagatagtcattttgcaagtaaagagcaacgggaccctttctaaaaacgttggttgaaggacctaaatacctggccataccatagatttgggatgatgtagtctgtgctaaatattttgctgaagaagcagtttctcagacacaacatctcagaattttaatttttagaaattcatgggaaattggatttttgtaataatcttttgatgttttaaacattggttccctagtcaccatagttaccacttgtattttaagtcatttaaacaagccacggtggggcttttttctcctcagtttgaggagaaaaatcttgatgtcattactcctgaattattacattttggagaataagagggcattttattttattagttactaattcaagctgtgactattgtatatctttccaagagttgaaatgctggcttcagaatcataccagattgtcagtgaagctgatgcctaggaacttttaaagggatcctttcaaaaggatcacttagcaaacacatgttgacttttaactgatgtatgaatattaatactctaaaaatagaaagaccagtaatatataagtcactttacagtgctacttcacacttaaaagtgcatggtatttttcatggtattttgcatgcagccagttaactctcgtagatagagaagtcaggtgatagatgatattaaaaattagcaaacaaaagtgacttgctcagggtcatgcagctgggtgatgatagaagagtgggctttaactggcaggcctgtatgtttacagactaccatactgtaaatatgagctttatggtgtcattctcagaaacttatacatttctgctctcctttctcctaagtttcatgcagatgaatataaggtaatatactattatataattcatttgtgatatccacaataatatgactggcaagaattggtggaaatttgtaattaaaataattattaaaccta

SEQ ID NO: 277206 - DNA, 3083 bp, Homo sapiens
cctcgctttgcttcactcgcgccccttccggcttcccttccttctcactctcttgccgtagctgcgccgccaccggggcctcacgtgacactagactctcccggcacgtgacgtgagaaaggggccgggctggggcgggataagccgcttctcccctccttccggaagcgtaacactgaacgtgcctgcgcaatgggtgtcgggtccgctttttcccaatccggacgtaatcgtggtttttgttctgcaataggcggcttagagggaggggctttttcgcctatacctactgtagcttctccacgtatggaccctaaaggctactgctgctactacggggctagacagttactgtctcagctctaggatgtaattaaaaaacagtggaatggaaaaacagtgctgtagtcatcctgtaatatgctccttgtcaacaatgtatacattcctgctaggtgccatattcattgctttaagctcaagtcgcatcttactagtgaagtattctgccaatgaagaaaacaagtatgattatcttccaactactgtgaatgtgtgctcagaactggtgaagctagttttctgtgtgcttgtgtcattctgtgttataaagaaagatcatcaaagtagaaatttgaaatatgcttcctggaaggaattctctgatttcatgaagtggtccattcctgcctttctttatttcctggataacttgattgtcttctatgtcctgtcctatcttcaaccagccatggctgttatcttctcaaattttagcattataacaacagctcttctattcaggatagtgctgaagaggcgtctaaactggatccagtgggcttccctcctgactttatttttgtctattgtggccttgactgccgggactaaaactttacagcacaacttggcaggacgtggatttcatcacgatgcctttttcagcccttccaattcctgccttcttttcagaagtgagtgtcccagaaaagacaattgtacagcaaaggaatggacttttcctgaagctaaatggaacaccacagccagagttttcagtcacatccgtcttggcatgggccatgttcttattatagtccagtgttttatttcttcaatggctaatatctataatgaaaagatactgaaggaagggaaccagctcactgaaagcatcttcatacagaacagcaaactctatttctttggcattctgtttaatgggctgactctgggccttcagaggagtaaccgtgatcagattaagaactgtggatttttttatggccacagtgcattttcagtagcccttatttttgtaactgcattccagggcctttcagtggctttcattctgaagttcctggataacatgttccatgtcttgatggcccaggttaccactgtcattatcacaacagtgtctgtcctggtctttgacttcaggccctccctggaatttttcttggaagccccatcagtccttctctctatatttatttataatgccagcaagcctcaagttccggaatacgcacctaggcaagaaaggatccgagatctaagtggcaatctttgggagcgttccagtggggatggagaagaactagaaagacttaccaaacccaagagtgatgagtcagatgaagatactttctaactggtacccacatagtttgcagctctcttgaaccttattttcacattttcagtgtttgtaatatttatcttttcactttgataaaccagaaatgtttctaaatcctaatattctttgcatatatctagctactccctaaatggttccatccaaggcttagagtacccaaaggctaagaaattctaaagaactgatacaggagtaacaatatgaagaattcattaatatctcagtacttgataaatcagaaagttatatgtgcagattattttccttggccttcaagcttccaaaaaacttgtaataatcatgttagctatagcttgtatatacacatagagatcaatttgccaaatattcacaatcatgtagttctagtttacatgccaaagtcttccctttttaacattataaaagctaggttgtctcttgaattttgaggccctagagatagtcattttgcaagtaaagagcaacgggaccctttctaaaaacgttggttgaaggacctaaatacctggccataccatagatttgggatgatgtagtctgtgctaaatattttgctgaagaagcagtttctcagacacaacatctcagaattttaatttttagaaattcatgggaaattggatttttgtaataatcttttgatgttttaaacattggttccctagtcaccatagttaccacttgtattttaagtcatttaaacaagccacggtggggcttttttctcctcagtttgaggagaaaaatcttgatgtcattactcctgaattattacattttggagaataagagggcattttattttattagttactaattcaagctgtgactattgtatatctttccaagagttgaaatgctggcttcagaatcataccagattgtcagtgaagctgatgcctaggaacttttaaagggatcctttcaaaaggatcacttagcaaacacatgttgacttttaactgatgtatgaatattaatactctaaaaatagaaagaccagtaatatataagtcactttacagtgctacttcacacttaaaagtgcatggtatttttcatggtattttgcatgcagccagttaactctcgtagatagagaagtcaggtgatagatgatattaaaaattagcaaacaaaagtgacttgctcagggtcatgcagctgggtgatgatagaagagtgggctttaactggcaggcctgtatgtttacagactaccatactgtaaatatgagctttatggtgtcattctcagaaacttatacatttctgctctcctttctcctaagtttcatgcagatgaatataaggtaatatactattatataattcatttgtgatatccacaataatatgactggcaagaattggtggaaatttgtaattaaaataattattaaaccta

SEQ ID NO: 277207 - DNA, 2645 bp, Homo sapiens
cctcgctttgcttcactcgcgccccttccggcttcccttccttctcactctcttgccgtagctgcgccgccaccggggcctcacgtgacactagactctcccggcacgtgacgtgagaaaggggccgggctggggcgggataagccgcttctcccctccttccggaagcgtaacactgaacgtgcctgcgcaatgggtgtcgggtccgctttttcccaatccggacgtaatcgtggtttttgttctgcaataggcggcttagagggaggggctttttcgcctatacctactgtagcttctccacgtatggaccctaaaggctactgctgctactacggggctagacagttactgtctcagctctaggatgtgcgttcttccactagaagctcttctgagggaggtaattaaaaaacagtggaatggaaaaacagtgctgtagtcatcctgtaatatgctccttgtcaacaatgtatacattcctgctaggtgccatattcattgctttaagctcaagtcgcatcttactagtgaagtattctgccaatgaagaaaacaagtatgattatcttccaactactgtgaatgtgtgctcagaactggtgaagctagttttctgtgtgcttgtgtcattctgtgttataaagaaagatcatcaaagtagaaatttgaaatatgcttcctggaaggaattctctgatttcatgaagtggtccattcctgcctttctttatttcctggataacttgattgtcttctatgtcctgtcctatcttcaaccagccatggctgttatcttctcaaattttagcattataacaacagctcttctattcaggatagtgctgaagaggcgtctaaactggatccagtgggcttccctcctgactttatttttgtctattgtggccttgactgccgggactaaaactttacagcacaacttggcaggacgtggatttcatcacgatgcctttttcagcccttccaattcctgccttcttttcagaagccctccctggaatttttcttggaagccccatcagtccttctctctatatttatttataatgccagcaagcctcaagttccggaatacgcacctaggcaagaaaggatccgagatctaagtggcaatctttgggagcgttccagtggggatggagaagaactagaaagacttaccaaacccaagagtgatgagtcagatgaagatactttctaactggtacccacatagtttgcagctctcttgaaccttattttcacattttcagtgtttgtaatatttatcttttcactttgataaaccagaaatgtttctaaatcctaatattctttgcatatatctagctactccctaaatggttccatccaaggcttagagtacccaaaggctaagaaattctaaagaactgatacaggagtaacaatatgaagaattcattaatatctcagtacttgataaatcagaaagttatatgtgcagattattttccttggccttcaagcttccaaaaaacttgtaataatcatgttagctatagcttgtatatacacatagagatcaatttgccaaatattcacaatcatgtagttctagtttacatgccaaagtcttccctttttaacattataaaagctaggttgtctcttgaattttgaggccctagagatagtcattttgcaagtaaagagcaacgggaccctttctaaaaacgttggttgaaggacctaaatacctggccataccatagatttgggatgatgtagtctgtgctaaatattttgctgaagaagcagtttctcagacacaacatctcagaattttaatttttagaaattcatgggaaattggatttttgtaataatcttttgatgttttaaacattggttccctagtcaccatagttaccacttgtattttaagtcatttaaacaagccacggtggggcttttttctcctcagtttgaggagaaaaatcttgatgtcattactcctgaattattacattttggagaataagagggcattttattttattagttactaattcaagctgtgactattgtatatctttccaagagttgaaatgctggcttcagaatcataccagattgtcagtgaagctgatgcctaggaacttttaaagggatcctttcaaaaggatcacttagcaaacacatgttgacttttaactgatgtatgaatattaatactctaaaaatagaaagaccagtaatatataagtcactttacagtgctacttcacacttaaaagtgcatggtatttttcatggtattttgcatgcagccagttaactctcgtagatagagaagtcaggtgatagatgatattaaaaattagcaaacaaaagtgacttgctcagggtcatgcagctgggtgatgatagaagagtgggctttaactggcaggcctgtatgtttacagactaccatactgtaaatatgagctttatggtgtcattctcagaaacttatacatttctgctctcctttctcctaagtttcatgcagatgaatataaggtaatatactattatataattcatttgtgatatccacaataatatgactggcaagaattggtggaaatttgtaattaaaataattattaaaccta

SEQ ID NO: 277208 - DNA, 2497 bp, Homo sapiens
cctcgctttgcttcactcgcgccccttccggcttcccttccttctcactctcttgccgtagctgcgccgccaccggggcctcacgtgacactagactctcccggcacgtgacgtgagaaaggggccgggctggggcgggataagccgcttctcccctccttccggaagcgtaacactgaacgtgcctgcgcaatgggtgtcgggtccgctttttcccaatccggacgtaatcgtggtttttgttctgcaataggcggcttagagggaggggctttttcgcctatacctactgtagcttctccacgtatggaccctaaaggctactgctgctactacggggctagacagttactgtctcagctctaggatgtgcgttcttccactagaagctcttctgagggaggtaattaaaaaacagtggaatggaaaaacagtgctgtagtcatcctgtaatatgctccttgtcaacaatgtatacattcctgctaggtgccatattcattgctttaagctcaagtcgcatcttactagtgaagtattctgccaatgaagaaaacaagtatgattatcttccaactactgtgaatgtgtgctcagaactggtgaagctagttttctgtgtgcttgtgtcattctgtgttataaagaaagatcatcaaagtagaaatttgaaatatgcttcctggaaggaattctctgatttcatgaagtggtccattcctgcctttctttatttcctggataacttgattgtcttctatgtcctgtcctatcttcaaccagccatggctgttatcttctcaaattttagcattataacaacagctcttctattcaggatagtgctgaagaggcgtctaaactggatccagtgggcttccctcctgactttatttttgtctattgtggccttgactgccgggactaaaactttacagcacaacttggcaggacgtggatttcatcacgatgcctttttcagcccttccaattcctgccttcttttcagaagatggagaagaactagaaagacttaccaaacccaagagtgatgagtcagatgaagatactttctaactggtacccacatagtttgcagctctcttgaaccttattttcacattttcagtgtttgtaatatttatcttttcactttgataaaccagaaatgtttctaaatcctaatattctttgcatatatctagctactccctaaatggttccatccaaggcttagagtacccaaaggctaagaaattctaaagaactgatacaggagtaacaatatgaagaattcattaatatctcagtacttgataaatcagaaagttatatgtgcagattattttccttggccttcaagcttccaaaaaacttgtaataatcatgttagctatagcttgtatatacacatagagatcaatttgccaaatattcacaatcatgtagttctagtttacatgccaaagtcttccctttttaacattataaaagctaggttgtctcttgaattttgaggccctagagatagtcattttgcaagtaaagagcaacgggaccctttctaaaaacgttggttgaaggacctaaatacctggccataccatagatttgggatgatgtagtctgtgctaaatattttgctgaagaagcagtttctcagacacaacatctcagaattttaatttttagaaattcatgggaaattggatttttgtaataatcttttgatgttttaaacattggttccctagtcaccatagttaccacttgtattttaagtcatttaaacaagccacggtggggcttttttctcctcagtttgaggagaaaaatcttgatgtcattactcctgaattattacattttggagaataagagggcattttattttattagttactaattcaagctgtgactattgtatatctttccaagagttgaaatgctggcttcagaatcataccagattgtcagtgaagctgatgcctaggaacttttaaagggatcctttcaaaaggatcacttagcaaacacatgttgacttttaactgatgtatgaatattaatactctaaaaatagaaagaccagtaatatataagtcactttacagtgctacttcacacttaaaagtgcatggtatttttcatggtattttgcatgcagccagttaactctcgtagatagagaagtcaggtgatagatgatattaaaaattagcaaacaaaagtgacttgctcagggtcatgcagctgggtgatgatagaagagtgggctttaactggcaggcctgtatgtttacagactaccatactgtaaatatgagctttatggtgtcattctcagaaacttatacatttctgctctcctttctcctaagtttcatgcagatgaatataaggtaatatactattatataattcatttgtgatatccacaataatatgactggcaagaattggtggaaatttgtaattaaaataattattaaaccta

SEQ ID NO: 277209 - DNA, 2270 bp, Homo sapiens
aggtggaacgagagacttggaaaagaaagggacatagacaaagtatagagaaagaaaaaagggggcccaggggaccggcgctcagcacacggaggatctctgccagcctctgagttccattagtatttattgatcattattgggtgtttctcggagagtgggatgtggcaggatcataggatagtagtggagagagggtcaacaggtaaacacgtgaacaaaggtctctgcatcataaacaagaaaacaagtatgattatcttccaactactgtgaatgtgtgctcagaactggtgaagctagttttctgtgtgcttgtgtcattctgtgttataaagaaagatcatcaaagtagaaatttgaaatatgcttcctggaaggaattctctgatttcatgaagtggtccattcctgcctttctttatttcctggataacttgattgtcttctatgtcctgtcctatcttcaaccagccatggctgttatcttctcaaattttagcattataacaacagctcttctattcaggatagtgctgaagaggcgtctaaactggatccagtgggcttccctcctgactttatttttgtctattgtggccttgactgccgggactaaaactttacagcacaacttggcaggacgtggatttcatcacgatgcctttttcagcccttccaattcctgccttcttttcagaacaagcctcaagttccggaatacgcacctaggcaagaaaggatccgagatctaagtggcaatctttgggagcgttccagtggggatggagaagaactagaaagacttaccaaacccaagagtgatgagtcagatgaagatactttctaactggtacccacatagtttgcagctctcttgaaccttattttcacattttcagtgtttgtaatatttatcttttcactttgataaaccagaaatgtttctaaatcctaatattctttgcatatatctagctactccctaaatggttccatccaaggcttagagtacccaaaggctaagaaattctaaagaactgatacaggagtaacaatatgaagaattcattaatatctcagtacttgataaatcagaaagttatatgtgcagattattttccttggccttcaagcttccaaaaaacttgtaataatcatgttagctatagcttgtatatacacatagagatcaatttgccaaatattcacaatcatgtagttctagtttacatgccaaagtcttccctttttaacattataaaagctaggttgtctcttgaattttgaggccctagagatagtcattttgcaagtaaagagcaacgggaccctttctaaaaacgttggttgaaggacctaaatacctggccataccatagatttgggatgatgtagtctgtgctaaatattttgctgaagaagcagtttctcagacacaacatctcagaattttaatttttagaaattcatgggaaattggatttttgtaataatcttttgatgttttaaacattggttccctagtcaccatagttaccacttgtattttaagtcatttaaacaagccacggtggggcttttttctcctcagtttgaggagaaaaatcttgatgtcattactcctgaattattacattttggagaataagagggcattttattttattagttactaattcaagctgtgactattgtatatctttccaagagttgaaatgctggcttcagaatcataccagattgtcagtgaagctgatgcctaggaacttttaaagggatcctttcaaaaggatcacttagcaaacacatgttgacttttaactgatgtatgaatattaatactctaaaaatagaaagaccagtaatatataagtcactttacagtgctacttcacacttaaaagtgcatggtatttttcatggtattttgcatgcagccagttaactctcgtagatagagaagtcaggtgatagatgatattaaaaattagcaaacaaaagtgacttgctcagggtcatgcagctgggtgatgatagaagagtgggctttaactggcaggcctgtatgtttacagactaccatactgtaaatatgagctttatggtgtcattctcagaaacttatacatttctgctctcctttctcctaagtttcatgcagatgaatataaggtaatatactattatataattcatttgtgatatccacaataatatgactggcaagaattggtggaaatttgtaattaaaataattattaaaccta

SEQ ID NO: 277210 - DNA, 1347 bp, Homo sapiens
accatttagggagtagctagatatatggttccatccaagccttgggtactctaagccttggatggaaccatttagggagtagctagatatacccaaaggctaagaaattctaaagaactgatacaggagtaacaatatgaagaattcattaatatctcagtacttgataaatcagaaagttatatgtgcagattattttccttggccttcaagcttccaaaaaacttgtaataatcatgttagctatagcttgtatatacacatagagatcaatttgccaaatattcacaatcatgtagttctagtttacatgccaaagtcttccctttttaacattataaaagctaggttgtctcttgaattttgaggccctagagatagtcattttgcaagtaaagagcaacgggaccctttctaaaaacgttggttgaaggacctaaatacctggccataccatagatttgggatgatgtagtctgtgctaaatattttgctgaagaagcagtttctcagacacaacatctcagaattttaatttttagaaattcatgggaaattggatttttgtaataatcttttgatgttttaaacattggttccctagtcaccatagttaccacttgtattttaagtcatttaaacaagccacggtggggcttttttctcctcagtttgaggagaaaaatcttgatgtcattactcctgaattattacattttggagaataagagggcattttattttattagttactaattcaagctgtgactattgtatatctttccaagagttgaaatgctggcttcagaatcataccagattgtcagtgaagctgatgcctaggaacttttaaagggatcctttcaaaaggatcacttagcaaacacatgttgacttttaactgatgtatgaatattaatactctaaaaatagaaagaccagtaatatataagtcactttacagtgctacttcacacttaaaagtgcatggtatttttcatggtattttgcatgcagccagttaactctcgtagatagagaagtcaggtgatagatgatattaaaaattagcaaacaaaagtgacttgctcagggtcatgcagctgggtgatgatagaagagtgggctttaactggcaggcctgtatgtttacagactaccatactgtaaatatgagctttatggtgtcattctcagaaacttatacatttctgctctcctttctcctaagtttcatgcagatgaatataaggtaatatactattatataattcatttgtgatatccacaataatatgactggcaagaattggtggaaatttgtaattaaaataattattaaaccta

SEQ ID NO: 277211 - DNA, 1728 bp, Homo sapiens
cctcgctttgcttcactcgcgccccttccggcttcccttccttctcactctcttgccgtagctgcgccgccaccggggcctcacgtgacactagactctcccggcacgtgacgtgagaaaggggccgggctggggcgggataagccgcttctcccctccttccggaagcgtaacactgaacgtgcctgcgcaatgggtgtcgggtccgctttttcccaatccggacgtaatcgtggtttttgttctgcaataggcggcttagagggaggggctttttcgcctatacctactgtagcttctccacgtatggaccctaaaggctactgctgctactacggggctagacagttactgtctcagctctaggatgtgcgttcttccactagaagctcttctgagggaggtaattaaaaaacagtggaatggaaaaacagtgctgtagtcatcctgtaatatgctccttgtcaacaatgtatacattcctgctaggtgccatattcattgctttaagctcaagtcgcatcttactagtgaagtattctgccaatgaagaaaacaagtatgattatcttccaactactgtgaatgtgtgctcagaactggtgaagctagttttctgtgtgcttgtgtcattctgtgttataaagaaagatcatcaaagtagaaatttgaaatatgcttcctggaaggaattctctgatttcatgaagtggtccattcctgcctttctttatttcctggataacttgattgtcttctatgtcctgtcctatcttcaaccagccatggctgttatcttctcaaattttagcattataacaacagctcttctattcaggatagtgctgaagaggcgtctaaactggatccagtgggcttccctcctgactttatttttgtctattgtggccttgactgccgggactaaaactttacagcacaacttggcaggacgtggatttcatcacgatgcctttttcagcccttccaattcctgccttcttttcagaagtgagtgtcccagaaaagacaattgtacagcaaaggaatggacttttcctgaagctaaatggaacaccacagccagagttttcagtcacatccgtcttggcatgggccatgttcttattatagtccagtgttttatttcttcaatggctaatatctataatgaaaagatactgaaggaagggaaccagctcactgaaagcatcttcatacagaacagcaaactctatttctttggcattctgtttaatgggctgactctgggccttcagaggagtaaccgtgatcagattaagaactgtggatttttttatggccacagtgcattttcagtagcccttatttttgtaactgcattccagggcctttcagtggctttcattctgaagttcctggataacatgttccatgtcttgatggcccaggttaccactgtcattatcacaacagtgtctgtcctggtctttgacttcaggccctccctggaatttttcttggaagccccatcagtccttctctctatatttatttataatgccagcaagcctcaagttccggaatacgcacctaggcaagaaaggatccgagatctaagtggcaatctttgggagcgttccagtgggtaagtttgtgagggtgttcctttttgcttgttcttcccaaatttaaagcatagttaattcaaggaaaaaaataaaatcagtactgatttgtcaaaaa

SEQ ID NO: 277212 - DNA, 960 bp, Homo sapiens
agcggagttgagaaactgcaaggaacacaaaagactcaaacaacagagttcgagggtctacttgctaactctgggacctatggcaaaacccaaatgaaccaccaactggtctcactctgtcatccaggctggagcggtgccatcacagctcactgcagcctggacctcccagactcaagtgatcctcccaccacagcctcccaagtagccaggactacaggtgagtgctctgctaagctctgcaacaagttccaagctagtagtggccagctactcagctttctcaggaaactcaccttctctccttggagtgatgggactgagtcccgcaaactgtgaaagctgtctttgatgtggtccctacgttttcgttccagtgcattatgatgagcccgtttgtcagcctagaagaatgggagaaagaacacattaggaatgtcactccttttgcttggtacaaggtgggtggggtacagcctggaagtacacgctgtcagcactgtccctggcgagtggactgggaaggatttctcgaggtgggcagttaggagtctccagaattaggctctgctaaagggggagaaaggggtgagcaacgcttgcgacaggaacatccaaagtagctcgatgcatccagctcatgcataagtaaaataaaagttattcagggggacaaagtgtgactctcctgtaacatcagtggtcccccccaacttgcttatgtgacagaagagccaccagtctgtggttaggaagtgactagagaaagctccagtggccccttcttaagatgtgatcacctccactgtaagagattccccagatgggtgtccaggggaagaaagagttaagtcactggtgcttctttaatgtgaaaccatcaccatgagtcccaagcccactaaaaggcactagtttaagaccttctcaccaaatcatacaacagaagctaaaacctct

SEQ ID NO: 277213 - DNA, 3568 bp, Homo sapiens
ggaagtcgatacgtggctgccgtctgtccccgctgaggaggtgcagcagccggagatggcggcggtgctgaacgcagagcgactcgaggtgtccgtcgacggcctcacgctcagcccggacccggaggagcggcctggggcggagggcgccccgctgctgccgccaccgctgccaccgccctcgccacctggatccggtcgcggcccgggcgcctcaggggagcagcccgagcccggggaggcggcggctgggggcgcggcggaggaggcgcggcggctggagcagcgctggggtttcggcctggaggagttgtacggcctggcactgcgcttcttcaaagaaaaagatggcaaagcatttcatccaacttatgaagaaaaattgaagcttgtggcactgcataagcaagttcttatgggcccatataatccagacacttgtcctgaggttggattctttgatgtgttggggaatgacaggaggagagaatgggcagccctgggaaacatgtctaaagaggatgccatggtggagtttgtcaagctcttaaataggtgttgccatctcttttcaacatatgttgcgtcccacaaaatagagaaggaagagcaagacaaaaaaaggaaggaggaagaggagcgaaggcggcgtgaagaggaagaaagagaacgtctgcaaaaggaggaagagaaacgtaggagagaagaagaggaaaggcttcgacgggaggaagaggaaaggagacggatagaagaagaaaggcttcggttggagcagcaaaagcagcagataatggcagctttaaactcccagactgccgtgcagttccagcagtatgcagcccaacagtatccagggaactacgaacagcagcaaattctcatccgccagttgcaggagcaacactatcagcagtacatgcagcagttgtatcaagtccagcttgcacagcaacaggcagcattacagaaacaacaggaagtagtagtggctgggtcttccttgcctacatcatcaaaagtgaatgcaactgtaccaagtaatatgatgtcagttaatggacaggccaaaacacacactgacagctccgaaaaagaactggaaccagaagctgcagaagaagccctggagaatggaccaaaagaatctcttccagtaatagcagctccatccatgtggacacgacctcagatcaaagacttcaaagagaagattcagcaggatgcagattccgtgattacagtgggccgaggagaagtggtcactgttcgagtacccacccatgaagaaggatcatatctcttttgggaatttgccacagacaattatgacattgggtttggggtgtattttgaatggacagactctccaaacactgctgtcagcgtgcatgtcagtgagtccagcgatgacgacgaggaggaagaagaaaacatcggttgtgaagagaaagccaaaaagaatgccaacaagcctttgctggatgagattgtgcctgtgtaccgacgggactgtcatgaggaggtgtatgctggcagccatcaatatccagggagaggagtctatctcctcaagtttgacaactcctactctttgtggcggtcaaaatcagtctactacagagtctattatactagataaaaatgttgttacaaagtctggagtctagggttgggcagaagatgacatttaatttggaaatttctttttacttttgtggagcattagagtcacagtttaccttattgatattggtctgatggtttgtgaactcttgctgggaatcaaaatttccttgagactctttagcattcatactttggggttaaaggagattcctcagactcatccagcccttgggtgctgaccagcagagtcactagtggatgctgaagttacatgagctacatgttaaatatttaaagtctccaaaataaaacaccccaacgttgaccttacccggctgatggttagccccttgctgcctgctccatgtgtcttatgagagcccgtagttacagtgtcctctaatttgaaatccataagttaacaagtctatatcaggtgcagctggctttgattaaaggccatttttaaaacttaaaaactcaacacctcacagattataatagaaaaagaaatggcctcagtttgatctcgttcagaatgacccagattgtttctgctttgggtgcagctgtttagttcagagttatattacagagaattattttctgagataatcttaaactagaatgttcaaaactaattgataattgaagtatcaagatacgtagaacacctcagagatttttcttcaggaacttccacaaactttgaatccttgtatctttatttggtattcatactactagtagcaaaatacaggttttttgttttgttttgttttggcttcatagagtatctcaaattgaaacttttctgcacaaagaataaaattaaggattttataaactcaaattggcacctactgaattaaaatacataaaatcatttaaatataattcagcatatgggaagtaacattgcactaatatggaaatcactgccagagacagtctattttcttttaatttgttactacttagtcacaaaccccacattattccagtttggaattacttattaaggagaattggaaatacatatgcccatgcttaaattttatagctttaatttgtgttatttctttattgacgggaagaggtacatctttttttccttactgaaaacaaatatggattaattgcctcaaatttgtataagtgattggctagtgattcttgttttcagaagggagagtggtatagatagaaaatgacaaagatggcaatatacacttaatgttgttattgtatgttgttactgaagtacttagatttttaaaatttcaaatcctaaatcacttcttgtaggagggttttcattaactgcagtatatacagttcactacatatgggttgtttgagttttttgtgtgctgtatttctttctgttttttaatacctggttttgtacatatctaactctgttctcttttggttgttcagaaactggattttttttttcttaagcagtgcttaatttgtgttttttaattttgattcagaagtagtcccagctcataggtgttcatactgttacatccagaacatttgtcaggctctctgtcagctttcatgtacatatggtatagaaaccatggagttaggcacttcctggattttttttttatgagaaaaatactgtatttaaaatgtaaaataaacttttaaaaagcaggcactaatatatatttcttccagcctttgattacaaatttgtccttgcacatgttaagatgaattatctcctaaaaatatcattgttcttgggagcagtgtatgttactttacatagcagcggttcctgtcatgtgttcatgtcagaatatttttggttttaaactttcttattgcctttggctgttgattagtacagtacaagtgcgatttcaaaaagatcttgaaagtaatatatttaatcaattaaaatgtttatctgtaa

SEQ ID NO: 277214 - DNA, 912 bp, Homo sapiens
ggaagtcgatacgtggctgccgtctgtccccgctgaggaggtgcagcagccggagatggcggcggtgctgaacgcagagcgactcgaggtgtccgtcgacggcctcacgctcagcccggacccggaggagcggcctggggcggagggcgccccgctgctgccgccaccgctgccaccgccctcgccacctggatccggtcgcggcccgggcgcctcaggggagcagcccgagcccggggaggcggcggctgggggcgcggcggaggaggcgcggcggctggagcagcgctggggtttcggcctggaggagttgtacggcctggcactgcgcttcttcaaagaaaaagatggcaaagcatttcatccaacttatgaagaaaaattgaagcttgtggcactgcataagcaagttcttatgggcccatataatccagacacttgtcctgaggttggattctttgatgtgttggggaatgacaggaggagagaatgggcagccctgggaaacatgtctaaagaggatgccatggtggagtttgtcaagctcttaaataggtgttgccatctcttttcaacatatgttgcgtcccacaaaatagagaaggaagagcaagacaaaaaaaggtgaagtttgagggcatggaatactttattgctgcgcagcccagtgtactgatgcttttgttttgtagagtgtctgttctagttctagatcaggtgtcttgctttccttggatccccatttcttgtggcaattgttcaaacttcctgatgtgaacaggtacttgtattataagttttggggggagggaggactgcttcctactggccgtgcctttaaaaggaacctcccatccatcatggcagccttccttttgttttattacactaagtttctgaataagccccacc

SEQ ID NO: 277215 - DNA, 3919 bp, Homo sapiens
ggaagtcgatacgtggctgccgtctgtccccgctgaggaggtgcagcagccggagatggcggcggtgctgaacgcagagcgactcgaggtgtccgtcgacggcctcacgctcagcccggacccggaggagcggcctggggcggagggcgccccgctgctgccgccaccgctgccaccgccctcgccacctggatccggtcgcggcccgggcgcctcaggggagcagcccgagcccggggaggcggcggctgggggcgcggcggaggaggcgcggcggctggagcagcgctggggtttcggcctggaggagttgtacggcctggcactgcgcttcttcaaagaaaaagatggcaaagcatttcatccaacttatgaagaaaaattgaagcttgtggcactgcataagcaagttcttatgggcccatataatccagacacttgtcctgaggttggattctttgatgtgttggggaatgacaggaggagagaatgggcagccctgggaaacatgtctaaagaggatgccatggtggagtttgtcaagctcttaaataggtgttgccatctcttttcaacatatgttgcgtcccacaaaatagagaaggaagagcaagacaaaaaaaggaaggaggaagaggagcgaaggcggcgtgaagaggaagaaagagaacgtctgcaaaaggaggaagagaaacgtaggagagaagaagaggaaaggcttcgacgggaggaagaggaaaggagacggatagaagaagaaaggcttcggttggagcagcaaaagcagcagataatggcagctttaaactcccagactgccgtgcagttccagcagtatgcagcccaacagtatccagggaactacgaacagcagcaaattctcatccgccagttgcaggagcaacactatcagcagtacatgcagcagttgtatcaagtccagcttgcacagcaacaggcagcattacagaaacaacaggaagtagtagtggctgggtcttccttgcctacatcatcaaaagtgaatgcaactgtaccaagtaatatgatgtcagttaatggacaggccaaaacacacactgacagctccgaaaaagaactggaaccagaagctgcagaagaagccctggagaatggaccaaaagaatctcttccagtaatagcagctccatccatgtggacacgacctcagatcaaagacttcaaagagaagattcagcaggatgcagattccgtgattacagtgggccgaggagaagtggtcactgttcgagtacccacccatgaagaaggatcatatctcttttgggaatttgccacagacaattatgacattgggtttggggtgtattttgaatggacagactctccaaacactgctgtcagcgtgcatgtcagtgagtccagcgatgacgacgaggaggaagaagaaaacatcggttgtgaagagaaagccaaaaagaatgccaacaagcctttgctggatgagattgtgcctgtgtaccgacgggactgtcatgaggaggtgtatgctggcagccatcaatatccagggagaggagtctatctcctcaagtttgacaactcctactctttgtggcggtcaaaatcagtctactacagagtctattatactagataaaaatgttgttacaaagtctggagtctagggttgggcagaagatgacatttaatttggaaatttctttttacttttgtggagcattagagtcacagtttaccttattgatattggtctgatggtttgtgaactcttgctgggaatcaaaatttccttgagactctttagcattcatactttggggttaaaggagattcctcagactcatccagcccttgggtgctgaccagcagagtcactagtggatgctgaagttacatgagctacatgttaaatatttaaagtctccaaaataaaacaccccaacgttgaccttacccggctgatggttagccccttgctgcctgctccatgtgtcttatgagagcccgtagttacagtgtcctctaatttgaaatccataagttaacaagtctatatcaggtgcagctggctttgattaaaggccatttttaaaacttaaaaactcaacacctcacagattataatagaaaaagaaatggcctcagtttgatctcgttcagaatgacccagattgtttctgctttgggtgcagctgtttagttcagagttatattacagagaattattttctgagataatcttaaactagaatgttcaaaactaattgataattgaagtatcaagatacgtagaacacctcagagatttttcttcaggaacttccacaaactttgaatccttgtatctttatttggtattcatactactagtagcaaaatacaggttttttgttttgttttgttttggcttcatagagtatctcaaattgaaacttttctgcacaaagaataaaattaaggattttataaactcaaattggcacctactgaattaaaatacataaaatcatttaaatataattcagcatatgggaagtaacattgcactaatatggaaatcactgccagagacagtctattttcttttaatttgttactacttagtcacaaaccccacattattccagtttggaattacttattaaggagaattggaaatacatatgcccatgcttaaattttatagctttaatttgtgttatttctttattgacgggaagaggtacatctttttttccttactgaaaacaaatatggattaattgcctcaaatttgtataagtgattggctagtgattcttgttttcagaagggagagtggtatagatagaaaatgacaaagatggcaatatacacttaatgttgttattgtatgttgttactgaagtacttagatttttaaaatttcaaatcctaaatcacttcttgtaggagggttttcattaactgcagtatatacagttcactacatatgggttgtttgagttttttgtgtgctgtatttctttctgttttttaatacctggttttgtacatatctaactctgttctcttttggttgttcagaaactggattttttttttcttaagcagtgcttaatttgtgttttttaattttgattcagaagtagtcccagctcataggtgttcatactgttacatccagaacatttgtcaggctctctgtcagctttcatgtacatatggtatagaaaccatggagttaggcacttcctggattttttttttatgagaaaaatactgtatttaaaatgtaaaataaacttttaaaaagcaggcactaatatatatttcttccagcctttgattacaaatttgtccttgcacatgttaagatgaattatctcctaaaaatatcattgttcttgggagcagtgtatgttactttacatagcagcggttcctgtcatgtgttcatgtcagaatatttttggttttaaactttcttattgcctttggctgttgattagtacagtacaagtgcgatttcaaaaagatcttgaaagtaatatatttaatcaattaaaatgtttatctgtaaaaaaaaaagaaagaaaacagaaaagcaagaacaaaaacaaaaagaaaaacaacaagaaaaaaaaaacaatcgacgaccaccgagaaacaccgcgcggggcacaagagacgccaggaaacaagaagttcaaaaagagtaagagagaggggcggagagcggcaaaaaagaagactgagacaaagacgaagaaacgagctcgcagcaccacagacgaccgtgtatagaaaaggggggggaggcccccaccgaaaaaggacgcgggggggaacacaagcgctgcgtaaaaacccacaaagggtgcgggggaaacagcgcaacaacacagcgaggccacaagcggcacgtaaaaag

SEQ ID NO: 277216 - DNA, 3393 bp, Homo sapiens
ggaagtcgatacgtggctgccgtctgtccccgctgaggaggtgcagcagccggagatggcggcggtgctgaacgcagagcgactcgaggtgtccgtcgacggcctcacgctcagcccggacccggaggagcggcctggggcggagggcgccccgctgctgccgccaccgctgccaccgccctcgccacctggatccggtcgcggcccgggcgcctcaggggagcagcccgagcccggggaggcggcggctgggggcgcggcggaggaggcgcggcggctggagcagcgctggggtttcggcctggaggagttgtacggcctggcactgcgcttcttcaaagaaaaagatggcaaagcatttcatccaacttatgaagaaaaattgaagcttgtggcactgcataagcaagttcttatgggcccatataatccagacacttgtcctgaggttggattctttgatgtgttggggaatgacaggaggagagaatgggcagccctgggaaacatgtctaaagaggatgccatggtggagtttgtcaagctcttaaataggtgttgccatctcttttcaacatatgttgcgtcccacaaaatagagaaggaagagcaagacaaaaaaaggaaggaggaagaggagcgaaggcggcgtgaagaggaagaaagagaacgtctgcaaaaggaggaagagaaacgtaggagagaagaagaggaaaggcttcgacgggaggaagaggaaaggagacggatagaagaagaaaggcttcggttggagcagcaaaagcagcattacagaaacaacaggaagtagtagtggctgggtcttccttgcctacatcatcaaaagtgaatgcaactgtaccaagtaatatgatgtcagttaatggacaggccaaaacacacactgacagctccgaaaaagaactggaaccagaagctgcagaagaagccctggagaatggaccaaaagaatctcttccagtaatagcagctccatccatgtggacacgacctcagatcaaagacttcaaagagaagattcagcaggatgcagattccgtgattacagtgggccgaggagaagtggtcactgttcgagtacccacccatgaagaaggatcatatctcttttgggaatttgccacagacaattatgacattgggtttggggtgtattttgaatggacagactctccaaacactgctgtcagcgtgcatgtcagtgagtccagcgatgacgacgaggaggaagaagaaaacatcggttgtgaagagaaagccaaaaagaatgccaacaagcctttgctggatgagattgtgcctgtgtaccgacgggactgtcatgaggaggtgtatgctggcagccatcaatatccagggagaggagtctatctcctcaagtttgacaactcctactctttgtggcggtcaaaatcagtctactacagagtctattatactagataaaaatgttgttacaaagtctggagtctagggttgggcagaagatgacatttaatttggaaatttctttttacttttgtggagcattagagtcacagtttaccttattgatattggtctgatggtttgtgaactcttgctgggaatcaaaatttccttgagactctttagcattcatactttggggttaaaggagattcctcagactcatccagcccttgggtgctgaccagcagagtcactagtggatgctgaagttacatgagctacatgttaaatatttaaagtctccaaaataaaacaccccaacgttgaccttacccggctgatggttagccccttgctgcctgctccatgtgtcttatgagagcccgtagttacagtgtcctctaatttgaaatccataagttaacaagtctatatcaggtgcagctggctttgattaaaggccatttttaaaacttaaaaactcaacacctcacagattataatagaaaaagaaatggcctcagtttgatctcgttcagaatgacccagattgtttctgctttgggtgcagctgtttagttcagagttatattacagagaattattttctgagataatcttaaactagaatgttcaaaactaattgataattgaagtatcaagatacgtagaacacctcagagatttttcttcaggaacttccacaaactttgaatccttgtatctttatttggtattcatactactagtagcaaaatacaggttttttgttttgttttgttttggcttcatagagtatctcaaattgaaacttttctgcacaaagaataaaattaaggattttataaactcaaattggcacctactgaattaaaatacataaaatcatttaaatataattcagcatatgggaagtaacattgcactaatatggaaatcactgccagagacagtctattttcttttaatttgttactacttagtcacaaaccccacattattccagtttggaattacttattaaggagaattggaaatacatatgcccatgcttaaattttatagctttaatttgtgttatttctttattgacgggaagaggtacatctttttttccttactgaaaacaaatatggattaattgcctcaaatttgtataagtgattggctagtgattcttgttttcagaagggagagtggtatagatagaaaatgacaaagatggcaatatacacttaatgttgttattgtatgttgttactgaagtacttagatttttaaaatttcaaatcctaaatcacttcttgtaggagggttttcattaactgcagtatatacagttcactacatatgggttgtttgagttttttgtgtgctgtatttctttctgttttttaatacctggttttgtacatatctaactctgttctcttttggttgttcagaaactggattttttttttcttaagcagtgcttaatttgtgttttttaattttgattcagaagtagtcccagctcataggtgttcatactgttacatccagaacatttgtcaggctctctgtcagctttcatgtacatatggtatagaaaccatggagttaggcacttcctggattttttttttatgagaaaaatactgtatttaaaatgtaaaataaacttttaaaaagcaggcactaatatatatttcttccagcctttgattacaaatttgtccttgcacatgttaagatgaattatctcctaaaaatatcattgttcttgggagcagtgtatgttactttacatagcagcggttcctgtcatgtgttcatgtcagaatatttttggttttaaactttcttattgcctttggctgttgattagtacagtacaagtgcgatttcaaaaagatcttgaaagtaatatatttaatcaattaaaatgtttatctgtaa

SEQ ID NO: 277217 - DNA, 3022 bp, Homo sapiens
  misc_feature (11)..(11): n is a, c, g, or t
ggcccaagganaagtggtcactgttcgagtacccacccatgaagaaggatcatatctcttttgggaatttgccacagagaaggaggaagaggagcgaaggcggcgtgaagaggaagaaagagaacgtctgcaaaaggaggaagagaaacgtaggagagaagaagaggaaaggcttcgacgggaggaagaggaaaggagacggatagaagaagaaaggcttcggttggagcagcaaaagcagcagataatggcagctttaaactcccagactgccgtgcagttccagcagtatgcagcccaacagtatccagggaactacgaacagcagcaaattctcatccgccagttgcaggagcaacactatcagcagtacatgcagcagttgtatcaagtccagcttgcacagcaacaggcagcattacagaaacaacaggaagtagtagtggctgggtcttccttgcctacatcatcaaaagtgaatgcaactgtaccaagtaatatgatgtcagttaatggacaggccaaaacacacactgacagctccgaaaaagaactggaaccagaagctgcagaagaagccctggagaatggaccaaaagaatctcttccagtaatagcagctccatccatgtggacacgacctcagatcaaagacttcaaagagaagattcagcaggatgcagattccgtgattacagtgggccgaggagaagtggtcactgttcgagtacccacccatgaagaaggatcatatctcttttgggaatttgccacagacaattatgacattgggtttggggtgtattttgaatggacagactctccaaacactgctgtcagcgtgcatgtcagtgagtccagcgatgacgacgaggaggaagaagaaaacatcggttgtgaagagaaagccaaaaagaatgccaacaagcctttgctggatgagattgtgcctgtgtaccgacgggactgtcatgaggaggtgtatgctggcagccatcaatatccagggagaggagtctatctcctcaagtttgacaactcctactctttgtggcggtcaaaatcagtctactacagagtctattatactagataaaaatgttgttacaaagtctggagtctagggttgggcagaagatgacatttaatttggaaatttctttttacttttgtggagcattagagtcacagtttaccttattgatattggtctgatggtttgtgaactcttgctgggaatcaaaatttccttgagactctttagcattcatactttggggttaaaggagattcctcagactcatccagcccttgggtgctgaccagcagagtcactagtggatgctgaagttacatgagctacatgttaaatatttaaagtctccaaaataaaacaccccaacgttgaccttacccggctgatggttagccccttgctgcctgctccatgtgtcttatgagagcccgtagttacagtgtcctctaatttgaaatccataagttaacaagtctatatcaggtgcagctggctttgattaaaggccatttttaaaacttaaaaactcaacacctcacagattataatagaaaaagaaatggcctcagtttgatctcgttcagaatgacccagattgtttctgctttgggtgcagctgtttagttcagagttatattacagagaattattttctgagataatcttaaactagaatgttcaaaactaattgataattgaagtatcaagatacgtagaacacctcagagatttttcttcaggaacttccacaaactttgaatccttgtatctttatttggtattcatactactagtagcaaaatacaggttttttgttttgttttgttttggcttcatagagtatctcaaattgaaacttttctgcacaaagaataaaattaaggattttataaactcaaattggcacctactgaattaaaatacataaaatcatttaaatataattcagcatatgggaagtaacattgcactaatatggaaatcactgccagagacagtctattttcttttaatttgttactacttagtcacaaaccccacattattccagtttggaattacttattaaggagaattggaaatacatatgcccatgcttaaattttatagctttaatttgtgttatttctttattgacgggaagaggtacatctttttttccttactgaaaacaaatatggattaattgcctcaaatttgtataagtgattggctagtgattcttgttttcagaagggagagtggtatagatagaaaatgacaaagatggcaatatacacttaatgttgttattgtatgttgttactgaagtacttagatttttaaaatttcaaatcctaaatcacttcttgtaggagggttttcattaactgcagtatatacagttcactacatatgggttgtttgagttttttgtgtgctgtatttctttctgttttttaatacctggttttgtacatatctaactctgttctcttttggttgttcagaaactggattttttttttcttaagcagtgcttaatttgtgttttttaattttgattcagaagtagtcccagctcataggtgttcatactgttacatccagaacatttgtcaggctctctgtcagctttcatgtacatatggtatagaaaccatggagttaggcacttcctggattttttttttatgagaaaaatactgtatttaaaatgtaaaataaacttttaaaaagcaggcactaatatatatttcttccagcctttgattacaaatttgtccttgcacatgttaagatgaattatctcctaaaaatatcattgttcttgggagcagtgtatgttactttacatagcagcggttcctgtcatgtgttcatgtcagaatatttttggttttaaactttcttattgcctttggctgttgattagtacagtacaagtgcgatttcaaaaagatcttgaaagtaatatatttaatcaattaaaatgtttatctgtaa

SEQ ID NO: 277218 - DNA, 3268 bp, Homo sapiens
ggaagtcgatacgtggctgccgtctgtccccgctgaggaggtgcagcagccggagatggcggcggtgctgaacgcagagcgactcgaggtgtccgtcgacggcctcacgctcagcccggacccggaggagcggcctggggcggagggcgccccgctgctgccgccaccgctgccaccgccctcgccacctggatccggtcgcggcccgggcgcctcaggggagcagcccgagcccggggaggcggcggctgggggcgcggcggaggaggcgcggcggctggagcagcgctggggtttcggcctggaggagttgtacggcctggcactgcgcttcttcaaagaaaaagatggcaaagcatttcatccaacttatgaagaaaaattgaagcttgtggcactgcataagcaagttcttatgggcccatataatccagacacttgtcctgaggttggattctttgatgtgttggggaatgacaggaggagagaatgggcagccctgggaaacatgtctaaagaggatgccatggtggagtttgtcaagctcttaaataggtgttgccatctcttttcaacatatgttgcgtcccacaaaatagagaaggaagagcaagacaaaaaaaggaaggaggaagaggagcgaaggcggcgtgaagaggaagaaagagaacgtctgcaaaaggaggaagagaaacgtaggagagaagaagaggaaaggcttcgacgggaggaagaggaaaggagacggatagaagaagaaaggcttcggttggagcagcaaaagcagcagataatggcagctttaaactcccagactgccgtgcagttccagcagtatgcagcccaacagtatccagggaactacgaacagcagcaaattctcatccgccagttgcaggagcaacactatcagcagtacatgcagcagttgtatcaagtccagcttgcacagcaacaggcagcattacagaaacaacaggaagtagtagtggctgggtcttccttgcctacatcatcaaaagtgaatgcaactgtaccaagtaatatgatgtcagttaatggacaggccaaaacacacactgacagctccgaaaaagaactggaaccagaagctgcagaagaagccctggagaatggaccaaaagaatctcttccagtaatagcagctccatccatgtggacacgacctcagatcaaagacttcaaagagaagattcagcaggatgcagattccgtgattacagtgggccgaggagaagtggtcactgttcgagtacccacccatgaagaaggatcatatctcttttgggaatttgccacagacaattatgacattgggtttggggtgtattttgaatggacagactctccaaacactgctgtcagcgtgcatgtcagtgagtccagcgatgacgacgaggaggaagaagaaaacatcggttgtgaagagaaagccaaaaagaatgccaacaagcctttgctggatgagattgtgcctgtgtaccgacgggactgtcatgaggaggtgtatgctggcagccatcaatatccagggagaggagtctatctcctcaagtttgacaactcctactctttgtggcggtcaaaatcagtctactacagagtctattatactagataaaaatgttgttacaaagtctggagtctagggttgggcagaagatgacatttaatttggaaatttctttttacttttgtggagcattagagtcacagtttaccttattgatattggtctgatggtttgtgaactcttgctgggaatcaaaatttccttgagactctttagcattcatactttggggttaaaggagattcctcagactcatccagcccttgggtgctgaccagcagagtcactagtggatgctgaagttacatgagctacatgttaaatatttaaagtctccaaaataaaacaccccaacgttgaccttacccggctgatggttagccccttgctgcctgctccatgtgtcttatgagagcccgtagttacagtgtcctctaatttgaaatccataagttaacaagtctatatcaggtgcagctggctttgattaaaggccatttttaaaacttaaaaactcaacacctcacagattataatagaaaaagaaatggcctcagtttgatctcgttcagaatgacccagattgtttctgctttgggtgcagctgtttagttcagagttatattacagagaattattttctgagataatcttaaactagaatgttcaaaactaattgataattgaagtatcaagatacgtagaacacctcagagatttttcttcaggaacttccacaaactttgaatccttgtatctttatttggtattcatactactagtagcaaaatacaggttttttgttttgttttgttttggcttcatagagtatctcaaattgaaacttttctgcacaaagaataaaattaaggattttataaactcaaattggcacctactgaattaaaatacataaaatcatttaaatataattcagcatatgggaagtaacattgcactaatatggaaatcactgccagagacagtctattttcttttaatttgttactacttagtcacaaaccccacattattccagtttggaattacttattaaggagaattggaaatacatatgcccatgcttaaattttatagctttaatttgtgttatttctttctgttttttaatacctggttttgtacatatctaactctgttctcttttggttgttcagaaactggattttttttttcttaagcagtgcttaatttgtgttttttaattttgattcagaagtagtcccagctcataggtgttcatactgttacatccagaacatttgtcaggctctctgtcagctttcatgtacatatggtatagaaaccatggagttaggcacttcctggattttttttttatgagaaaaatactgtatttaaaatgtaaaataaacttttaaaaagcaggcactaatatatatttcttccagcctttgattacaaatttgtccttgcacatgttaagatgaattatctcctaaaaatatcattgttcttgggagcagtgtatgttactttacatagcagcggttcctgtcatgtgttcatgtcagaatatttttggttttaaactttcttattgcctttggctgttgattagtacagtacaagtgcgatttcaaaaagatcttgaaagtaatatatttaatcaattaaaatgtttatctgtaa

SEQ ID NO: 277219 - DNA, 2252 bp, Homo sapiens
gttaaggcatatcgtcgacccacgcgctccggtattttgaatggacagactctccaaacactgctgtcagcgtgcatgtcagtgagtccagcgatgacgacgaggaggaagaagaaaacatcggttgtgaagagaaagccaaaaagaatgccaacaagcctttgctggatgagattgtgcctgtgtaccgacgggactgtcatgaggaggtgtatgctggcagccatcaatatccagggagaggagtctatctcctcaagtttgacaactcctactctttgtggcggtcaaaatcagtctactacagagtctattatactagataaaaatgttgttacaaagtctggagtctagggttgggcagaagatgacatttaatttggaaatttctttttacttttgtggagcattagagtcacagtttaccttattgatattggtctgatggtttgtgaactcttgctgggaatcaaaatttccttgagactctttagcattcatactttggggttaaaggagattcctcagactcatccagcccttgggtgctgaccagcagagtcactagtggatgctgaagttacatgagctacatgttaaatatttaaagtctccaaaataaaacaccccaacgttgaccttacccggctgatggttagccccttgctgcctgctccatgtgtcttatgagagcccgtagttacagtgtcctctaatttgaaatccataagttaacaagtctatatcaggtgcagctggctttgattaaaggccatttttaaaacttaaaaactcaacacctcacagattataatagaaaaagaaatggcctcagtttgatctcgttcagaatgacccagattgtttctgctttgggtgcagctgtttagttcagagttatattacagagaattattttctgagataatcttaaactagaatgttcaaaactaattgataattgaagtatcaagatacgtagaacacctcagagatttttcttcaggaacttccacaaactttgaatccttgtatctttatttggtattcatactactagtagcaaaatacaggttttttgttttgttttgttttggcttcatagagtatctcaaattgaaacttttctgcacaaagaataaaattaaggattttataaactcaaattggcacctactgaattaaaatacataaaatcatttaaatataattcagcatatgggaagtaacattgcactaatatggaaatcactgccagagacagtctattttcttttaatttgttactacttagtcacaaaccccacattattccagtttggaattacttattaaggagaattggaaatacatatgcccatgcttaaattttatagctttaatttgtgttatttctttattgacgggaagaggtacatctttttttccttactgaaaacaaatatggattaattgcctcaaatttgtataagtgattggctagtgattcttgttttcagaagggagagtggtatagatagaaaatgacaaagatggcaatatacacttaatgttgttattgtatgttgttactgaagtacttagatttttaaaatttcaaatcctaaatcacttcttgtaggagggttttcattaactgcagtatatacagttcactacatatgggttgtttgagttttttgtgtgctgtatttctttctgttttttaatacctggttttgtacatatctaactctgttctcttttggttgttcagaaactggattttttttttcttaagcagtgcttaatttgtgttttttaattttgattcagaagtagtcccagctcataggtgttcatactgttacatccagaacatttgtcaggctctctgtcagctttcatgtacatatggtatagaaaccatggagttaggcacttcctggattttttttttatgagaaaaatactgtatttaaaatgtaaaataaacttttaaaaagcaggcactaatatatatttcttccagcctttgattacaaatttgtccttgcacatgttaagatgaattatctcctaaaaatatcattgttcttgggagcagtgtatgttactttacatagcagcggttcctgtcatgtgttcatgtcagaatatttttggttttaaactttcttattgcctttggctgttgattagtacagtacaagtgcgatttcaaaaagatcttgaaagtaatatatttaatcaattaaaatgtttatctgtaa

SEQ ID NO: 277220 - DNA, 1345 bp, Homo sapiens
ctatagactaacttggaagctactcgacgcatcacgctacgtaacgaccgtcgagcaggatgtttatctatcatgagaaacgttcgcgacaacacgtctagtaactccattgatagttctctatatattgggtgattcattacgtacatagatatgcaaaatacaggttttttgttttgttttgttttggcttcatagagtatctcaaattgaaacttttctgcacaaagaataaaattaaggattttataaactcaaattggcacctactgaattaaaatacataaaatcatttaaatataattcagcatatgggaagtaacattgcactaatatggaaatcactgccagagacagtctattttcttttaatttgttactacttagtcacaaaccccacattattccagtttggaattacttattaaggagaattggaaatacatatgcccatgcttaaattttatagctttaatttgtgttatttctttattgacgggaagaggtacatctttttttccttactgaaaacaaatatggattaattgcctcaaatttgtataagtgattggctagtgattcttgttttcagaagggagagtggtatagatagaaaatgacaaagatggcaatatacacttaatgttgttattgtatgttgttactgaagtacttagatttttaaaatttcaaatcctaaatcacttcttgtaggagggttttcattaactgcagtatatacagttcactacatatgggttgtttgagttttttgtgtgctgtatttctttctgttttttaatacctggttttgtacatatctaactctgttctcttttggttgttcagaaactggattttttttttcttaagcagtgcttaatttgtgttttttaattttgattcagaagtagtcccagctcataggtgttcatactgttacatccagaacatttgtcaggctctctgtcagctttcatgtacatatggtatagaaaccatggagttaggcacttcctggattttttttttatgagaaaaatactgtatttaaaatgtaaaataaacttttaaaaagcaggcactaatatatatttcttccagcctttgattacaaatttgtccttgcacatgttaagatgaattatctcctaaaaatatcattgttcttgggagcagtgtatgttactttacatagcagcggttcctgtcatgtgttcatgtcagaatatttttggttttaaactttcttattgcctttggctgttgattagtacagtacaagtgcgatttcaaaaagatcttgaaagtaatatatttaatcaattaaaatgtttatctgtaa

SEQ ID NO: 277221 - DNA, 1341 bp, Homo sapiens
ggaagtcgatacgtggctgccgtctgtccccgctgaggaggtgcagcagccggagatggcggcggtgctgaacgcagagcgactcgaggtgtccgtcgacggcctcacgctcagcccggacccggaggagcggcctggggcggagggcgccccgctgctgccgccaccgctgccaccgccctcgccacctggatccggtcgcggcccgggcgcctcaggggagcagcccgagcccggggaggcggcggctgggggcgcggcggaggaggcgcggcggctggagcagcgctggggtttcggcctggaggagttgtacggcctggcactgcgcttcttcaaagaaaaagatggcaaagcatttcatccaacttatgaagaaaaattgaagcttgtggcactgcataagcaagttcttatgggcccatataatccagacacttgtcctgaggttggattctttgatgtgttggggaatgacaggaggagagaatgggcagccctgggaaacatgtctaaagaggatgccatggtggagtttgtcaagctcttaaataggtgttgccatctcttttcaacatatgttgcgtcccacaaaatagagaaggaagagcaagacaaaaaaaggaaggaggaagaggagcgaaggcggcgtgaagaggaagaaagagaacgtctgcaaaaggaggaagagaaacgtaggagagaagaagaggaaaggcttcgacgggaggaagaggaaaggagacggatagaagaagaaaggcttcggttggagcagcaaaagcagcagataatggcagctttaaactcccagactgccgtgcagttccagcagtatgcagcccaacagtatccagggaactacgaacagcagcaaattctcatccgccagttgcaggagcaacactatcagcagtacatgcagcagttgtatcaagtccagcttgcacagcaacaggcagcattacagaaacaacaggaagtagtagtggctgggtcttccttgcctacatcatcaaaagtgaatgcaactgtaccaagtaatatgatgtcagttaatggacaggccaaaacacacactgacagctccgaaaaagaactggaaccagaagctgcagaagaagccctggagaatggaccaaaagaatctcttccagtaatagcagctccatccatgtggacacgacctcagatcaaagacttcaaagagaagattcagcaggatgcagattccgtgattacagtgggccgaggagaagtggtcactgttcgagtacccacccatgaagaaggatcatatctctttataattcattggccctagggagatcaggtcggtgt

SEQ ID NO: 277222 - DNA, 1557 bp, Homo sapiens
ggaagtcgatacgtggctgccgtctgtccccgctgaggaggtgcagcagccggagatggcggcggtgctgaacgcagagcgactcgaggtgtccgtcgacggcctcacgctcagcccggacccggaggagcggcctggggcggagggcgccccgctgctgccgccaccgctgccaccgccctcgccacctggatccggtcgcggcccgggcgcctcaggggagcagcccgagcccggggaggcggcggctgggggcgcggcggaggaggcgcggcggctggagcagcgctggggtttcggcctggaggagttgtacggcctggcactgcgcttcttcaaagaaaaagatggcaaagcatttcatccaacttatgaagaaaaattgaagcttgtggcactgcataagcaagttcttatgggcccatataatccagacacttgtcctgaggttggattctttgatgtgttggggaatgacaggaggagagaatgggcagccctgggaaacatgtctaaagaggatgccatggtggagtttgtcaagctcttaaataggtgttgccatctcttttcaacatatgttgcgtcccacaaaatagagaaggaagagcaagacaaaaaaaggaaggaggaagaggagcgaaggcggcgtgaagaggaagaaagagaacgtctgcaaaaggaggaagagaaacgtaggagagaagaagaggaaaggcttcgacgggaggaagaggaaaggagacggatagaagaagaaaggcttcggttggagcagcaaaagcagcagataatggcagctttaaactcccagactgccgtgcagttccagcagtatgcagcccaacagtatccagggaactacgaacagcagcaaattctcatccgccagttgcaggagcaacactatcagcagtacatgcagcagttgtatcaagtccagcttgcacagcaacaggcagcattacagaaacaacaggaagtagtagtggctgggtcttccttgcctacatcatcaaaagtgaatgcaactgtaccaagtaatatgatgtcagttaatggacaggccaaaacacacactgacagctccgaaaaagaactggaaccagaagctgcagaagaagccctggagaatggaccaaaaggtaggttttgcatatgtgtttgtccagatgtcataattccaaatctgtgaaaggcaaaagtcatgaagtcaggttataattagcttttgagaacaattacatatttgtgagagttgaacatttttttactctttttagtctgaatctaatgctctggtgactcatagaccagtgtagaagagcaaatcagatgtctttggacacttttaagacaaaagttatgttttgtcatatatatatatataaattatctattgctgcataacaaattacaggctgggcgcagtggctcatacctgtaatcccagcactctgggaggctgaggcaggaagatcacttgagcccaagagtttgaggctgcagtgaactatgattccgcctgcctgggtgacaaagcaagactgtctctca

SEQ ID NO: 277223 - DNA, 1382 bp, Homo sapiens
ggaagtcgatacgtggctgccgtctgtccccgctgaggaggtgcagcagccggagatggcggcggtgctgaacgcagagcgactcgaggtgtccgtcgacggcctcacgctcagcccggacccggaggagcggcctggggcggagggcgccccgctgctgccgccaccgctgccaccgccctcgccacctggatccggtcgcggcccgggcgcctcaggggagcagcccgagcccggggaggcggcggctgggggcgcggcggaggaggcgcggcggctggagcagcgctggggtttcggcctggaggagttgtacggcctggcactgcgcttcttcaaagaaaaagatggcaaagcatttcatccaacttatgaagaaaaattgaagcttgtggcactgcataagcaagttcttatgggcccatataatccagacacttgtcctgaggttggattctttgatgtgttggggaatgacaggaggagagaatgggcagccctgggaaacatgtctaaagaggatgccatggtggagtttgtcaagctcttaaataggtgttgccatctcttttcaacatatgttgcgtcccacaaaatagagaaggaagagcaagacaaaaaaaggaaggaggaagaggagcgaaggcggcgtgaagaggaagaaagagaacgtctgcaaaaggaggaagagaaacgtaggagagaagaagaggaaaggcttcgacgggaggaagaggaaaggagacggatagaagaagaaaggcttcggttggagcagcaaaagcagcattacagaaacaacaggaagtagtagtggctgggtcttccttgcctacatcatcaaaagtgaatgcaactgtaccaagtaatatgatgtcagttaatggacaggccaaaacacacactgacagctccgaaaaagaactggaaccagaagctgcagaagaagccctggagaatggaccaaaaggtaggttttgcatatgtgtttgtccagatgtcataattccaaatctgtgaaaggcaaaagtcatgaagtcaggttataattagcttttgagaacaattacatatttgtgagagttgaacatttttttactctttttagtctgaatctaatgctctggtgactcatagaccagtgtagaagagcaaatcagatgtctttggacacttttaagacaaaagttatgttttgtcatatatatatatataaattatctattgctgcataacaaattacaggctgggcgcagtggctcatacctgtaatcccagcactctgggaggctgaggcaggaagatcacttgagcccaagagtttgaggctgcagtgaactatgattccgcctgcctgggtgacaaagcaagactgtctctca

SEQ ID NO: 277224 - DNA, 643 bp, Homo sapiens
gtgagtccagcgatgacgacgaggaggaagaaggtagaacccttggtccatattcagtagctgctgggttgtgtgttggcagaaatggtacatagttcaggtgtcacccagccttatgcttcctgactaacacttcatggttagggaacactttcttcattagtgggaccttgggctgaaaatgttatgaggccaggctcctgtaggggactggggcctaaacctgaatttttctgaatgccaggaaaatctatttggcaatttgctattttactcctttctgaatactattttacttctaaccgtgtgtgttgaaaagccaaatatgcaagattacttcaaaaaaaatttttttttttttgagacagggtctcactctgtcacccaggctggagtgcagtggcatgatctctgctcacagtagtctcggcctcttaggttcaagcgattctcctgcctcagcctcctgagtagctgggattacaggcacgcaccactgtgccggctaattttttgtatttttagtagagacgaggtttcaccatgttggtcaggctggtctcgaactcctgaccttgtgatccacccgcctcggcctcccaaagtgctgggattacaggcgtgagccacagcacccgaccca

SEQ ID NO: 277225 - DNA, 475 bp, Homo sapiens
gggcaacagagtgagactctctctaaaaataaaaaaattttttaaaagtagtaattgaaataaaaatttcactattagtgtttgtgtctattacaggcagtttgtgacatgctttgtagcaaagctttagtatataatgctgaaaattatgtattttgcctgtgctaattgttttctttgtgtttctttttcttatagaaaaagatggcaaagcatttcatccaacttatgaagaaaaattgaagcttgtggcactgcataagcaagttcttatgggcccatataatccagacacttgtcctgaggttggattctttgatgtgttggggaatgacaggaggtaacagtgtttttctgtatagtgaatttaatgaggataatgttggcaaagggtacaatgtgtattggttaaggtgtaagtagctggttcattagcttaggataagaactgaacatttttgcttgcagcttctgg

SEQ ID NO: 277226 - DNA, 643 bp, Homo sapiens
acctttcaaagtcacagttccaatggtttttgtaaggtcaaccagaggcagagaacacaatcatggtggcttaccgtcaaaatcatgacaagttgtcaacctaatgccttctgtcaaacataaccaccacccactctgcttctgtcctgtgaggaatgacgggaagtagggagtcaagacttgatattaatgtagatcgcatgtgacacttgcgtggccagcagacaaggccccccacccatgcccaggcttggacaaaatggtggctatgttttctgtgccaaacctcctcatctctgccatgtctagcctagaccttgaagtgtctgatcctccccggacatggaggaaccactggcccagcagcagcaccaacactaggctgcaccactgtgcgtgttttccgggggtgcgacacttctcctgagggtgaccccaatgagaccacacccatgaaggtgtgtggcgcaggtcatagtgcgcccgatgcaactggtgtcctggaggagctgccagtaacacatgggagtctgggggtgagccagctggagggagtccaggtgcgccaaagtgaaggggacggaggtgcatctgggtccaccacgggtgtggggactgcttcattggcaccttctggttgggg

SEQ ID NO: 277227 - DNA, 1067 bp, Homo sapiens
aaggatccagaatgggacggatttggctcctccaggaagaaagcaaaacaaatgcaggtcgcgaacactttacattgcaggaagctgctcttccagtggccgcggctgggtccttccacaccacctctctgtcctaggccttcgtcccggttcagccctcacggattctaggctagcggtcaacaaccgcatccctccggaacctggaaactctaggtccgagatctcggtgaagaatgaaaggcacagcgccgctcaacccaggcttcaggcctgccccgctggtcccgtcccttccctgtgggatggaactctgtgggaatcgctccttattctgatggttcactcattcagatgtccttgatatttggggatatttctaaaacagctggggagaaaaatggactgcgaggctccggtgttggacgtgaaattggcagtgagacatccgcctctaagcccagggaaaagcttaaattgtggttctctgtctctagcaccgtgatctttgaaatgcgttattgattttcttctttcttctgggaaatgcaatgcaggtgaacttgtaagtgttgaatcctccctctcctcactgttcaatcagactgaggcctacttcctttctgataagaaatatggaactgccattgctcagtaggaaaatgtcctttctacaagcattcatatttcaataaaaatctgcactttgtgagttgagccccctcaaagagacctacagaccctgccatgagcatctccatccacactcatcatttcccattttcaccacttctgctcctgtgcaaaccagtactatccttttctgggggatcctaggcagaagcgatggcaggacaaaggcagagaaggcactgccaggtcctgcatgccagtaaaactactcatgtcagctgttctgcaggatcccatgagaagatggcctaattggattatttcagcaagctaagtaatttgaagagagaggctaagccaatgtagtactagagctacactggccttctttggcttaacatttgtctggaattataatttcctcaatctaagaa

SEQ ID NO: 277228 - DNA, 1144 bp, Homo sapiens
aaggatccagaatgggacggatttggctcctccaggaagaaagcaaaacaaatgcaggtcgcgaacactttacattgcaggaagctgctcttccagtggccgcggctgggtccttccacaccacctctctgtcctaggccttcgtcccggttcagccctcacggattctaggctagcggtcaacaaccgcatccctccggaacctggaaactctaggtccgagatctcggtgaagaatgaaaggcacagcgccgctcaacccaggcttcaggcctgccccgctggtcccgtcccttccctgtgggatggaactctgtgggaatcgctccttattctgatggttcactcattcagatgtccttgatatttggggatatttctaaaacagctggggagaaaaatggactgcgaggctccggtgttggacgtgaaattggcagtgagacatccgcctctaagcccagggaaaagcttaaattgtggttctctgtctctagcaccgtgatctttgaaatgcgttattgattttcttctttcttctgggaaatgcaatgcaggtgaacttgtaagtgttgaatcctccctctcctcactgttcaatcagactgaggcctacttcctttctgataagaaatatggaactgccattgctcagtaggaaaatgtcctttctacaagcattcatatttcaataaaaatctgcactttgtgagttgagccccctcaaagagacctacagaccctgccatgagcatctccatccacactcatcatttcccattttcaccacttctgctcctgtgcaaaccagtactatccttttctgggggatcctaggcagaagcgatggcaggacaaaggcagagaaggcactgccaggtcctgcatgccagtaaaactactcatgtcagctgttctgcaggatcccatgagaaggtgagtcaccagaaaatgcagtttccacatcctgatgatttcatctccctaccccaactgatcaatttctccaattttccagcctctcaccctccacaatccccttaaaaactgtagcccagaactctctggaatgatgaatttgaaggtttgctcctgtctcctcactcagaagcctgtaatcattaaactctttctctgatgcaaa

SEQ ID NO: 277229 - DNA, 1260 bp, Homo sapiens
aaggatccagaatgggacggatttggctcctccaggaagaaagcaaaacaaatgcaggtcgcgaacactttacattgcaggaagctgctcttccagtggccgcggctgggtccttccacaccacctctctgtcctaggccttcgtcccggttcagccctcacggattctaggctagcggtcaacaaccgcatccctccggaacctggaaactctaggtccgagatctcggtgaagaatgaaaggcacagcgccgctcaacccaggcttcaggcctgccccgctggtcccgtcccttccctgtgggatggaactctgtgggaatcgctccttattctgatggttcactcattcagatgtccttgatatttggggatatttctaaaacagctggggagaaaaatggactgcgaggctccggtgttggacgtgaaattggcagtgagacatccgcctctaagcccagggaaaagcttaaattgtggttctctgtctctagcaccgtgatctttgaaatgcgttattgattttcttctttcttctgggaaatgcaatgcaggtgaacttgtaagtgttgaatcctccctctcctcactgttcaatcagactgaggcctacttcctttctgataagaaatatggaactgccattgctcagtaggaaaatgtcctttctacaagcattcatatttcaataaaaatctgcactttgtgagttgagccccctcaaagagacctacagaccctgccatgagcatctccatccacactcatcatttcccattttcaccacttctgctcctgtgcaaaccagtactatccttttctgggggatcctaggcagaagcgatggcaggacaaaggcagagaaggcactgccaggtcctgcatgccagtaaaactactcatgtcagctgttctgcaggatcccatgagaaggtgagtcaccagaaaatgcagtttccacatcctgatgatttcatctccctaccccaactgatcaatttctccaattttccagcctctcaccctccacaatccccttaaaaactgtagcccagaactctctggaatgatgaatttgaaggtttgctcctgtctcctcactcagaagcctgtaatcattaaactctttctctgatgcaaaaaaaaacaaaaaaacaacacacaaaaacaaaacaacacaaaacacacaacacacaaaaaaaaacaaacacacaagagagggggggcgccgcccccccagacacacgactctccccg

SEQ ID NO: 277230 - DNA, 890 bp, Homo sapiens
aaggatccagaatgggacggatttggctcctccaggaagaaagcaaaacaaatgcaggtcgcgaacactttacattgcaggaagctgctcttccagtggccgcggctgggtccttccacaccacctctctgtcctaggccttcgtcccggttcagccctcacggattctaggctagcggtcaacaaccgcatccctccggaacctggaaactctaggtccgagatctcggtgaagaatgaaaggcacagcgccgctcaacccaggcttcaggcctgccccgctggtcccgtcccttccctgtgggatggaactctgtgggaatcgctccttattctgatggttcactcattcagatgtccttgatatttggggatatttctaaaacagctggggagaaaaatggactgcgaggctccggtgttggacgtgaaattggcagtgagacatccgcctctaagcccagggaaaagcttaaattgtggttctctgtctctagcaccgtgatctttgaaatgcgttattgattttcttctttcttctgggaaatgcaatgcagtactatccttttctgggggatcctaggcagaagcgatggcaggacaaaggcagagaaggcactgccaggtcctgcatgccagtaaaactactcatgtcagctgttctgcaggatcccatgagaaggtgagtcaccagaaaatgcagtttccacatcctgatgatttcatctccctaccccaactgatcaatttctccaattttccagcctctcaccctccacaatccccttaaaaactgtagcccagaactctctggaatgatgaatttgaaggtttgctcctgtctcctcactcagaagcctgtaatcattaaactctttctctgatgcaaa

SEQ ID NO: 277231 - DNA, 359 bp, Homo sapiens
cgaaacttcttccatcgcatttgagagaactcagggtttttgctgcagctcaggtgggaatgcagtgtcatgctcttggcaacctggacctcccaggctcaagggatcctctccgtcagcctccagagtagctggtgatcctcccccctcagcctacagagtagctgggaatacaagtcctgcatgccagtaaaactactcatgtcagctgttctgcaggatcccatgagaagcctctcaccctccacaatccccttaaaaactgtagcccagaactctctggaatgatgaatttgaaggtttgctcctgtctcctcactcagaagcctgtaatcattaaactctttctctgatgcaaa

SEQ ID NO: 277232 - DNA, 439 bp, Homo sapiens
attattgtaactttatttatttatttatttatttacaagaggatcatccaatggaaggtctcagaggaagtttcagggcccaggattccaaaggcgggccgtggacacagtctcagggcgtctgtccccaagcgcatgccatctgcagccagcagtcttggaactttggttggtggcaccaggggacagcagtaggctgacactctcaaaggtcttctcggatggaagtctccggctccagtcgtctgtccactaagcgagaggcgagttgcgagggaggctgcgggggcgggcgggcgtatgttgagaccctatgcagcctcctgctctcccgagggctcctgcggctcctcctgaattgcctgcgccggatccagagcaggcgactctgcgccccgcctccaggtactctgaggcttgggaaagagatcttttcgcc

SEQ ID NO: 277233 - DNA, 528 bp, Homo sapiens
attattgtaactttatttatttatttatttatttacaagaggatcatccaatggaaggtctcagaggaagtttcagggcccaggattccaaaggcgggccgtggacacagtctcagggcgtctgtccccaagcgcatgccatctgcagccagcagtcttggaactttggttggtggcaccaggggacagcagtaggctgacactctcaaaggtcttctcggatggaagtctccggctccagtcgtctgtccactaagcgagaggtcctgcatgccagtaaaactactcatgtcagctgttctgcaggatcccatgagaaggtgagtcaccagaaaatgcagtttccacatcctgatgatttcatctccctaccccaactgatcaatttctccaattttccagcctctcaccctccacaatccccttaaaaactgtagcccagaactctctggaatgatgaatttgaaggtttgctcctgtctcctcactcagaagcctgtaatcattaaactctttctctgatgcaaa

SEQ ID NO: 277234 - DNA, 331 bp, Homo sapiens
tggcctcagagggtctggcggatggctgccgggatcaccgggggctggactttgagatgtccaggacgaagtgttgccctttcagtgctgccctccctgtgtctgctggaactgttggagccgcagtgcagcctaattttgacttcaggtcctgcatgccagtaaaactactcatgtcagctgttctgcaggatcccatgagaagcctctcaccctccacaatccccttaaaaactgtagcccagaactctctggaatgatgaatttgaaggtttgctcctgtctcctcactcagaagcctgtaatcattaaactctttctctgatgcaaa

SEQ ID NO: 277235 - DNA, 491 bp, Homo sapiens
tttctgcctggaatgtgcttttttgtgtatgattaccatcatcttccggctgaagtcttgcccacgctctgcacacttgaatgctccccatcttgaattttctattcctttcaatactttgtctatttctgtaggattttccctctggccttgactagactctatttccactacactgttcctcctccttgagcttactgcatgtcttaggggtgggctggaaaatgccatgggcttagtgcttttttctttctcttgaccttcagctgtgtcactctggaagctttgatcagaaaattgtagttgctgttgcctctgatgtgcaagtccaagattcttgggccgcaggacatgttctgcatatattcctggagaatagaccaacaatgagactgaatcagtaacgaaaagtcttctatgaaagaaaaacccagaaccatattgctttactgcttaattctaataaactcataaagaacaaaaaaaaccaa

SEQ ID NO: 277236 - DNA, 433 bp, Homo sapiens
caacatgctttactcctgccaggcaggttctctgtagccctctggattctgtctgcctctgttatatcttcacgaacaagttatgcagcctcaactaaagcttgtaacaaagcaaagttactctcctgagtgtgtcctctgatggatggtgagatataacttcaagatgaagcctcacccacactccctgtacaaaaacgcttctcacctgtgtcactctggaagctttgatcagaaaattgtagttgctgttgcctctgatgtgcaagtccaagattcttgggccgcaggacatgttctgcatatattcctggagaatagaccaacaatgagactgaatcagtaacgaaaagtcttctatgaaagaaaaacccagaaccatattgctttactgcttaattctaataaactcataaagaacaaaaaaaaccaa

SEQ ID NO: 277237 - DNA, 1131 bp, Homo sapiens
atccacccaccttggccttccaaagtgcagggattactggtgtgagccactgtgcctggccctaagtgtttcttatattagactttcatacttatagagttgtagaatattagaactattaatagatgagaattcaagaagattgagtctaacccctcattttatagataactgagccccagagagattatggaatactagaagtcatatattaaggtgttacttttacagtaaataaaggagatggtagtctactgtattggtgtagacccatagtaaatcatgcctatgggtattcatgctattgtatagtcatctctctttgtatctcgcctagccctgtgactcactttaaccagtagaacatagcaaaaatgacactttgctatttttgggtacaagccttgagcatgtcaggcagcttctacttttgtactcttgggagctctgagttgctgccgtgcaagaagctgtcataccttgctggagagatgatgtggagaggaagagattccaggactatatggaaagagggaggcttaactatctcagtgtcctagctgccttcagcccttagttgacttgcctgttgaatacagacacaaaagtgattagtaagattagcgaaggggccggcgtgggggcttatgactgtgcagtcccagcactctgggaggccaaggcatgtggaacacttgagcccaggagttcaagaccagcccgggcaatatagcaagacactgtctctacaaaaaaatacagaaattagctgagtgtggtggcatgtctctgtagtcctagctacttaggaggctgaggtgggaggattggtcaagcccaggagggtgaggctgcagtgaaccattatcttgccattgcactcaagcctgggcgacagagtgaaaccttgtttctctctctcacacacaaaaaaaagattaacagaggaaccacctagctaagctcagtccaggttacgaaatcataaataagtaaaatgctggttgttttaatctgttttgctggaagcagatagttttctgaattaagggacgctaagaacaaagagtatttggagctgggtgtggtagtacatgcctttagtcccagctacttaggaggttgaggtgg

SEQ ID NO: 277238 - DNA, 493 bp, Homo sapiens
ggggcatttgaactgagcccggaagtttgaataaaatttctatcactagaagctgggcacaggctcaggaggaagacattgcaggaagagggaactgtgtgagggagacatggaggccagagtactgctgacttagagggggaagaaactgatagcattaagcaggatactgagcaagcttcacccaccttctttgtcccttcttacagatattacattgtggggcatggagctgggccttctgagcatgcagagaggagagctggccaggtttctgttcaaaccgaactacgcctatggaacgctgggctcccctcccttgatccccccaaacaccactgtcctgttcaagattgagctgcttgacttcctagactgtgctgagtcagacaagttttgtgctctctcagctgtacgttgcagagcacaaatgtcagcactttatagagagacaaatgggttggtgtttttggtaattcttctagatggcctg

SEQ ID NO: 277239 - DNA, 460 bp, Homo sapiens
ggggcatttgaactgagcccggaagtttgaataaaatttctatcactagaagctgggcacaggctcaggaggaagacattgcaggaagagggaactgtgtgagggagacatggaggccagagtactgctgacttagagggggaagaaactgatagcattaagcaggatactgagcaagcttcacccaccttctttgtcccttcttacagatattacattgtggggcatggagctgggccttctgagcatgcagagaggagagctggccaggtttctgttcaaaccgaactacgcctatggaacgctgggctccatctccaaaagaaaaagaaactataaacatcattgaaagaaactaaagaagacctaaataaatggaaggaaatcatgttcatggattaaaagacttaatattattaaaatttcactacttcagaagtgatctacagattcaacacaa

SEQ ID NO: 277240 - DNA, 413 bp, Homo sapiens
gttttgggtccattttccttacattctttcctctattctagtgaaatactatggatacctggaacacttggacagacccttcgattctaattactttaggaaaactcctcggctaatgaaacttggagagggtaaattcagagtaggagctggagaagaagggattgtttaggagcgagatgaggcaccatgcctcaggctgggaagactgctcagagcgcaggttctttgaattgactttgctgaggctgggttttggtaaaacagccatgttctctccccttgagacctaggcatttgggagatggcttaatgggcaaggtataatctttgcactctgacttaactcaccactgggaatgtttctttgttcatttattaagtaaaaatcgacgaatgcttacttcccacaa

SEQ ID NO: 277241 - DNA, 619 bp, Homo sapiens
aacgatgagtgcctcctcgtggccccagaatgtaatgccgccgtcggtaggggtctgccgggcataaaggggccttcggaaccccaccagagtcacagccaggaagggcagcggggcgcaccaggccgaaggctcacgccacagggagggcagctaggacatggggggaagcgcgttaaaccagggagtcctggaaggggacgacgcccccggccagtccctgtacgagcggttaagtcagaggatgctggacatctcgggggaccggggcgtgctgaaggacgtcatccgagaaggagctggagacctagtggcgcctgatgcttcggtgctagatattacattgtggggcatggagctgggccttctgagcatgcagagaggagagctggccaggtttctgttcaaaccgaactacgcctatggaacgctgggctcccctcccttgatccccccaaacaccactgtcctgttcaagattgagctgcttgacttcctagactgtgctgagtcagacaagttttgtgctctctcagctgtacgttgcagagcacaaatgtcagcactttatagagagacaaatgggttggtgtttttggtaattcttctagatggcctg

SEQ ID NO: 277242 - DNA, 1698 bp, Homo sapiens
aacgatgagtgcctcctcgtggccccagaatgtaatgccgccgtcggtaggggtctgccgggcataaaggggccttcggaaccccaccagagtcacagccaggaagggcagcggggcgcaccaggccgaaggctcacgccacagggagggcagctaggacatggggggaagcgcgttaaaccagggagtcctggaaggggacgacgcccccggccagtccctgtacgagcggttaagtcagaggatgctggacatctcgggggaccggggcgtgctgaaggacgtcatccgagaaggagctggagacctagtggcgcctgatgcttcggtgctagtgaaatactatggatacctggaacacttggacagacccttcgattctaattactttaggaaaactcctcggctaatgaaacttggagaggatattacattgtggggcatggagctgggccttctgagcatgcagagaggagagctggccagatgcttcgtcttgggtaaactcctcgactcccaaggccccagcctccatctttacctcagagcctcctgaacctcctcctccagcctcaccttcctccagcctcaccactcctccctggacctgcagctccgcacccccgggggcctcagaactaccccttccagggcctcagaactacccctacagtttctcctgcgtaaccttctgcctaccttcctgagagtggttggtgacagcagccggggctagaaacctcgaggcgactgtgcttgagtcctctcttgctctttacatcccaaatcccatcaattgtcacgccttgtgccttccgcctctcaaatattcagaaagcagatgtatgctgggcacggtggtgactcaagcctataatcccagcacttcggaaggcggaggcaggaggatcgcttgaggccaggaattttagaccagccggggcaacatagtgaaaccctgttctcctaaaaaacacaaaaattagtcgggtgtggtggcgggcacctatgatcacagctactcaggagggtgaggcaggagaatcgcttgaacctaggaggcggaggctgcagtgggctgagatcgcaccactgcactccagcctgggggacagagcgagaccccgtctcaaacaaacaaaacaaaacaaaatgaggacaatggggcttccaatggcaactcgagacgttagtttactccagagtcatggagacagtgaatggagtgtgtgtgtgtgtgtgtgtgtgtgtgtgtgcgtgtgcgtgagtgagagagagagagaggaagaagggagggagggacggttacaggagtgtgggaaagtcaacaggaaaaggagggaaggttcgctgtgaactgacagtaactgtgacatcacaggcatgtgcggagtccccgcccccccaggcactgtgccaaggccagtaccttcatgtcatgagaccctctcagcaactctgtaaccttgtccccaccagaatattcctttcacagctgagaaaacaacagcacagagaggatgaattaaaaattgtctaacatgctgggcgcagtggctcacgcctgtaatcccagcactttgggatgatgaggcaggtggatcacaaggtcaagagatcaagaccatcctggctaacacggtgaaaacccgtctctactaaaaatacaaaaaagttagccaggcgtggtggcgggcg

SEQ ID NO: 277243 - DNA, 1682 bp, Homo sapiens
aacgatgagtgcctcctcgtggccccagaatgtaatgccgccgtcggtaggggtctgccgggcataaaggggccttcggaaccccaccagagtcacagccaggaagggcagcggggcgcaccaggccgaaggctcacgccacagggagggcagctaggacatggggggaagcgcgttaaaccagggagtcctggaaggggacgacgcccccggccagtccctgtacgagcggttaagtcagaggatgctggacatctcgggggaccggggcgtgctgaaggacgtcatccgagaaggagctggagacctagtggcgcctgatgcttcggtgctagtgaaatactatggatacctggaacacttggacagacccttcgattctaattactttaggaaaactcctcggctaatgaaacttggagaggatattacattgtggggcatggagctgggccttctgagcatgcagagaggagagctggccagatgcttcgtcttgggtaaactcctcgactcccaaggccccagcctccatctttacctcagagcctcctgaacctcctcctccagcctcaccttcctccagcctcaccactcctccctggacctgcagctccgcacccccgggggcctcagaactaccccttccagggcctcagaactacccctacagtttctcctgcgtaaccttctgcctaccttcctgagagtggttggtgacagcagccggggctagaaacctcgaggcgactgtgcttgagtcctctcttgctctttacatcccaaatcccatcaattgtcacgccttgtgccttccgcctctcaaatattcagaaagcagatgtatgctgggcacggtggtgactcaagcctataatcccagcacttcggaaggcggaggcaggaggatcgcttgaggccaggaattttagaccagccggggcaacatagtgaaaccctgttctcctaaaaaacacaaaaattagtcgggtgtggtggcgggcacctatgatcacagctactcaggagggtgaggcaggagaatcgcttgaacctaggaggcggaggctgcagtgggctgagatcgcaccactgcactccagcctgggggacagagcgagaccccgtctcaaacaaacaaaacaaaacaaaatgaggacaatggggcttccaatggcaactcgagacgttagtttactccagagtcatggagacagtgaatggagtgtgtgtgtgtgtgtgtgtgtgtgagtgagagagagagagaggaagaagggagggagggacggttacaggagtgtgggaaagtcaacaggaaaaggagggaaggttcgctgtgaactgacagtaactgtgacatcacaggcatgtgcggagtccccgcccccccaggcactgtgccaaggccagtaccttcatgtcatgagaccctctcagcaactctgtaaccttgtccccaccagaatattcctttcacagctgagaaaacaacagcacagagaggatgaattaaaaattgtctaacatgctgggcgcagtggctcacgcctgtaatcccagcactttgggatgatgaggcaggtggatcacaaggtcaagagatcaagaccatcctggctaacacggtgaaaacccgtctctactaaaaatacaaaaaagttagccaggcgtggtggcgggcg

SEQ ID NO: 277244 - DNA, 1482 bp, Homo sapiens
ggggcatttgaactgagcccggaagtttgaataaaatttctatcactagaagctgggcacaggctcaggaggaagacattgcaggaagagggaactgtgtgagggagacatggaggccagagtactgctgacttagagggggaagaaactgatagcattaagcaggatactgagcaagcttcacccaccttctttgtcccttcttacagatattacattgtggggcatggagctgggccttctgagcatgcagagaggagagctggccagatgcttcgtcttgggtaaactcctcgactcccaaggccccagcctccatctttacctcagagcctcctgaacctcctcctccagcctcaccttcctccagcctcaccactcctccctggacctgcagctccgcacccccgggggcctcagaactaccccttccagggcctcagaactacccctacagtttctcctgcgtaaccttctgcctaccttcctgagagtggttggtgacagcagccggggctagaaacctcgaggcgactgtgcttgagtcctctcttgctctttacatcccaaatcccatcaattgtcacgccttgtgccttccgcctctcaaatattcagaaagcagatgtatgctgggcacggtggtgactcaagcctataatcccagcacttcggaaggcggaggcaggaggatcgcttgaggccaggaattttagaccagccggggcaacatagtgaaaccctgttctcctaaaaaacacaaaaattagtcgggtgtggtggcgggcacctatgatcacagctactcaggagggtgaggcaggagaatcgcttgaacctaggaggcggaggctgcagtgggctgagatcgcaccactgcactccagcctgggggacagagcgagaccccgtctcaaacaaacaaaacaaaacaaaatgaggacaatggggcttccaatggcaactcgagacgttagtttactccagagtcatggagacagtgaatggagtgtgtgtgtgtgtgtgtgtgtgtgtgtgtgcgtgtgcgtgagtgagagagagagagaggaagaagggagggagggacggttacaggagtgtgggaaagtcaacaggaaaaggagggaaggttcgctgtgaactgacagtaactgtgacatcacaggcatgtgcggagtccccgcccccccaggcactgtgccaaggccagtaccttcatgtcatgagaccctctcagcaactctgtaaccttgtccccaccagaatattcctttcacagctgagaaaacaacagcacagagaggatgaattaaaaattgtctaacatgctgggcgcagtggctcacgcctgtaatcccagcactttgggatgatgaggcaggtggatcacaaggtcaagagatcaagaccatcctggctaacacggtgaaaacccgtctctactaaaaatacaaaaaagttagccaggcgtggtggcgggcg

SEQ ID NO: 277245 - DNA, 260 bp, Homo sapiens
ggaagtcaaaagtgcctataacccatgaaagtctaaatgaggacaacggaggctgggcatggtggctcactcctgtaatcccagcactttgggaggccaaggtgggcggatcacctgaggtcaggagtttgagaccagcctggccaacataggtgaaaccctgttctcctaaaaaacacaaaaattagtcgggtgtggtggcgggcacctatgatcacagctactcaggagggtgaggcaggagaatcgcttgaacctag

SEQ ID NO: 277246 - DNA, 456 bp, Homo sapiens
agcttaactgatgagatccattttctcttccatcaagcatcttcttgtgtattgtcttaatccaaatccttgacagaaatgctgaagaggacctctgtaggctaggttgatcctgaattctcaaatagcactgactggtacgcagtttaaccaagtcagtttcacctaaaagtgtgattatccaacccacatgttgccattctgttaaaaaggatggtacaaaagacagtcacagtcacctggcttactgacataaatattaatattaatccaataagtaaaaagcacatgagaattggctgccacagaaagaaaaatttcgacctgtatctaccaagaaactatcttaccaactaaagaagccaaatctgtctctctttcaaaaccctcatggggccatgttttattataatggtttgtcacaggtcctaacccatactgtatttgattatatac

SEQ ID NO: 277247 - DNA, 843 bp, Homo sapiens
acttcgttttcatcctggttttgggacagcggcaatcatggcgccacctgtgagatactgcatccccggcgaacgtctgtgtaacttggaggagggcagcccgggcagcggcacctacacccgccacggctacatcttttcgtcgcttgccggctgtctgatgaagagcagcgagaatggcgcgcttccagtggtgtctgtagtgagagaaacagagtcccagttactgccagatgtgggagctattgtaacctgtaaggtctctagcatcaattcacgctttgccaaagtacacatcctgtatgtggggtccatgcctcttaagaactcttttcgaggaactatccgcaaggaagatgtccgagcaactgaaaaagacaaggttgaaatttataagagtttccgcccagggtgacattgtcttggccaaagtgatctccttaggtgatgcacagtccaactacctgctaaccaccgccgagaacgagctgggagtggtggtagcccacagtgagtcaggtatccagatggttcccatcagctggtgtgagatgcagtgccctaagacccacactaaagaattccggaaagtagcccgagtacaacccgaattcttgcagacctaagaagccactttttaccctatggaagggggtaagctgttcctgagtataacaccaagatgctgctgtctttattcaaacacctggcgtcggccaacagccacttccagaaaaatcttccagtttacgctgtagatggaacatgtttctgtgaacctatcagtggatttcattctcttgagtaataaatcttatcttttcaaggcaccaacaaacaaaa

SEQ ID NO: 277248 - DNA, 645 bp, Homo sapiens
acttcgttttcatcctggttttgggacagcggcaatcatggcgccacctgtgagatactgcatccccggcgaacgtctgtgtaacttggaggagggcagcccgggcagcggcacctacacccgccacggctacatcttttcgtcgcttgccggctgtctgatgaagagcagcgagaatggcgcggttgaaatttataagagtttccgcccagggtgacattgtcttggccaaagtgatctccttaggtgatgcacagtccaactacctgctaaccaccgccgagaacgagctgggagtggtggtagcccacagtgagtcaggtatccagatggttcccatcagctggtgtgagatgcagtgccctaagacccacactaaagaattccggaaagtagcccgagtacaacccgaattcttgcagacctaagaagccactttttaccctatggaagggggtaagctgttcctgagtataacaccaagatgctgctgtctttattcaaacacctggcgtcggccaacagccacttccagaaaaatcttccagtttacgctgtagatggaacatgtttctgtgaacctatcagtggatttcattctcttgagtaataaatcttatcttttcaaggcaccaacaaacaaaa

SEQ ID NO: 277249 - DNA, 768 bp, Homo sapiens
acttcgttttcatcctggttttgggacagcggcaatcatggcgccacctgtgagatactgcatccccggcgaacgtctgtgtaacttggaggagggcagcccgggcagcggcacctacacccgccacggctacatcttttcgtcgcttgccggctgtctgatgaagagcagcgagaatggcgcggtctctagcatcaattcacgctttgccaaagtacacatcctgtatgtggggtccatgcctcttaagaactcttttcgaggaactatccgcaaggaagatgtccgagcaactgaaaaagacaaggttgaaatttataagagtttccgcccagggtgacattgtcttggccaaagtgatctccttaggtgatgcacagtccaactacctgctaaccaccgccgagaacgagctgggagtggtggtagcccacagtgagtcaggtatccagatggttcccatcagctggtgtgagatgcagtgccctaagacccacactaaagaattccggaaagtagcccgagtacaacccgaattcttgcagacctaagaagccactttttaccctatggaagggggtaagctgttcctgagtataacaccaagatgctgctgtctttattcaaacacctggcgtcggccaacagccacttccagaaaaatcttccagtttacgctgtagatggaacatgtttctgtgaacctatcagtggatttcattctcttgagtaataaatcttatcttttcaaggcaccaacaaacaaaa

SEQ ID NO: 277250 - DNA, 688 bp, Homo sapiens
taagagacaaggtcttactctctcacccaggctagaatgtagtggcacaatcatacctcactataacctcaaactgctgggctcaagcgatctcccgcctcagcctcctgagtagctgggactacagatgagcatcaccacatcaagctaatttttcatttttcttttgtacagacaaggtcttgctttgttgctcaggctggttttgaactcctggcctcccaaggtgctgatagtacaggcatgaaccactgtgcttggccttttaaaattttgtagagatgcagtcttactatgttgcccaggctgtctcaaactcctggcctcaagtggtcctcctgccttggcctcccaaaatgttgcaattacaggcatgagccactgtgcttggcaagctaaggaggattttcactagcagtttcatttgacaataccaatctagaggtgagcttctcaatctttaatgtgtatcaaatcacctggggaatagatgccgattctgaaacaggtctggagtgagactgaggttctgcatgtataacaagctccagggggccagctgtcacattcgcaatcacatttgagaaacaggttgaggtgttttttcacagaggcatcagaccaccaaagcggtacaggtcagccttcctagatcttttaccagtccggattgggcaatcgcttatct

SEQ ID NO: 277251 - DNA, 756 bp, Homo sapiens
  misc_feature (756)..(756): n is a, c, g, or t
acttcgttttcatcctggttttgggacagcggcaatcatggcgccacctgtgagatactgcatccccggcgaacgtctgtgtaacttggaggagggcagcccgggcagcggcacctacacccgccacggctacatcttttcgtcgcttgccggctgtctgatgaagagcagcgagaatggcgcgcttccagtggtgtctgtagtgagagaaacagagtcccagttactgccagatgtgggagctattgtaacctgtaaggtctctagcatcaattcacgctttgccaaagtacacatcctgtatgtggggtccatgcctcttaagaactcttttcgaggaactatccggtaagaagtatccttttcacatataccttagcaactggaataagattaggatagactaggacaccagaattttgagcaacagttacaattcctatttttcttttgcccgtttttctttcttctttgtgctttgattctcccctagtagtatccaaaaaatacatggatgatctaggacaaaaggaaaatattaacgagagggtttaaaagtaaagcaaaggctgggcgcggtggctcacgcctgttatcctagcactttgagaagctgaggcgggtggatctcttgagatcaggagtttgagaccagcctagccaacatggtgaaaccccatctctgtaaaattcattgtctggcacagggctacccctggatcccaatactttggaggtgggggtggtcctccgccn

SEQ ID NO: 277252 - DNA, 992 bp, Homo sapiens
caagaaggctaaacggcctacagcttctgggggcccgtgaccgatgcagcattttttctgcaggcgaacgtctgtgtaacttggaggagggcagcccgggcagcggcacctacacccgccacggctacatcttttcgtcgcttgccggctgtctgatgaagagcagcgagaatggcgcgtttcttctagccgtatcgccgctgtggtgcacttagccaccacacactagttgtgttgatctcgcttggttgtgctgctgaccctcggggagggaagttgggacaaaagcagatgcgaactcagtatcccatcccagcccagctcagcccagcacttccagtggtgtctgtagtgagagaaacagagtcccagttactgccagatgtgggagctattgtaacctgtaaggtctctagcatcaattcacgctttgccaaagtacacatcctgtatgtggggtccatgcctcttaagaactcttttcgaggaactatccgcaaggaagatgtccgagcaactgaaaaagacaaggttgaaatttataagagtttccgcccagggtgacattgtcttggccaaagtgatctccttaggtgatgcacagtccaactacctgctaaccaccgccgagaacgagctgggagtggtggtagcccacagtgagtcaggtatccagatggttcccatcagctggtgtgagatgcagtgccctaagacccacactaaagaattccggaaagtagcccgagtacaacccgaattcttgcagacctaagaagccactttttaccctatggaagggggtaagctgttcctgagtataacaccaagatgctgctgtctttattcaaacacctggcgtcggccaacagccacttccagaaaaatcttccagtttacgctgtagatggaacatgtttctgtgaacctatcagtggatttcattctcttgagtaataaatcttatcttttcaaggcaccaacaaacaaaa

SEQ ID NO: 277253 - DNA, 1020 bp, Homo sapiens
acttcgttttcatcctggttttgggacagcggcaatcatggcgccacctgtgagatactgcatccccggcgaacgtctgtgtaacttggaggagggcagcccgggcagcggcacctacacccgccacggctacatcttttcgtcgcttgccggctgtctgatgaagagcagcgagaatggcgcgcttccagtggtgtctgtagtgagagaaacagagtcccagttactgccagatgtgggagctattgtaacctgtaaggtctctagcatcaattcacgctttgccaaagtacacatcctgtatgtggggtccatgcctcttaagaactcttttcgaggaactatccgcaaggaagatgtccgagcaactgaaaaagacaaggttgaaatttataagagtttccgcccagggtgacattgtcttggccaaagtgatctccttaggtgatgcacagtccaactacctgctaaccaccgccgagaacgagctgggagtggtggtagcccacagtgagtcaggtatccagatggttcccatcagctggtgtgagatgcagtgccctaagacccacactaaagaattccggaaagtagcccgagtacaacccgaattcttgcagacctaagaagccactttttaccctatggaagggggtaagctgttcctgagtataacaccaagatgctgctgtctttattcaaacacctggcgtcggccaacagccacttccagaaaaatcttccagtttacgctgtagatggaacatgtttctgtgaacctatcagtggatttcattctcttgagtaataaatcttatcttttcaaggcaccaacaaacaaaaaaaaaaaaattttgtggggggtgggccgaaaaaagttttaaaacacctgtggggggggggcaagagggtaggaaagggatagggtggccagagaactgggagaaatgggggggttccacaataaaacgggggacgggggttggaaaccagggttgggagggttaaggggcggggaaa

SEQ ID NO: 277254 - DNA, 471 bp, Homo sapiens
ctccggcgctctgaggatcccctataggcgctaggtgacatttcttggcaaagtgtgactagatctccttaggtgatgcacagtccaactacctgctaaccaccgccgagaacgagctgggagtggtggtagcccacagtgagtcaggtatccagatggttcccatcagctggtgtgagatgcagtgccctaagacccacactaaagaattccggaaagtagcccgagtacaacccgaattcttgcagacctaagaagccactttttaccctatggaagggggtaagctgttcctgagtataacaccaagatgctgctgtctttattcaaacacctggcgtcggccaacagccacttccagaaaaatcttccagtttacgctgtagatggaacatgtttctgtgaacctatcagtggatttcattctcttgagtaataaatcttatcttttcaaggcaccaacaaacaaaa

SEQ ID NO: 277255 - DNA, 627 bp, Homo sapiens
acacacgtccccttcatttaggtacattgtgatttaatgaaaatttgaggacacgtggtgatacagatagcatgtgaggcaggcatggtggctcatgtttgcaaagcccagcctgattctccttatataaatccaaggaaacgggactcacttcataagtcagtagaatgaacaaagttttttctttatgagttgaggttcagtaggaagcttggtggcacttcagcttcatacccagcataaaagaggagtcgcaggcaaatctttggggtctgggctccaccaccagcttttcccttccaggtatccagatggttcccatcagctggtgtgagatgcagtgccctaagacccacactaaagaattccggaaagtagcccgagtacaacccgaattcttgcagacctaagaagccactttttaccctatggaagggggtaagctgttcctgagtataacaccaagatgctgctgtctttattcaaacacctggcgtcggccaacagccacttccagaaaaatcttccagtttacgctgtagatggaacatgtttctgtgaacctatcagtggatttcattctcttgagtaataaatcttatcttttcaaggcaccaacaaacaaaa

SEQ ID NO: 277256 - DNA, 1504 bp, Homo sapiens
  misc_feature (1422)..(1422): n is a, c, g, or t
  misc_feature (1479)..(1479): n is a, c, g, or t
  misc_feature (1502)..(1503): n is a, c, g, or t
aaggatccccacaccacctgagttctttcagtgtcggtaatgcgccaagctttctcctgctacagagcctttgtaacatgccatctatctggaacgcttctatcttcctaggcctatttaattcctacctcctttagatagcttctctactatcacctcagagaagtccttctggacccactaattgaggaaaggagttttgtggggtgttttgtttttgtttgttttgttaaagactcacaaaaaactctgttccttttcttccaagcactatgtcagcatatgatgagacactcaggtatatgtttcctactagacttctcccctgcttaaatctaagtccgtgaaagcaggccctaccaccataccatccgtatatagcacaaggcagctcctcaataaatgttgaatgtgtgagtaatacctacctttctagtttcagagatagatccaggattagctcaggatcatataagcaatatttgaaggagcacaatagaaagaggattcagaattagaacagttacgttctggctaacttgactttgattctgctttgagtaagtaacttaagctgtctgattcaaggggctttctattcagtcattgttgggaatgttcttaacagtcctgagtttgttcatttcatagatatcacttgagtattttcatgtgtcaggcacagcgctgacttggtttctgctatcaaaggacacagacacaaattgtaaacaaataaatgctcaaatgagcatatggttacatatgtggtggtgctttgaaagaatattacagggcaccttgagaacatgtaacaggcaaacccatcctagtcagcagaagtgacatttaagctgaatcatctaaagagtaggtaagagtcaggtgggtggagagagtgcagctctggcagaaagaataggttgaagagagatctgaaagtgggaagaatttagtaagttggggaaactgaaagaaggccaggagagctgaagcattgtgagcaacggagagattgataaaagatgaggctcaaaatatctgtcttataccaacagccaataccatgctcaaagagaaaactctgcaagtattcacttaaaatagaagaaaacaagcatagccgctattatgtaacatttttgtggaaatttcagcctgtgcaataaaataagaaacagaaggaagcagtataactttggaggaaagagtaaattgtcggcagggcgcagtggctcacacctgtaatcccagcactttgggaagccaaggcaggtggatcacctgaggtcaggagttcgagaccagcctggccaacatggtgaaaccccatctctactaaaaatacaaaaaattacccgagcatggtgacaggcttctgtaatcccagctactcgggaggctgaggcaggagaatcactngaacccaggaggtggaggttgcagtgaaccaagatggcacccttgcactccatcctnggcaacaagagtgaaactccatnnc

SEQ ID NO: 277257 - DNA, 754 bp, Homo sapiens
  misc_feature (672)..(672): n is a, c, g, or t
  misc_feature (729)..(729): n is a, c, g, or t
  misc_feature (752)..(753): n is a, c, g, or t
acttcgttttcatcctggttttgggacagcggcaatcatggcgccacctgtgagatactgcatccccggcgaacgtctgtgtaacttggaggagggcagcccgggcagcggcacctacacccgccacggctacatcttttcgtcgcttgccggctgtctgatgaagagcagcgagaatggcgcgtttcagagatagatccaggattagctcaggatcatataagcaatatttgaaggagcacaatagaaagaggattcagaattagaacagttacgttctggctaacttgactttgattctgctttgaccaataccatgctcaaagagaaaactctgcaagtattcacttaaaatagaagaaaacaagcatagccgctattatgtaacatttttgtggaaatttcagcctgtgcaataaaataagaaacagaaggaagcagtataactttggaggaaagagtaaattgtcggcagggcgcagtggctcacacctgtaatcccagcactttgggaagccaaggcaggtggatcacctgaggtcaggagttcgagaccagcctggccaacatggtgaaaccccatctctactaaaaatacaaaaaattacccgagcatggtgacaggcttctgtaatcccagctactcgggaggctgaggcaggagaatcactngaacccaggaggtggaggttgcagtgaaccaagatggcacccttgcactccatcctnggcaacaagagtgaaactccatnnc

SEQ ID NO: 277258 - DNA, 1659 bp, Homo sapiens
acttcgttttcatcctggttttgggacagcggcaatcatggcgccacctgtgagatactgcatccccggcgaacgtctgtgtaacttggaggagggcagcccgggcagcggcacctacacccgccacggctacatcttttcgtcgcttgccggctgtctgatgaagagcagcgagaatggcgcgcttccagtggtgtctgtagtgagagaaacagagtcccagttactgccagatgtgggagctattgtaacctgtaaggtctctagcatcaattcacgctttgccaaagtacacatcctgtatgtggggtccatgcctcttaagaactcttttcgaggaactatccgcaaggaagatgtccgagcaactgaaaaagacaaggttgaaatttataagagtttccgcccagggtgacattgtcttggccaaagtgatctccttaggtgatgcacagtccaactacctgctaaccaccgccgagaacgagctgggagtggtggtagcccacagtgagtcaggtatccagatggttcccatcagctggtgtgagatgcagtgccctaagacccacactaaagaattccggaaagtagcccgagtacaacccgaattcttgcagacctaagaagccactttttaccctatggaagggggtaagctgttcctgagtataacaccaagatgctgctgtctttattcaaacacctggcgtcggccaacagccacttccagaaaaatcttccagtttacgctgtagatggaacatgtttctgtgaacctatcagtggatttcattctcttgagtaataaatcttatcttttcaaggcaccaacaaacaaaactgtgatattggaaatagcctatccctcctgacagtccttataaatacatattttttgctatgataaaacttttttactaaaaggatgttatagagtctgttgtcttaagcagagaaagacatctaaatggtgtcaggacatttcagtacttctgcttattgagtacttactgtgctaggcactgagtcaggtgctttacatacgtccccttcatttaggtacattgtgatttaatgaaaatttgaggacacgtggtgatacagatagcatgtgaggcaggcatggtggctcatgtttgtaaatcccagcactttgggaaggccgagctggttttgaactcctggcctcccaaggtgctgatagtacaggcatgaaccactgtgcttggccttttaaaattttgtagagatgcagtcttactatgttgcccaggctgtctcaaactcctggcctcaagtggtcctcctgccttggcctcccaaaatgttgcaattacaggcatgagccactgtgcttggcaagctaaggaggattttcactagcagtttcatttgacaataccaatctagaggtgagcttctcaatctttaatgtgtatcaaatcacctggggaatagatgccgattctgaaacaggtctggagtgagactgaggttctgcatgtataacaagctccagggggccagctgtcacattcgcaatcacatttgagaaacaggttgaggtgttttttcacagaggcatcagaccaccaaagcggtacaggtcagccttcctagatcttttaccagtccggattgggcaatcgcttatct

SEQ ID NO: 277259 - DNA, 2106 bp, Homo sapiens
  misc_feature (2024)..(2024): n is a, c, g, or t
  misc_feature (2081)..(2081): n is a, c, g, or t
  misc_feature (2104)..(2105): n is a, c, g, or t
acttcgttttcatcctggttttgggacagcggcaatcatggcgccacctgtgagatactgcatccccggcgaacgtctgtgtaacttggaggagggcagcccgggcagcggcacctacacccgccacggctacatcttttcgtcgcttgccggctgtctgatgaagagcagcgagaatggcgcggtaaaggaagcggcatgccatctcccctctgtttttcccttaggctgcccttgagttccagtccttaggcatgggcactgcggacgcgtctttagtgcctcagtggtacaatgttggtctcttagtttcttctagccgtatcgccgctgtggtgcacttagccaccacacactagttgtgttgatctcgcttggttgtgctgctgaccctcggggagggaagttgggacaaaagcagatgcgaactcagtatcccatcccagcccagctcagcccagcagtgagttgcatactgtatgaatgttgcttacctttccgactttatctagcgccactatctccacctcactgacgcaatctagtcatactgtcttttctgtgtttaaaagttataatcacagtctctgcttgccctttaaaaattttttataacatactagcttctttcagtgtcggtaatgcgccaagctttctcctgctacagagcctttgtaacatgccatctatctggaacgcttctatcttcctaggcctatttaattcctacctcctttagatagcttctctactatcacctcagagaagtccttctggacccactaattgaggaaaggagttttgtggggtgttttgtttttgtttgttttgttaaagactcacaaaaaactctgttccttttcttccaagcactatgtcagcatatgatgagacactcaggtatatgtttcctactagacttctcccctgcttaaatctaagtccgtgaaagcaggccctaccaccataccatccgtatatagcacaaggcagctcctcaataaatgttgaatgtgtgagtaatacctacctttctagtttcagagatagatccaggattagctcaggatcatataagcaatatttgaaggagcacaatagaaagaggattcagaattagaacagttacgttctggctaacttgactttgattctgctttgagtaagtaacttaagctgtctgattcaaggggctttctattcagtcattgttgggaatgttcttaacagtcctgagtttgttcatttcatagatatcacttgagtattttcatgtgtcaggcacagcgctgacttggtttctgctatcaaaggacacagacacaaattgtaaacaaataaatgctcaaatgagcatatggttacatatgtggtggtgctttgaaagaatattacagggcaccttgagaacatgtaacaggcaaacccatcctagtcagcagaagtgacatttaagctgaatcatctaaagagtaggtaagagtcaggtgggtggagagagtgcagctctggcagaaagaataggttgaagagagatctgaaagtgggaagaatttagtaagttggggaaactgaaagaaggccaggagagctgaagcattgtgagcaacggagagattgataaaagatgaggctcaaaatatctgtcttataccaacagccaataccatgctcaaagagaaaactctgcaagtattcacttaaaatagaagaaaacaagcatagccgctattatgtaacatttttgtggaaatttcagcctgtgcaataaaataagaaacagaaggaagcagtataactttggaggaaagagtaaattgtcggcagggcgcagtggctcacacctgtaatcccagcactttgggaagccaaggcaggtggatcacctgaggtcaggagttcgagaccagcctggccaacatggtgaaaccccatctctactaaaaatacaaaaaattacccgagcatggtgacaggcttctgtaatcccagctactcgggaggctgaggcaggagaatcactngaacccaggaggtggaggttgcagtgaaccaagatggcacccttgcactccatcctnggcaacaagagtgaaactccatnnc

SEQ ID NO: 277260 - DNA, 838 bp, Homo sapiens
caagaaggctaaacggcctacagcttctgggggcccgtgaccgatgcagcattttttctgcaggcgaacgtctgtgtaacttggaggagggcagcccgggcagcggcacctacacccgccacggctacatcttttcgtcgcttgccggctgtctgatgaagagcagcgagaatggcgcgcttccagtggtgtctgtagtgagagaaacagagtcccagttactgccagatgtgggagctattgtaacctgtaaggtctctagcatcaattcacgctttgccaaagtacacatcctgtatgtggggtccatgcctcttaagaactcttttcgaggaactatccgcaaggaagatgtccgagcaactgaaaaagacaaggttgaaatttataagagtttccgcccagggtgacattgtcttggccaaagtgatctccttaggtgatgcacagtccaactacctgctaaccaccgccgagaacgagctgggagtggtggtagcccacagtgagtcaggtatccagatggttcccatcagctggtgtgagatgcagtgccctaagacccacactaaagaattccggaaagtagcccgagtacaacccgaattcttgcagacctaagaagccactttttaccctatggaagggggtaagctgttcctgagtataacaccaagatgctgctgtctttattcaaacacctggcgtcggccaacagccacttccagaaaaatcttccagtttacgctgtagatggaacatgtttctgtgaacctatcagtggatttcattctcttgagtaataaatcttatcttttcaaggcaccaacaaacaaaa

SEQ ID NO: 277261 - DNA, 1266 bp, Homo sapiens
acttcgttttcatcctggttttgggacagcggcaatcatggcgccacctgtgagatactgcatccccggcgaacgtctgtgtaacttggaggagggcagcccgggcagcggcacctacacccgccacggctacatcttttcgtcgcttgccggctgtctgatgaagagcagcgagaatggcgcgcttccagtggtgtctgtagtgagagaaacagagtcccagttactgccagatgtgggagctattgtaacctgtaaggtctctagcatcaattcacgctttgccaaagtacacatcctgtatgtggggtccatgcctcttaagaactcttttcgaggaactatccgcaaggaagatgtccgagcaactgaaaaagacaaggttgaaatttataagagtttccgcccagggtgacattgtcttggccaaagtggtatcctttattcccagcagacttctggtcctttgtcaaaagaagagaaggaggccgggtgtggtggctcatgcctgtaatcccagcactttcggaggccagggcgggtggatcacctgaggtcaggagttcgagaccagcctggacaacatggtgaaaccctgtctctactaaaaatacaaaaattagctgggcgtggtggcacatgcctgtaatcccagctattcgggaagctgaggcaggagaaccgcttgaacctgtgaggcagaggttgtgaactgatatcacgccaccgcactccagcctggttaacggagcaagactccatctcagaaaaaaaaaaggtagaaaaacaactcaggtggctaaggtgggggaagacttctaactcctcattttccttcaccggtgttatgtgactagatctccttaggtgatgcacagtccaactacctgctaaccaccgccgagaacgagctgggagtggtggtagcccacagtgagtcaggtatccagatggttcccatcagctggtgtgagatgcagtgccctaagacccacactaaagaattccggaaagtagcccgagtacaacccgaattcttgcagacctaagaagccactttttaccctatggaagggggtaagctgttcctgagtataacaccaagatgctgctgtctttattcaaacacctggcgtcggccaacagccacttccagaaaaatcttccagtttacgctgtagatggaacatgtttctgtgaacctatcagtggatttcattctcttgagtaataaatcttatcttttcaaggcaccaacaaacaaaa

SEQ ID NO: 277262 - DNA, 706 bp, Homo sapiens
acttcgttttcatcctggttttgggacagcggcaatcatggcgccacctgtgagatactgcatccccggcgaacgtctgtgtaacttggaggagggcagcccgggcagcggcacctacacccgccacggctacatcttttcgtcgcttgccggctgtctgatgaagagcagcgagaatggcgcgcttccagtggtgtctgtagtgagagaaacagagtcccagttactgccagatgtgggagctattgtaacctgtaaggtctctagcatcaattcacgctttgccaaagtacacatcctgtatgtggggtccatgcctcttaagaactcttttcgaggaactatccgcaaggaagatgtccgagcaactgaaaaagacaaggtatccagatggttcccatcagctggtgtgagatgcagtgccctaagacccacactaaagaattccggaaagtagcccgagtacaacccgaattcttgcagacctaagaagccactttttaccctatggaagggggtaagctgttcctgagtataacaccaagatgctgctgtctttattcaaacacctggcgtcggccaacagccacttccagaaaaatcttccagtttacgctgtagatggaacatgtttctgtgaacctatcagtggatttcattctcttgagtaataaatcttatcttttcaaggcaccaacaaacaaaa

SEQ ID NO: 277263 - DNA, 499 bp, Homo sapiens
  misc_feature (296)..(296): n is a, c, g, or t
  misc_feature (298)..(298): n is a, c, g, or t
  misc_feature (300)..(300): n is a, c, g, or t
  misc_feature (302)..(302): n is a, c, g, or t
  misc_feature (305)..(305): n is a, c, g, or t
tggccccgcctccttgagtggtgcggagctttgtgatgcggagcttcgtgatgcacgccccgatgcctgcggggctataaaaacgctcgcaagcgccaagtctcctcaggagccgccggcaagggggcaacgaggaagctcttaagagcgcggccggaaagcaggtggggagaatctggagaaaaggcgcaccctgcggcctcggagaccattatgtctcagggagtctctcgcagtgggagaggtcgtcggggcaggcggagggtcctcagagtcgggggtggggggcctgtggngngncnggnccccggcccacaccggggagtgcggcgaccagacggccagctgccgaatctgaggcctcggtgggtccgtcgcccgcctctcttggacaagtccaggcgatgtgagcacgcccagcctcctacatttcactcccgtctctcccaaacagacctagcgcaaaacgagcactgacacagcgggggcccacatcccg

SEQ ID NO: 277264 - DNA, 2380 bp, Homo sapiens
tggccccgcctccttgagtggtgcggagctttgtgatgcggagcttcgtgatgcacgccccgatgcctgcggggctataaaaacgctcgcaagcgccaagtctcctcaggagccgccggcaagggggcaacgaggaagctcttaagagcgcggccggaaagcagttgagttacagacatcctgccaaaatgatttcttcaaagcccagacttgtcgtaccctatggcctcaagactctgctcgagggaattagcagagctgttctcaaaaccaacccatcaaacatcaaccagtttgcagcagcttattttcaagaacttactatgtatagagggaatactactatggatataaaagatctggttaaacaatttcatcagattaaagtagagaaatggtcagaaggaacgacaccacagaagaaattagaatgtttaaaagaaccaggaaaaacatctgtagaatctaaagtacctacccagatggaaaaatctacagacacagacgaggacaatgtaaccagaacagaatatagtgacaaaaccacccagtttccatcagtttatgctgtgccaggcactgagcaaacggaagcagttggtggtctttcttccaaaccagccacccctaagactactaccccaccctcatcaccacctccaacagctgtctcaccagagtttgcctacgtcccagctgacccagctcagcttgctgctcagatgttaggtaaagtttcatctattcattctgatcaatctgatgtgttaatggtggatgtggcaaccagtatgcctgttgttatcaaggaggtgccaagctcagaggctgctgaagatgtcatggtggctgctcctcttgtgtgttctggaaaggtgctagaagtgcaggttgtgaaccaaacatctgtccatgtagatttgggttctcaacctaaagaaaatgaggctgaaccatcaacggcttcctcagtccccttgcaggatgaacaagaacctcctgcttatgatcaagctcctgaggtcactttgcaggctgatattgaggttatgtcaactgttcatatatcatctgtctataacgatgtgcctgtgactgaaggagttgtttatatcgagcaactgccagaacaaatagttatcccttttactgatcaagttgcttgtcttaaagaaaatgagcagtcaaaagaaaatgagcagtcaccacgagttagtcccaaatctgtagtagaaaagaccacctctggcatgtctaaaaaatctgtagagtctgtaaaacttgcacagttggaggagaatgcaaaatattcctcagtatatatggaggcagaagcaacagctctgctctctgacacatctttgaaaggtcagcctgaggtacctgcacaactcctggatgcagaaggtgctatcaaaataggctctgaaaaatctctgcaccttgaagtggagatcacttcaatagtctctgacaatactgggcaggaggagtctggggaaaactctgtaccccaggagatggaaggcaaacctgtgctctctggggaagctgcagaagcagtgcactcaggtacatctgtaaagtcatctagtggccccttccctcctgctccagaaggccttactgcaccagaaattgaaccagaaggggaatcaacagctgaataaggtttgatgaagccagcaatggcaacaagtgaacgaggacaaccaccaccatgttctaacatgtggaccctttattgtctaactgataagaatcaacaaggtcacccatcaccgccacctgcacctgggccttttccccaagcaaccctctatttacctaatcctaaggatccacagtttcagcagcatccaccaaaagtcacttttccaacttatgtgatgggcgacaccaagaagaccagtgccccaccttttatcttagtaggctcaaatgttcaggaagcacagggatggaaacctcttcccggacatgctgtcgtttcacagtcagatgtcttgagatatgttgcaatgcaagtgcccattgctgttcctgcagatgagaaataccagaaacataccctaagtccccagaatgctaatcctccaagtggacaagatgtccccaggccaaaaagccctgttttcctttctgttgctttcccagtagaagatgtagctaaaaaaagttcaggatctggtgacaaatgtgctccctttggaagttacggtattgctggggaggtaaccgtgactactgctcacaaacgtcgcaaagcagaaactgaaaactgatccagaaatgacgctgtctgggtcaacatttcagggaggagtctgccaccagtgtaatgtatcaataaacttcatgcaagcataaaaaaatgtat

SEQ ID NO: 277265 - DNA, 1906 bp, Homo sapiens
tggccccgcctccttgagtggtgcggagctttgtgatgcggagcttcgtgatgcacgccccgatgcctgcggggctataaaaacgctcgcaagcgccaagtctcctcaggagccgccggcaagggggcaacgaggaagctcttaagagcgcggccggaaagcagttgagttacagacatcctgccaaaatgatttcttcaaagcccagacttgtcgtaccctatggcctcaagactctgctcgagggaattagcagagctgttctcaaaaccaacccatcaaacatcaaccagtttgcagcagcttattttcaagaacttactatgtatagagggaatactactatggatataaaagatctggttaaacaatttcatcagattaaagtagagaaatggtcagaaggaacgacaccacagaagaaattagaatgtttaaaagaaccaggaaaaacatctgtagaatctaaagtacctacccagatggaaaaatctacagacacagacgaggacaatgtaaccagaacagaatatagtgacaaaaccacccagtttccatcagtttatgctgtgccaggcactgagcaaacggaagcagttggtggtctttcttccaaaccagccacccctaagactactaccccaccctcatcaccacctccaacagctgtctcaccagagtttgcctacgtcccagctgacccagctcagcttgctgctcagatgttaggtaaagtttcatctattcattctgatcaatctgatgtgttaatggtggatgtggcaaccagtatgcctgttgttatcaaggaggtgccaagctcagaggctgctgaagatgtcatggtggctgctcctcttgtgtgttctggaaaggtgctagaagtgcaggttgtgaaccaaacatctgtccatgtagatttgggttctcaacctaaagaaaatgaggctgaaccatcaacggcttcctcagtccccttgcaggatgaacaagaacctcctgcttatgatcaagctcctgaggtcactttgcaggctgatattgaggttatgtcaactgttcatatatcatctgtctataacgatgtgcctgtgactgaaggagttgtttatatcgagcaactgccagaacaaatagttatcccttttactgatcaagttgcttgtcttaaagaaaatgagcagtcaaaagaaaatgagcagtcaccacgagttagtcccaaatctgtagtagaaaagaccacctctggcatgtctaaaaaatctgtagagtctgtaaaacttgcacagttggaggagaatgcaaaatattcctcagtatatatggaggcagaagcaacagctctgctctctgacacatctttgaaaggtcagcctgaggtacctgcacaactcctggatgcagaaggtgctatcaaaataggctctgaaaaatctctgcaccttgaagtggagatcacttcaatagtctctgacaatactgggcaggaggagtctggggaaaactctgtaccccaggagatggaaggcaaacctgtgctctctggggaagctgcagaagcagtgcactcaggtacatctgtaaagtcatctagtggccccttccctcctgctccagaaggccttactgcaccagaaattgaaccagaaggggaatcaacagctgaataaggtttgatgaagccagaagatgtagctaaaaaaagttcaggatctggtgacaaatgtgctccctttggaagttacggtattgctggggaggtaaccgtgactactgctcacaaacgtcgcaaagcagaaactgaaaactgatccagaaatgacgctgtctgggtcaacatttcagggaggagtctgccaccagtgtaatgtatcaataaacttcatgcaagcataaaaaaatgtat

SEQ ID NO: 277266 - DNA, 1200 bp, Homo sapiens
tggccccgcctccttgagtggtgcggagctttgtgatgcggagcttcgtgatgcacgccccgatgcctgcggggctataaaaacgctcgcaagcgccaagtctcctcaggagccgccggcaagggggcaacgaggaagctcttaagagcgcggccggaaagcagtagagaaatggtcagaaggaacgacaccacagaagaaattagaatgtttaaaagaaccaggaaaaacatctgtagaatctaaagtacctacccagatggaaaaatctacagacacagacgaggacaatgtaaccagaacagaatatagtgacaaaaccacccagtttccatcagtttatgctgtgccaggcactgagcaaacggaagcagttggtggtctttcttccaaaccagccacccctaagactactaccccaccctcatcaccacctccaacagctgtctcaccagagtttgcctacgtcccagctgacccagctcagcttgctgctcagatgttagcaatggcaacaagtgaacgaggacaaccaccaccatgttctaacatgtggaccctttattgtctaactgataagaatcaacaaggtcacccatcaccgccacctgcacctgggccttttccccaagcaaccctctatttacctaatcctaaggatccacagtttcagcagcatccaccaaaagtcacttttccaacttatgtgatgggcgacaccaagaagaccagtgccccaccttttatcttagtaggctcaaatgttcaggaagcacagggatggaaacctcttcccggacatgctgtcgtttcacagtcagatgtcttgagatatgttgcaatgcaagtgcccattgctgttcctgcagatgagaaataccagaaacataccctaagtccccagaatgctaatcctccaagtggacaagatgtccccaggccaaaaagccctgttttcctttctgttgctttcccagtagaagatgtagctaaaaaaagttcaggatctggtgacaaatgtgctccctttggaagttacggtattgctggggaggtaaccgtgactactgctcacaaacgtcgcaaagcagaaactgaaaactgatccagaaatgacgctgtctgggtcaacatttcagggaggagtctgccaccagtgtaatgtatcaataaacttcatgcaagcataaaaaaatgtat

SEQ ID NO: 277267 - DNA, 2157 bp, Homo sapiens
tggccccgcctccttgagtggtgcggagctttgtgatgcggagcttcgtgatgcacgccccgatgcctgcggggctataaaaacgctcgcaagcgccaagtctcctcaggagccgccggcaagggggcaacgaggaagctcttaagagcgcggccggaaagcagtagagaaatggtcagaaggaacgacaccacagaagaaattagaatgtttaaaagaaccaggaaaaacatctgtagaatctaaagtacctacccagatggaaaaatctacagacacagacgaggacaatgtaaccagaacagaatatagtgacaaaaccacccagtttccatcagtttatgctgtgccaggcactgagcaaacggaagcagttggtggtctttcttccaaaccagccacccctaagactactaccccaccctcatcaccacctccaacagctgtctcaccagagtttgcctacgtcccagctgacccagctcagcttgctgctcagatgttaggtaaagtttcatctattcattctgatcaatctgatgtgttaatggtggatgtggcaaccagtatgcctgttgttatcaaggaggtgccaagctcagaggctgctgaagatgtcatggtggctgctcctcttgtgtgttctggaaaggtgctagaagtgcaggttgtgaaccaaacatctgtccatgtagatttgggttctcaacctaaagaaaatgaggctgaaccatcaacggcttcctcagtccccttgcaggatgaacaagaacctcctgcttatgatcaagctcctgaggtcactttgcaggctgatattgaggttatgtcaactgttcatatatcatctgtctataacgatgtgcctgtgactgaaggagttgtttatatcgagcaactgccagaacaaatagttatcccttttactgatcaagttgcttgtcttaaagaaaatgagcagtcaaaagaaaatgagcagtcaccacgagttagtcccaaatctgtagtagaaaagaccacctctggcatgtctaaaaaatctgtagagtctgtaaaacttgcacagttggaggagaatgcaaaatattcctcagtatatatggaggcagaagcaacagctctgctctctgacacatctttgaaaggtcagcctgaggtacctgcacaactcctggatgcagaaggtgctatcaaaataggctctgaaaaatctctgcaccttgaagtggagatcacttcaatagtctctgacaatactgggcaggaggagtctggggaaaactctgtaccccaggagatggaaggcaaacctgtgctctctggggaagctgcagaagcagtgcactcaggtacatctgtaaagtcatctagtggccccttccctcctgctccagaaggccttactgcaccagaaattgaaccagaaggggaatcaacagctgaataaggtttgatgaagccagcaatggcaacaagtgaacgaggacaaccaccaccatgttctaacatgtggaccctttattgtctaactgataagaatcaacaaggtcacccatcaccgccacctgcacctgggccttttccccaagcaaccctctatttacctaatcctaaggatccacagtttcagcagcatccaccaaaagtcacttttccaacttatgtgatgggcgacaccaagaagaccagtgccccaccttttatcttagtaggctcaaatgttcaggaagcacagggatggaaacctcttcccggacatgctgtcgtttcacagtcagatgtcttgagatatgttgcaatgcaagtgcccattgctgttcctgcagatgagaaataccagaaacataccctaagtccccagaatgctaatcctccaagtggacaagatgtccccaggccaaaaagccctgttttcctttctgttgctttcccagtagaagatgtagctaaaaaaagttcaggatctggtgacaaatgtgctccctttggaagttacggtattgctggggaggtaaccgtgactactgctcacaaacgtcgcaaagcagaaactgaaaactgatccagaaatgacgctgtctgggtcaacatttcagggaggagtctgccaccagtgtaatgtatcaataaacttcatgcaagcataaaaaaatgtat

SEQ ID NO: 277268 - DNA, 949 bp, Homo sapiens
tggccccgcctccttgagtggtgcggagctttgtgatgcggagcttcgtgatgcacgccccgatgcctgcggggctataaaaacgctcgcaagcgccaagtctcctcaggagccgccggcaagggggcaacgaggaagctcttaagagcgcggccggaaagcagttgagttacagacatcctgccaaaatgatttcttcaaagcccagacttgtcgtaccctatggcctcaagactctgctcgagggaattagcagagctgttctcaaaaccaacccatcaaacatcaaccagtttgcagcagcttattttcaagaacttactatgtatagagggaatactactatggatataaaagatctggttaaacaatttcatcagattaaagtagagaaatggtcagaaggaacgacaccacagaagaaattagaatgtttaaaagaaccaggaaaaacatctgtagaatctaaagtacctacccagatggaaaaatctacagacacagacgaggacaatgtaaccagaacagaatatagtgacaaaaccacccagtttccatcagtttatgctgtgccaggcactgagcaaacggaagcagttggtggtctttcttccaaaccagccacccctaagactactaccccaccctcatcaccacctccaacagctgtctcaccagagtttgcctacgtcccagctgacccagctcagcttgctgctcagatgttagaagatgtagctaaaaaaagttcaggatctggtgacaaatgtgctccctttggaagttacggtattgctggggaggtaaccgtgactactgctcacaaacgtcgcaaagcagaaactgaaaactgatccagaaatgacgctgtctgggtcaacatttcagggaggagtctgccaccagtgtaatgtatcaataaacttcatgcaagcataaaaaaatgtat

SEQ ID NO: 277269 - DNA, 1295 bp, Homo sapiens
  misc_feature (3)..(3): n is a, c, g, or t
ccnatggctccgaagtccccgctggcatcctgaaagttgagttacagacatcctgccaaaatgatttcttcaaagcccagacttgtcgtaccctatggcctcaagactctgctcgagggaattagcagagctgttctcaaaaccaacccatcaaacatcaaccagtttgcagcagcttattttcaagaacttactatgtatagagggaatactactatggatataaaagatctggttaaacaatttcatcagattaaagtagagaaatggtcagaaggaacgacaccacagaagaaattagaatgtttaaaagaaccaggaaaaacatctgtagaatctaaagtacctacccagatggaaaaatctacagacacagacgaggacaatgtaaccagaacagaatatagtgacaaaaccacccagtttccatcagtttatgctgtgccaggcactgagcaaacggaagcagttggtggtctttcttccaaaccagccacccctaagactactaccccaccctcatcaccacctccaacagctgtctcaccagagtttgcctacgtcccagctgacccagctcagcttgctgctcagatgttagcaatggcaacaagtgaacgaggacaaccaccaccatgttctaacatgtggaccctttattgtctaactgataagaatcaacaaggtcacccatcaccgccacctgcacctgggccttttccccaagcaaccctctatttacctaatcctaaggatccacagtttcagcagcatccaccaaaagtcacttttccaacttatgtgatgggcgacaccaagaagaccagtgccccaccttttatcttagtaggctcaaatgttcaggaagcacagggatggaaacctcttcccggacatgctgtcgtttcacagtcagatgtcttgagatatgttgcaatgcaagtgcccattgctgttcctgcagatgagaaataccagaaacataccctaagtccccagaatgctaatcctccaagtggacaagatgtccccaggccaaaaagccctgttttcctttctgttgctttcccagtagaagatgtagctaaaaaaagttcaggatctggtgacaaatgtgctccctttggaagttacggtattgctggggaggtaaccgtgactactgctcacaaacgtcgcaaagcagaaactgaaaactgatccagaaatgacgctgtctgggtcaacatttcagggaggagtctgccaccagtgtaatgtatcaataaacttcatgcaagcataaaaaaatgtat

SEQ ID NO: 277270 - DNA, 2409 bp, Homo sapiens
  misc_feature (2371)..(2371): n is a, c, g, or t
  misc_feature (2373)..(2375): n is a, c, g, or t
  misc_feature (2379)..(2379): n is a, c, g, or t
tggccccgcctccttgagtggtgcggagctttgtgatgcggagcttcgtgatgcacgccccgatgcctgcggggctataaaaacgctcgcaagcgccaagtctcctcaggagccgccggcaagggggcaacgaggaagctcttaagagcgcggccggaaagcagttgagttacagacatcctgccaaaatgatttcttcaaagcccagacttgtcgtaccctatggcctcaagactctgctcgagggaattagcagagctgttctcaaaaccaacccatcaaacatcaaccagtttgcagcagcttattttcaagaacttactatgtatagagggaatactactatggatataaaagatctggttaaacaatttcatcagattaaagtagagaaatggtcagaaggaacgacaccacagaagaaattagaatgtttaaaagaaccaggaaaaacatctgtagaatctaaagtacctacccagatggaaaaatctacagacacagacgaggacaatgtaaccagaacagaatatagtgacaaaaccacccagtttccatcagtttatgctgtgccaggcactgagcaaacggaagcagttggtggtctttcttccaaaccagccacccctaagactactaccccaccctcatcaccacctccaacagctgtctcaccagagtttgcctacgtcccagctgacccagctcagcttgctgctcagatgttaggtaaagtttcatctattcattctgatcaatctgatgtgttaatggtggatgtggcaaccagtatgcctgttgttatcaaggaggtgccaagctcagaggctgctgaagatgtcatggtggctgctcctcttgtgtgttctggaaaggtgctagaagtgcaggttgtgaaccaaacatctgtccatgtagatttgggttctcaacctaaagaaaatgaggctgaaccatcaacggcttcctcagtccccttgcaggatgaacaagaacctcctgcttatgatcaagctcctgaggtcactttgcaggctgatattgaggttatgtcaactgttcatatatcatctgtctataacgatgtgcctgtgactgaaggagttgtttatatcgagcaactgccagaacaaatagttatcccttttactgatcaagttgcttgtcttaaagaaaatgagcagtcaaaagaaaatgagcagtcaccacgagttagtcccaaatctgtagtagaaaagaccacctctggcatgtctaaaaaatctgtagagtctgtaaaacttgcacagttggaggagaatgcaaaatattcctcagtatatatggaggcagaagcaacagctctgctctctgacacatctttgaaaggtcagcctgaggtacctgcacaactcctggatgcagaaggtgctatcaaaataggctctgaaaaatctctgcaccttgaagtggagatcacttcaatagtctctgacaatactgggcaggaggagtctggggaaaactctgtaccccaggagatggaaggcaaacctgtgctctctggggaagctgcagaagcagtgcactcaggtacatctgtaaagtcatctagtggccccttccctcctgctccagaaggccttactgcaccagaaattgaaccagaaggggaatcaacagctgaataaggtttgatgaagccagcaatggcaacaagtgaacgaggacaaccaccaccatgttctaacatgtggaccctttattgtctaactgataagaatcaacaaggtcacccatcaccgccacctgcacctgggccttttccccaagcaaccctctatttacctaatcctaaggatccacagtttcagcagcatccaccaaaagtcacttttccaacttatgtgatgggcgacaccaagaagaccagtgccccaccttttatcttagtaggctcaaatgttcaggaagcacagggatggaaacctcttcccggacatgctgtcgtttcacagtcagatgtcttgagatatgttgcaatgcaagtgcccattgctgttcctgcagatgagaaataccagaaacataccctaagtccccagaatgctaatcctccaagtggacaagatgtccccaggccaaaaagccctgttttcctttctgttgctttcccagtagaagatgtagctaaaaaaagttcaggatctggtgacaaatgtgctccctttggaagttacggtattgctggggaggtaaccgtgactactgctcacaaacgtcgcaaagcagaaactgaaaactgatccagaaatgacgctgtctgggtcaacatttcagggaggagtctgccaccagtgtaatgtatcaataaattctgatgcggccaaanannngtcnccccacccccccccctctctgttccgcgtc

SEQ ID NO: 277271 - DNA, 1423 bp, Homo sapiens
tggccccgcctccttgagtggtgcggagctttgtgatgcggagcttcgtgatgcacgccccgatgcctgcggggctataaaaacgctcgcaagcgccaagtctcctcaggagccgccggcaagggggcaacgaggaagctcttaagagcgcggccggaaagcagttgagttacagacatcctgccaaaatgatttcttcaaagcccagacttgtcgtaccctatggcctcaagactctgctcgagggaattagcagagctgttctcaaaaccaacccatcaaacatcaaccagtttgcagcagcttattttcaagaacttactatgtatagagggaatactactatggatataaaagatctggttaaacaatttcatcagattaaagtagagaaatggtcagaaggaacgacaccacagaagaaattagaatgtttaaaagaaccaggaaaaacatctgtagaatctaaagtacctacccagatggaaaaatctacagacacagacgaggacaatgtaaccagaacagaatatagtgacaaaaccacccagtttccatcagtttatgctgtgccaggcactgagcaaacggaagcagttggtggtctttcttccaaaccagccacccctaagactactaccccaccctcatcaccacctccaacagctgtctcaccagagtttgcctacgtcccagctgacccagctcagcttgctgctcagatgttagcaatggcaacaagtgaacgaggacaaccaccaccatgttctaacatgtggaccctttattgtctaactgataagaatcaacaaggtcacccatcaccgccacctgcacctgggccttttccccaagcaaccctctatttacctaatcctaaggatccacagtttcagcagcatccaccaaaagtcacttttccaacttatgtgatgggcgacaccaagaagaccagtgccccaccttttatcttagtaggctcaaatgttcaggaagcacagggatggaaacctcttcccggacatgctgtcgtttcacagtcagatgtcttgagatatgttgcaatgcaagtgcccattgctgttcctgcagatgagaaataccagaaacataccctaagtccccagaatgctaatcctccaagtggacaagatgtccccaggccaaaaagccctgttttcctttctgttgctttcccagtagaagatgtagctaaaaaaagttcaggatctggtgacaaatgtgctccctttggaagttacggtattgctggggaggtaaccgtgactactgctcacaaacgtcgcaaagcagaaactgaaaactgatccagaaatgacgctgtctgggtcaacatttcagggaggagtctgccaccagtgtaatgtatcaataaacttcatgcaagcataaaaaaatgtat

SEQ ID NO: 277272 - DNA, 2483 bp, Homo sapiens
tggccccgcctccttgagtggtgcggagctttgtgatgcggagcttcgtgatgcacgccccgatgcctgcggggctataaaaacgctcgcaagcgccaagtctcctcaggagccgccggcaagggggcaacgaggaagctcttaagagcgcggccggaaagcagttgagttacagacatcctgccaaaatgatttcttcaaagcccagacttgtcgtaccctatggcctcaagactctgctcgagggaattagcagagctgttctcaaaaccaacccatcaaacatcaaccagtttgcagcagcttattttcaagaacttactatgtatagagggaatactactatggatataaaagatctggttaaacaatttcatcagattaaagtagagaaatggtcagaaggaacgacaccacagaagaaattagaatgtttaaaagaaccaggaaaaacatctgtagaatctaaagtacctacccagatggaaaaatctacagacacagacgaggacaatgtaaccagaacagaatatagtgacaaaaccacccagtttccatcagtttatgctgtgccaggcactgagcaaacggaagcagttggtggtctttcttccaaaccagccacccctaagactactaccccaccctcatcaccacctccaacagctgtctcaccagagtttgcctacgtcccagctgacccagctcagcttgctgctcagatgttaggtaaagtttcatctattcattctgatcaatctgatgtgttaatggtggatgtggcaaccagtatgcctgttgttatcaaggaggtgccaagctcagaggctgctgaagatgtcatggtggctgctcctcttgtgtgttctggaaaggtgctagaagtgcaggttgtgaaccaaacatctgtccatgtagatttgggttctcaacctaaagaaaatgaggctgaaccatcaacggcttcctcagtccccttgcaggatgaacaagaacctcctgcttatgatcaagctcctgaggtcactttgcaggctgatattgaggttatgtcaactgttcatatatcatctgtctataacgatgtgcctgtgactgaaggagttgtttatatcgagcaactgccagaacaaatagttatcccttttactgatcaagttgcttgtcttaaagaaaatgagcagtcaaaagaaaatgagcagtcaccacgagttagtcccaaatctgtagtagaaaagaccacctctggcatgtctaaaaaatctgtagagtctgtaaaacttgcacagttggaggagaatgcaaaatattcctcagtatatatggaggcagaagcaacagctctgctctctgacacatctttgaaaggtcagcctgaggtacctgcacaactcctggatgcagaaggtgctatcaaaataggctctgaaaaatctctgcaccttgaagtggagatcacttcaatagtctctgacaatactgggcaggaggagtctggggaaaactctgtaccccaggagatggaaggcaaacctgtgctctctggggaagctgcagaagcagtgcactcaggtacatctgtaaagtcatctagtggccccttccctcctgctccagaaggccttactgcaccagaaattgaaccagaaggggaatcaacagctgaataaggtttgatgaagccagcaatggcaacaagtgaacgaggacaaccaccaccatgttctaacatgtggaccctttattgtctaactgataagaatcaacaaggtcacccatcaccgccacctgcacctgggccttttccccaagcaaccctctatttacctaatcctaaggatccacagtttcagcagcatccaccaaaagtcacttttccaacttatgtgatgggcgacaccaagaagaccagtgccccaccttttatcttagtaggctcaaatgttcaggaagcacagggatggaaacctcttcccggacatgctgtcgtttcacagtcagatgtcttgagatatgttgcaatgcaagtgcccattgctgttcctgcagatgagaaataccagaaacataccctaagtccccagaatgctaatcctccaagtggacaagatgtccccaggccaaaaagccctgttttcctttctgttgctttcccagtagaagatgtagctaaaaaaagttcaggatctggtgacaaatgtgctccctttggaagttacggtattgctggggaggtaaccgtgactactgctcacaaacgtcgcaaagcagaaactgaaaactggtaggtacactttcctaccataatatttaggccttaacacacgcgcgttttaagcattttgatttcttgacctggagatttagatatttaaaaacaatttgagataataagttggggtatactctaacttcctggggttactgtctccaacttcctaaacaccagttactaataaatgcacagcaggtgcactgtacca

SEQ ID NO: 277273 - DNA, 1805 bp, Homo sapiens
tggccccgcctccttgagtggtgcggagctttgtgatgcggagcttcgtgatgcacgccccgatgcctgcggggctataaaaacgctcgcaagcgccaagtctcctcaggagccgccggcaagggggcaacgaggaagctcttaagagcgcggccggaaagcagttgagttacagacatcctgccaaaatgatttcttcaaagcccagacttgtcgtaccctatggcctcaagactctgctcgagggaattagcagagctgttctcaaaaccaacccatcaaacatcaaccagtttgcagcagcttattttcaagaacttactatgtatagagggaatactactatggatataaaagatctggttaaacaatttcatcagattaaagtagagaaatggtcagaaggaacgacaccacagaagaaattagaatgtttaaaagaaccaggaaaaacatctgtagaatctaaagtacctacccagatggaaaaatctacagacacagacgaggacaatgtaaccagaacagaatatagtgacaaaaccacccagtttccatcagtttatgctgtgccaggcactgagcaaacggaagcagttggtggtctttcttccaaaccagccacccctaagactactaccccaccctcatcaccacctccaacagctgtctcaccagagtttgcctacgtcccagctgacccagctcagcttgctgctcagatgttaggtaaagtttcatctattcattctgatcaatctgatgtgttaatggtggatgtggcaaccagtatgcctgttgttatcaaggaggtgccaagctcagaggctgctgaagatgtcatggtggctgctcctcttgtgtgttctggaaaggtgctagaagtgcaggttgtgaaccaaacatctgtccatgtagatttgggttctcaacctaaagaaaatgaggctgaaccatcaacggcttcctcagtccccttgcaggatgaacaagaacctcctgcttatgatcaagctcctgaggtcactttgcaggctgatattgaggttatgtcaactgttcatatatcatctgtctataacgatgtgcctgtgactgaaggagttgtttatatcgagcaactgccagaacaaatagttatcccttttactgatcaagttgcttgtcttaaagaaaatgagcagtcaaaagaaaatgagcagtcaccacgagttagtcccaaatctgtagtagaaaagaccacctctggcatgtctaaaaaatctgtagagtctgtaaaacttgcacagttggaggagaatgcaaaatattcctcagtatatatggaggcagaagcaacagctctgctctctgacacatctttgaaaggtcagcctgaggtacctgcacaactcctggatgcagaaggtgctatcaaaataggctctgaaaaatctctgcaccttgaagtggagatcacttcaatagtctctgctccagaaggccttactgcaccagaaattgaaccagaatgctaatcctccaagtggacaagatgtccccaggccaaaaagccctgttttcctttctgttgctttcccagtagaagatgtagctaaaaaaagttcaggatctggtgacaaatgtgctccctttggaagttacggtattgctggggaggtaaccgtgactactgctcacaaacgtcgcaaagcagaaactgaaaactgatccagaaatgacgctgtctgggtcaacatttcagggaggagtctgccaccagtgtaatgtatcaataaacttcatgcaagcataaaaaaatgtat

SEQ ID NO: 277274 - DNA, 2474 bp, Homo sapiens
tggccccgcctccttgagtggtgcggagctttgtgatgcggagcttcgtgatgcacgccccgatgcctgcggggctataaaaacgctcgcaagcgccaagtctcctcaggagccgccggcaagggggcaacgaggaagctcttaagagcgcggccggaaagcagacggactctagctgtgtcacccaggctggagtgcagtggcgcgatctcggctgtcagctccgcctcccggattcacgccattctcctgcctcagcctcccgagtagctgggactacaggcacccgccaccacgcccggctgattttttgttttagtagagacggggtttcaccgtgttagccaggatggtctccatctcctgacctcgcctcgtgatccgcccgactcggcctcccaaagtgctgggattacaggcgtgagccaccgcgcccggcctctgggagccactttcaaaacggtctatctactcactttggtagagaaatggtcagaaggaacgacaccacagaagaaattagaatgtttaaaagaaccaggaaaaacatctgtagaatctaaagtacctacccagatggaaaaatctacagacacagacgaggacaatgtaaccagaacagaatatagtgacaaaaccacccagtttccatcagtttatgctgtgccaggcactgagcaaacggaagcagttggtggtctttcttccaaaccagccacccctaagactactaccccaccctcatcaccacctccaacagctgtctcaccagagtttgcctacgtcccagctgacccagctcagcttgctgctcagatgttaggtaaagtttcatctattcattctgatcaatctgatgtgttaatggtggatgtggcaaccagtatgcctgttgttatcaaggaggtgccaagctcagaggctgctgaagatgtcatggtggctgctcctcttgtgtgttctggaaaggtgctagaagtgcaggttgtgaaccaaacatctgtccatgtagatttgggttctcaacctaaagaaaatgaggctgaaccatcaacggcttcctcagtccccttgcaggatgaacaagaacctcctgcttatgatcaagctcctgaggtcactttgcaggctgatattgaggttatgtcaactgttcatatatcatctgtctataacgatgtgcctgtgactgaaggagttgtttatatcgagcaactgccagaacaaatagttatcccttttactgatcaagttgcttgtcttaaagaaaatgagcagtcaaaagaaaatgagcagtcaccacgagttagtcccaaatctgtagtagaaaagaccacctctggcatgtctaaaaaatctgtagagtctgtaaaacttgcacagttggaggagaatgcaaaatattcctcagtatatatggaggcagaagcaacagctctgctctctgacacatctttgaaaggtcagcctgaggtacctgcacaactcctggatgcagaaggtgctatcaaaataggctctgaaaaatctctgcaccttgaagtggagatcacttcaatagtctctgacaatactgggcaggaggagtctggggaaaactctgtaccccaggagatggaaggcaaacctgtgctctctggggaagctgcagaagcagtgcactcaggtacatctgtaaagtcatctagtggccccttccctcctgctccagaaggccttactgcaccagaaattgaaccagaaggggaatcaacagctgaataaggtttgatgaagccagcaatggcaacaagtgaacgaggacaaccaccaccatgttctaacatgtggaccctttattgtctaactgataagaatcaacaaggtcacccatcaccgccacctgcacctgggccttttccccaagcaaccctctatttacctaatcctaaggatccacagtttcagcagcatccaccaaaagtcacttttccaacttatgtgatgggcgacaccaagaagaccagtgccccaccttttatcttagtaggctcaaatgttcaggaagcacagggatggaaacctcttcccggacatgctgtcgtttcacagtcagatgtcttgagatatgttgcaatgcaagtgcccattgctgttcctgcagatgagaaataccagaaacataccctaagtccccagaatgctaatcctccaagtggacaagatgtccccaggccaaaaagccctgttttcctttctgttgctttcccagtagaagatgtagctaaaaaaagttcaggatctggtgacaaatgtgctccctttggaagttacggtattgctggggaggtaaccgtgactactgctcacaaacgtcgcaaagcagaaactgaaaactgatccagaaatgacgctgtctgggtcaacatttcagggaggagtctgccaccagtgtaatgtatcaataaacttcatgcaagcataaaaaaatgtat

SEQ ID NO: 277275 - DNA, 506 bp, Homo sapiens
atttggaagaaaaaaagcactcaaaaaataccaatgtttattttttaataaagcaataattcaaaacaatttttttttctactcattcaaaaggtcataactcaggagtgctgtttataccagatgaatctacaaagccaagaacaggaatcaccgtatctccttcagtagacctgatactgtgagtcttctcttttctgttgacatatttgtgcaacatgctgtagtactggcccttcggattgaaagtatacagtgatgaaatttgctgccactctttcatgcttggagtgttatattcttttggatgcgagccctcaaagaaacatttaatattctcttttgccaattcagttgcatgctctgtggctttacttttaaggatctgctgctcctgttccaaatagattttccagaatttcagctgcagaaaactaactggagataggcatcgggtgacagatgtaaaaatcagaagaatgatgataacaactgctatcaagatc

SEQ ID NO: 277276 - DNA, 898 bp, Homo sapiens
atttggaagaaaaaaagcactcaaaaaataccaatgtttattttttaataaagcaataattcaaaacaatttttttttctactcattcaaaaggtcataactcaggagtgctgtttataccagatgaatctacaaagccaagaacaggaatcaccgtatctccttcagtagacctgatactatatgtcataacactgtcaatgcctggaggagagtaaaattctgactctgaccaccaagctgatctgcacagaaggggatacatgattattcaaagaatgctagttgaacccaaaatttcaaactgcagctacatctatctaatgttgtttcctccaccttcagttttctcaagcagcgttgttctgacacaaacactgtaaccacttttgtgatattgagccttactctgtgtgactccagactgagctgaggtgtgcttgaaagaacatgggctttgaagtcaagtgcatcttgtctgtggtgtgtttaacaagtatgcccctctgagacacagcatccttatttgtaaaagaaggataataatgcccacttttcaagattactgacatgagtagattgagtagcatatgtaaagtgcctttacatataggatatgtctgttaaatgaatgatcagtgtgagagttttccccttaaaatgcaatttggggaatagacaacaaataattacattgtacataacctaagaatcttgatgaatactgaattttgaattttaaacgaggatcaattcaggggatagtattaagtgactcaatgactctgctaccttaagagaattggtgtacaccttagctgtctgcttcaccacaaggagagtatctggatatggagcttgggtgggcagttcacaatgaaatggttcttattggtgc

SEQ ID NO: 277277 - DNA, 845 bp, Homo sapiens
gcccgccgcggttgatcccgcggaacctttgggcgggcgcccgagggtttttggtttaccgctataccagatgaatctacaaagccaagaacaggaatcaccgtatctccttcagtagacctgatactatatgtcataacactgtcaatgcctggaggagagtaaaattctgactctgaccaccaagctgatctgcacagaaggggatacatgattattcaaagaatgctagttgaacccaaaatttcaaactgcagctacatctatctaatgttgtttcctccaccttcagttttctcaagcagcgttgttctgacacaaacactgtaaccacttttgtgatattgagccttactctgtgtgactccagactgagctgaggtgtgcttgaaagaacatgggctttgaagtcaagtgcatcttgtctgtggtgtgtttaacaagtatgcccctctgagacacagcatccttatttgtaaaagaaggataataatgcccacttttcaagattactgacatgagtagattgagtagcatatgtaaagtgcctttacatataggatatgtctgttaaatgaatgatcagtgtgagagttttccccttaaaatgcaatttggggaatagacaacaaataattacattgtacataacctaagaatcttgatgaatactgaattttgaattttaaacgaggatcaattcaggggatagtattaagtgactcaatgactctgctaccttaagagaattggtgtacaccttagctgtctgcttcaccacaaggagagtatctggatatggagcttgggtgggcagttcacaatgaaatggttcttattggtgc

SEQ ID NO: 277278 - DNA, 846 bp, Homo sapiens
ccacgcacgtcgcgaatttagtctgatagcctccaacgcccccgcccaggccatactcgagcgtataccagatgaatctacaaagccaagaacaggaatcaccgtatctccttcagtagacctgatactatatgtcataacactgtcaatgcctggaggagagtaaaattctgactctgaccaccaagctgatctgcacagaaggggatacatgattattcaaagaatgctagttgaacccaaaatttcaaactgcagctacatctatctaatgttgtttcctccaccttcagttttctcaagcagcgttgttctgacacaaacactgtaaccacttttgtgatattgagccttactctgtgtgactccagactgagctgaggtgtgcttgaaagaacatgggctttgaagtcaagtgcatcttgtctgtggtgtgtttaacaagtatgcccctctgagacacagcatccttatttgtaaaagaaggataataatgcccacttttcaagattactgacatgagtagattgagtagcatatgtaaagtgcctttacatataggatatgtctgttaaatgaatgatcagtgtgagagttttccccttaaaatgcaatttggggaatagacaacaaataattacattgtacataacctaagaatcttgatgaatactgaattttgaattttaaacgaggatcaattcaggggatagtattaagtgactcaatgactctgctaccttaagagaattggtgtacaccttagctgtctgcttcaccacaaggagagtatctggatatggagcttgggtgggcagttcacaatgaaatggttcttattggtgc

SEQ ID NO: 277279 - DNA, 467 bp, Homo sapiens
cacagaatgatgacacagcgaggctggggagggaacaggggttgtgcaggatgtgagtcagagaccaggctgttttgcggcctcaaaatcttggacttgaacctggaggcagcagggagccacttcagggtccgtttctttaattaaaatatttgaatcaacaatagagtcgcatggctcacaaaccaacaaatatacaagggaaatggaaaagtttccttttgacgtccccactcccattttcattagtctcccaggttagttttctgtgtcgcctttcagagtttaagtgaaacaatggtcagtgaagatttttatttttcctgttaacacaaaatattatggtgtcattctgcacctggctttttttgcttagtgatgaaaaatttaccctttaaagtgtatataattcagtggtttttcagtatgtttacagagttgtgtaactgtgaccactatctcatttt

SEQ ID NO: 277280 - DNA, 437 bp, Homo sapiens
acagagggcgtccaagatgcagacatggtactcgttcagagccgcctctcctgtaagacaccacaaaggtcacagcagctcccaccacaggcagggcactgctcggggctgcaagtgtcttattcctcagcaaccacgtgggggcagctctggctcaccccacttccaggaaggtggcctgggagaaggcaggaagaggaggccgacagggacagaggaagcaggagtgtccagcctacacatgcgtgcatagacagagccctaagacctgctgcactgaggtcaatcctgcctgacctcactgagattcaatcctgcctaacttaggaataatcaagagactgggaattttctcactctagtttttagagaaatagaaaatttcaaaccatgttaaaaagttatttaataaaatgttcaatatttttcatacatac

SEQ ID NO: 277281 - DNA, 435 bp, Homo sapiens
gctcaagagggaggggccccagccacgagggaggggcagggactttcttctcacaaagacctttcttcagtattcgaaggtcactgtcttgacccgcaggtactcgttcagagccgcctctcctgtaagacaccacaaaggtcacagcagctcccaccacaggcagggcactgctcggggctgcaagtgtcttattcctcagcaaccacgtgggggcagctctggctcaccccacttccaggtgagaagtcgaggcccagcgaggtcatgaatcttacccaggttatccctggcagtggatagtgggccaggactccccagaatacaaagccaatctgaggcagccatttaagaatcttccccagctcccaccgccttgtctggacagtgggaagccccttcaggtggaagggggtggagagacttggcgttact

SEQ ID NO: 277282 - DNA, 900 bp, Homo sapiens
aaagtcgtgcttcaactcattaggaaaaaaaaagagggcctgctggtaacacctcttaacctccaccgctacacggtcttcctcagatggctgtttgagaaggctgttcttcaacatgtgaaacatttcctcctttgaaatgaatccgtcaccattcaaatcaaacacttcaaagcaatctttttaagaaaataacaaatcatgaatttgatgctatcagtaagatcctcgaagaaacagtgataatccatgaatccactccaatacatttacacagccatcattatctttatcaaaacctcggaatactaaagggagagaggttaaatggaacacctgtcctgcatgataactctcagtaaagtatctacattggcatcactcacttttaaaattaagagaacacttcagcttgtgaagtccaatattctcatttgacgaaagaggaaactaagacatcataatatcatgaaactcttttattaaacattcaatttttaaaatgtttttgtgggaacaaatacaattctcaatgtctaagtatattaatcattatttaataataaatatgttgctataaaatatgttggtcatattagataaatatatgaatataaataaaatacttaatagttttgttactcaagtcattacttgatgcatagaattatatcttgtcactgaaatatcttctatgatgtaaagaatgtaaatgtccttttaaaactattctatttattatgtttattaagtggaaatcgaaatgttttaggttttctgatataaggtaagagaaagatgtcaacatgactttgtcttcttcttaaatacacaaaataaagccgatgcggtccgccttattacgtaactatctcatcctcccgtcgtccgccgccattt

SEQ ID NO: 277283 - DNA, 891 bp, Homo sapiens
aaagtcgtgcttcaactcattaggaaaaaaaaagagggcctgctggtaacacctcttaacctccaccgctacacggtcttcctcagatggctgtttgagaaggctgttcttcaacatgtgaaacatttcctcctttgaaatgaatccgtcaccattcaaatcaaacacttcaaagcaatctttttaagaaaataacaaatcatgaatttgatgctatcagtaagatcctcgaagaaacagtgataatccatgaatccactccaatacatttacacagccatcattatctttatcaaaacctcggaatactaaagggagagaggttaaatggaacacctgtcctgcatgataactctcagtaaagtatctacattggcatcactcacttttaaaattaagagaacacttcagcttgtgaagtccaatattctcatttgacgaaagaggaaactaagacatcataatatcatgaaactcttttattaaacattcaatttttaaaatgtttttgtgggaacaaatacaattctcaatgtctaagtatattaatcattatttaataataaatatgttgctataaaatatgttggtcatattagataaatatatgaatataaataaaatacttaatagttttgttactcaagtcattacttgatgcatagaattatatcttgtcactgaaatatcttctatgatgtaaagaatgtaaatgtccttttaaaactattctatttattatgtttattaagtggaaatcgaaatgttttaggttttctgatataaggtaagagaaagatgtcaacatgactttgtcttcttcttaaatacacaaaataaagcccgatacgaacacgtcccctcttccataacccacacaacccaaacccc

SEQ ID NO: 277284 - DNA, 824 bp, Homo sapiens
tgaaactgagtctcgctctgtcgcctaggctggagtgcagtggtgcaatctcagctcactgcaacctccgtctcccgggttcaagtgattctcctgcctcagcctgttgagtagctgggactacaggtgcgtaccaccaagcccagctaatttttttatatttttagtagagacggggtttcactgtgttagccaggatggtctcaatctcctgacctcatgatccgcccaccttggcctcccaaagtgttgggattacaggcatgagccactgcccctggacagatctaattttttaatagtgtaagagagatacactgtgcattccatctatgtcctgagttagtaattcaagtaccaaaaagtaatttaatatgaaactccttgaaaattcagagcttacacttggaattcaaaatgcctatttttgattgtttaaaagttacttaaacctgagctttaggacctttaaaatctcagcatgccttttaagctagtacttttcctgttttgagctctagcaaaccttcagcaagccaaggtggtagccctttttcaacacaatcaaaatagagaggtcaccagttgtttactaccttatggtaaaatgcccggatcaagatccatgtatcccccccatattgtgatgatgcaatcaaagcatagtttttttctactttctgaaatattactgatgaaatcactttacatttaagaggagaaaacagactgccttggattttttttttgtcttgagagaaaaaacaaaatatttagtattgcaagcataaacatttggactcaataaatgacaaattatgaaa

SEQ ID NO: 277285 - DNA, 277 bp, Homo sapiens
accaggggagtcagtggcacaagtcccaatccaggtccaatggtccaagaaccaggggcaccagaagacggacatcccaggttaagcggagagagaaagttcacccttcctccacttttgtgttctattctggccttcaacaaattggatgattgcccacccacactggtgaaggccatctttttactcagtctaccaattcaatgctaatctcttttggaaacaccttcacagacataccaagaaataatgttttaccatctatctagccattcct

SEQ ID NO: 277286 - DNA, 411 bp, Homo sapiens
ttagctaacttgccccaggtcacacagctactatctgacatagctgggatttgaatccagaccatcaagctctagaatctactctccaattgagcacacaatatggcctttcagtaattcaggaagatcagtaagcaaatggataggtggtagggctccaaaagtattaatctcctcctcctgcctctacttcctccatcccttttagggtttcagggtcacagggcagtcaccagggctgtgatcctgagggtgagtgctccttacatgtggtgccccagacactttcctcatcttagtcctggccctggcagccactcctgcaactccgactgcacatgtgcaactgagttaatgagcagacgcagcccctgacactgtcacgttagtaggtagaaacacctggaaact

SEQ ID NO: 277287 - DNA, 494 bp, Homo sapiens
cctcaatttgcaattccatgattactactgaagtatattttcaaaagcctagtgagctttgaagtgtctagtcttaacttgtccacttgcccgtatacacaataacatcttttcctttgtcaggttaaccactcaggggttcagttttggtttattatcctaaaacatattttatccaatccaccgttgatgggcactgggattgattccatgtctttgctattgtgaacagtgctgtgatgaacatgagagttcatgtatctttttggtagaacaatttgttttcttttggatacatacctaataatgggattgctgagttgaatgatagctctgtctaagtactttgagaaactgcaaaactactttccacagtggctggacaaatttacacgcttaccaacagtgtgtaagcattcccttttctccacagcttcgccaacatctgttgttttttgactttttaataaacactattctgactggtgtgagat

SEQ ID NO: 277288 - DNA, 1339 bp, Homo sapiens
aaagtcctatcacagcgggaggggacgccagcgcctgcagaggctgagcagggaaaaagccagtgccccagcggaagcacagctcagagctggtctgccatggacatcctggtcccactcctgcagctgctggtgctgcttcttaccctgcccctgcacctcatggctctgctgggctgctggcagcccctgtgcaaaagctacttcccctacctgatggccgtgctgactcccaagagcaaccgcaagatggagagcaagaaacgggagctcttcagccagataaaggggcttacaggagcctccgggaaagtggccctactggagctgggctgcggaaccggagccaactttcagttctacccaccgggctgcagggtcacctgcctagacccaaatccccactttgagaagttcctgacaaagagcatggctgagaacaggcacctccaatatgagcggtttgtggtggctcctggagaggacatgagacagctggctgatggctccatggatgtggtggtctgcactctggtgctgtgctctgtgcagagcccaaggaaggtcctgcaggaggtccggagagtactgagaccgggaggtgtgctctttttctgggagcatgtggcagaaccatatggaagctgggccttcatgtggcagcaagttttcgagcccacctggaaacacattggggatggctgctgcctcaccagagagacctggaaggatcttgagaacgcccagttctccgaaatccaaatggaacgacagccccctcccttgaagtggctacctgttgggccccacatcatgggaaaggctgtcaaataatctttcccaagctccaaggcactcatttgctccttccccagcctccaattagaacaagccacccaccagcctatctatcttccactgagagggacctagcagaatgagagaagacattcatgtaccacctcctagtccctctctccccaacctctgccagggcaatctctaacttcaatcccgccttcgacagtgaaaaagctctacttctacgctgacccagggaggaaacactaggaccctgttgtatcctcaactgcaagtttctggactagtctcccaacgtttgcctcccaatgttgtccctttccttcgttcccatggtaaagctcctctcgctttcctcctgaggctacacccatgcgtctctaggaactggtcacaaaagtcatggtgcctgcatccctgccaagcccccctgaccctctctccccactaccaccttcttcctgagctgggggcaccagggagaatcagagatgctggggatgccagagcaagactc

SEQ ID NO: 277289 - DNA, 1285 bp, Homo sapiens
aaagtcctatcacagcgggaggggacgccagcgcctgcagaggctgagcagggaaaaagccagtgccccagcggaagcacagctcagagctggtctgccatggacatcctggtcccactcctgcagctgctggtgctgcttcttaccctgcccctgcacctcatggctctgctgggctgctggcagcccctgtgcatggagagcaagaaacgggagctcttcagccagataaaggggcttacaggagcctccgggaaagtggccctactggagctgggctgcggaaccggagccaactttcagttctacccaccgggctgcagggtcacctgcctagacccaaatccccactttgagaagttcctgacaaagagcatggctgagaacaggcacctccaatatgagcggtttgtggtggctcctggagaggacatgagacagctggctgatggctccatggatgtggtggtctgcactctggtgctgtgctctgtgcagagcccaaggaaggtcctgcaggaggtccggagagtactgagaccgggaggtgtgctctttttctgggagcatgtggcagaaccatatggaagctgggccttcatgtggcagcaagttttcgagcccacctggaaacacattggggatggctgctgcctcaccagagagacctggaaggatcttgagaacgcccagttctccgaaatccaaatggaacgacagccccctcccttgaagtggctacctgttgggccccacatcatgggaaaggctgtcaaataatctttcccaagctccaaggcactcatttgctccttccccagcctccaattagaacaagccacccaccagcctatctatcttccactgagagggacctagcagaatgagagaagacattcatgtaccacctcctagtccctctctccccaacctctgccagggcaatctctaacttcaatcccgccttcgacagtgaaaaagctctacttctacgctgacccagggaggaaacactaggaccctgttgtatcctcaactgcaagtttctggactagtctcccaacgtttgcctcccaatgttgtccctttccttcgttcccatggtaaagctcctctcgctttcctcctgaggctacacccatgcgtctctaggaactggtcacaaaagtcatggtgcctgcatccctgccaagcccccctgaccctctctccccactaccaccttcttcctgagctgggggcaccagggagaatcagagatgctggggatgccagagcaagactc

SEQ ID NO: 277290 - DNA, 260 bp, Homo sapiens
ccgcctgcagccaggccccgccccctgcaagccctcccgccccacagagcttcgccccctgcaggtccctcgcccactacaggcctccagacccgggcaggtccctcgcccctgcagcccctcgccccgcggaaccccaccccctacagcccccctggtcccgcagagccccgccccctgcaggctcccgcccccgcccgcaaggactcccaccaagcctccctacccaccacgcccctcccgcccccaccttgcggccg

SEQ ID NO: 277291 - DNA, 1008 bp, Homo sapiens
  misc_feature (8)..(9): n is a, c, g, or t
tggatccnncgggctgcaggaattcggcacgagaaaccttgagacctcaccgcgttgacccagcaccagggctcgcgggggtcccgcgagggtctcggtagccgcgcgcccagagacccccgccgcggcccgattctctgagcgccagacatgaaccgcaagaaactgcagaagctgacggacaccttaaccaaaaattgcaagcatttattccgaggttttgataaagataatgatggctgtgtaaatgtattggagtggattcatggattatcactgtttcttcgaggatctttggaagaaaaaatgaaatattgctttgaagtgtttgatttgaatggtgacggattcatttcaaaggaggaaatgtttcacatgttgaagaacagccttctcaaacagccatctgaggaagaccctgatgaaggaattaaagatttggttgaaataacactgaagaaaatggatcatgaccatgatgggaagctgtcttttgcagactatgaactggctgtgagagaagagactcttctactggaggcctttgggccatgtcttcctgatccaaagagccagatggaatttgaagctcaagtattcaaagatccaaatgaattcaatgatatgtgaataactaaatgtctatattgtctcaaggtgaagatgaggttcacttacatatatcatttaacatcagtgtaagatgcaattaaaatagatggaagacaagaagtcccttattagatgatgggtttggcaagacagttaacttttctacagatgttttatcacatagactatctgtcgaagcacataactggcataaaacctttgggttcattaaatgaatagagattctaatatgactggtatccatatctgatgtaaagaaactgcggccctggaaacatgaactacggtttcttgacaatatgagatgttaaaaataaaagttattgcttgaacctttggagcacttggactaaaggaaaccgtgactcttttgaa

SEQ ID NO: 277292 - DNA, 2140 bp, Homo sapiens
  misc_feature (8)..(9): n is a, c, g, or t
tggatccnncgggctgcaggaattcggcacgagaaaccttgagacctcaccgcgttgacccagcaccagggctcgcgggggtcccgcgagggtctcggtagccgcgcgcccagagacccccgccgcggcccgattctctgagcgccagacatgaaccgcaagaaactgcagaagctgacggacaccttaaccaaaaattgcaagcattttaataaatttgaagtgaactgtcttataaagcttttttatgacttggtgggaggagtagagaggcaaggtctggttgttggactggatcgtaatgcatttcgaaacatcctgcatgtgacatttggaatgacagatgacatgattatggacagagtattccgaggttttgataaagataatgatggctgtgtaaatgtattggagtggattcatggattatcactgtttcttcgaggatctttggaagaaaaaatgaaatattgctttgaagtgtttgatttgaatggtgacggattcatttcaaaggaggaaatgtttcacatgttgaagaacagccttctcaaacagccatctgaggaagaccctgatgaaggaattaaagatttggttgaaataacactgaagaaaatggatcatgaccatgatgggaagctgtcttttgcagactatgaactggctgtgagagaagagactcttctactggaggcctttgggccatgtcttcctgatccaaagagccagatggaatttgaagctcaagtattcaaagatccaaatgaattcaatgatatgtgaataactaaatgtctatattgtctcaagtgagtaaaaaaggaggcacacacatattgcttattttttctacttagttcagaaaaatgatgttgaattgtgtgtttcagggtgaagatgaggttcacttacatatatcatttaacatcagtgtaagatgcaattaaaatagatggaagacaagaagtcccttattagatgatgggtttggcaagacagttaacttttctacagatgttttatcacatagactatctgtcgaagcacataactggcataaaacctttgggttcattaaatgaatagagagattacataattatgaattgttaatacaaatattctgcatgtcaaaaagaagctgggtgtacactgaaaaatcattgaaactactggatttcctttgaaacaaataatgaagatggcatcaaaagaataagagtattctattgagcattgaaacgcctttctggtaggcattgagggagatctagagagatgaaagatacatggaaatcatattatattgaaatataatatgatttgcattattgtttgaggctttggctaaataacgttactgattgtaagcacctgaaggcaagggttttatccaccacatctttgtctgccatagcatttagtcctctgcatacaatgggctgtccataattactgtagattggactgaaaatcaaaaagtaccacaagataaatgcaaactcttggtgagcagagggagaacatgtactgagtttcttaggtttcatggctaatgcattggcacagctttcagtgtatccctgcagtccttccagatagtccctgccccatgcattgcagatggttgccaaggcccccctctgtcctggcacccagtgttcctccatcctgactccacgtattgcccccttgccactgcctgagtgcaccatagtgtccccatccccccactgcctggagttccccttgtgtacccccttatcagggcacgacctaactgtgccctgctggctgtgacctcctgaagacagacctggcttctccctgcatccagttccccagtatgtgctgtgggcatcctgagaagcctgaaaaagacagggccaggttaggcttgggtgagctgctttctgccttcttggtacacacagtaagcagtggagaggcgtgttacaccgtatctgttctatcctcatctaaatactgagaggctagttgggatagtaaatctttcttactacatatgcattaagtttaagtaaaatagaatattgtgtgaaaaaatgcactgttactaataaatggaataaacagatccatgaaataaaagaaaacatattttactgtccaagtt

SEQ ID NO: 277293 - DNA, 2059 bp, Homo sapiens
  misc_feature (8)..(9): n is a, c, g, or t
tggatccnncgggctgcaggaattcggcacgagaaaccttgagacctcaccgcgttgacccagcaccagggctcgcgggggtcccgcgagggtctcggtagccgcgcgcccagagacccccgccgcggcccgattctctgagcgccagacatgaaccgcaagaaactgcagaagctgacggacaccttaaccaaaaattgcaagcattttaataaatttgaagtgaactgtcttataaagcttttttatgacttggtgggaggagtagagaggcaaggtctggttgttggactggatcgtaatgcatttcgaaacatcctgcatgtgacatttggaatgacagatgacatgattatggacagagtattccgaggttttgataaagataatgatggctgtgtaaatgtattggagtggattcatggattatcactgtttcttcgaggatctttggaagaaaaaatgaaatattgctttgaagtgtttgatttgaatggtgacggattcatttcaaaggaggaaatgtttcacatgttgaagaacagccttctcaaacagccatctgaggaagaccctgatgaaggaattaaagatttggttgaaataacactgaagaaaatggatcatgaccatgatgggaagctgtcttttgcagactatgaactggctgtgagagaagagactcttctactggaggcctttgggccatgtcttcctgatccaaagagccagatggaatttgaagctcaagtattcaaagatccaaatgaattcaatgatatgtgaataactaaatgtctatattgtctcaaggtgaagatgaggttcacttacatatatcatttaacatcagtgtaagatgcaattaaaatagatggaagacaagaagtcccttattagatgatgggtttggcaagacagttaacttttctacagatgttttatcacatagactatctgtcgaagcacataactggcataaaacctttgggttcattaaatgaatagagagattacataattatgaattgttaatacaaatattctgcatgtcaaaaagaagctgggtgtacactgaaaaatcattgaaactactggatttcctttgaaacaaataatgaagatggcatcaaaagaataagagtattctattgagcattgaaacgcctttctggtaggcattgagggagatctagagagatgaaagatacatggaaatcatattatattgaaatataatatgatttgcattattgtttgaggctttggctaaataacgttactgattgtaagcacctgaaggcaagggttttatccaccacatctttgtctgccatagcatttagtcctctgcatacaatgggctgtccataattactgtagattggactgaaaatcaaaaagtaccacaagataaatgcaaactcttggtgagcagagggagaacatgtactgagtttcttaggtttcatggctaatgcattggcacagctttcagtgtatccctgcagtccttccagatagtccctgccccatgcattgcagatggttgccaaggcccccctctgtcctggcacccagtgttcctccatcctgactccacgtattgcccccttgccactgcctgagtgcaccatagtgtccccatccccccactgcctggagttccccttgtgtacccccttatcagggcacgacctaactgtgccctgctggctgtgacctcctgaagacagacctggcttctccctgcatccagttccccagtatgtgctgtgggcatcctgagaagcctgaaaaagacagggccaggttaggcttgggtgagctgctttctgccttcttggtacacacagtaagcagtggagaggcgtgttacaccgtatctgttctatcctcatctaaatactgagaggctagttgggatagtaaatctttcttactacatatgcattaagtttaagtaaaatagaatattgtgtgaaaaaatgcactgttactaataaatggaataaacagatccatgaaataaaagaaaacatattttactgtccaagtt

SEQ ID NO: 277294 - DNA, 708 bp, Homo sapiens
  misc_feature (8)..(9): n is a, c, g, or t
tggatccnncgggctgcaggaattcggcacgagaaaccttgagacctcaccgcgttgacccagcaccagggctcgcgggggtcccgcgagggtctcggtagccgcgcgcccagagacccccgccgcggcccgattctctgagcgccagacatgaaccgcaagaaactgcagaagctgacggacaccttaaccaaaaattgcaagcatttattccgaggttttgataaagataatgatggctgtgtaaatgtattggagtggattcatggattatcactgtttcttcgaggatctttggaagaaaaaatgaaatattgctttgaagtgtttgatttgaatggtgacggattcatttcaaaggaggaaatgtttcacatgttgaagaacagccttctcaaacagccatctgaggaagaccctgatgaaggaattaaagatttggttgaaataacactgaagaaaatggatcatgaccatgatgggaagctgtcttttgcagactatgaactggctgtgagagaagagactcttctactggaggcctttgggccatgtcttcctgatccaaagagccagatggaatttgaagctcaagtattcaaagatccaaatgaattcaatgatatgtgaataactaaatgtctatattgtctcaagtgagtaaaaaaggaggcacacaaaaaaaagaaaaaaacgtctccagcgctg

SEQ ID NO: 277295 - DNA, 940 bp, Homo sapiens
  misc_feature (8)..(9): n is a, c, g, or t
tggatccnncgggctgcaggaattcggcacgagaaaccttgagacctcaccgcgttgacccagcaccagggctcgcgggggtcccgcgagggtctcggtagccgcgcgcccagagacccccgccgcggcccgattctctgagcgccagacatgaaccgcaagaaactgcagaagctgacggacaccttaaccaaaaattgcaagcattgtaagtaagaatgtagtgctggacaggccgaggctcctggaccgagcctgggtcccaccccgtgctaaggtccgctgttgtgcctgcttcccgcctgctgggactctgtgggctacctaccgcccctccaccccggccccttaagcagaagtcagagagggaatcccggggtgccagctccttgcgtttgatcttaggaacccaggcctccgcctctggtgctacctacactcccacacatgcatttacttgcttctccaaccctcttcttttacctgatagaaacatgtgatgttagcctcaatgaggtgtaaaataaatgctaaaaccaactggtctcaagaaaagtagcaccaccaaggtagaccgtgcactcaccctgctttatagctcgcacatacacccgcaggtccaagttctggaagcttaccaagagacccataggagaaaacggtgctcaacttctcaacatctttcggagagatgagttgtgtcatctcatctgtgcctcagaacaatagggttggaaccaagtcaccaactaacagtgtaagaaggtccacttgatccattcaggcctgctgtgagtaggaattggggaatatttccattagggcgtatattcgatgaggggctaatctggatggtttcggcaattgctcaggcggatgtaggaattggcgttataagtcagtcccagtggggcgtatttgtatttttattttttgtatt

SEQ ID NO: 277296 - DNA, 800 bp, Homo sapiens
  misc_feature (8)..(9): n is a, c, g, or t
tggatccnncgggctgcaggaattcggcacgagaaaccttgagacctcaccgcgttgacccagcaccagggctcgcgggggtcccgcgagggtctcggtagccgcgcgcccagagacccccgccgcggcccgattctctgagcgccagacatgaaccgcaagaaactgcagaagctgacggacaccttaaccaaaaattgcaagcattgtccaagttctggaagcttaccaagagacccataggagaaaacggtgctcaacttctcaacatctttcggagagatgagttgtgtcatctcatctgtgcctcagaacaatatttgtttggaaaccagagttcagcacaactaaacacgtgactatgaactggctgtgagagaagagactcttctactggaggcctttgggccatgtcttcctgatccaaagctaggctcacagaggtccctggggtgagagattgtcagcgtggaggacatttggatgcactggttgaaacccaggctgccctctcctagcctgagctgcacctgcccacctcccatctgcatttccaaagcctcgtgtggatgaaggggacctaagcagcctgctccctgagggaggacaccaccacttggagccacacagcctgaagacagagaacagtgtggaaattgaggaaattggattttggaaaatcaggaacgtcctatgtgtctcaactagaaaagggcaaaagccaagattcagaccttatctagttctaatgctgaagacctttgtctaaagcaaatctgttctcgccacatatcctccac

SEQ ID NO: 277297 - DNA, 2028 bp, Homo sapiens
  misc_feature (8)..(9): n is a, c, g, or t
tggatccnncgggctgcaggaattcggcacgagaaaccttgagacctcaccgcgttgacccagcaccagggctcgcgggggtcccgcgagggtctcggtagccgcgcgcccagagacccccgccgcggcccgattctctgagcgccagacatgaaccgcaagaaactgcagaagctgacggacaccttaaccaaaaattgcaagcattttaataaatttgaagtgaactgtcttataaagcttttttatgacttggtgggaggagtagagaggcaaggtctggttgttggactggatcgtaatgcatttcgaaacatcctgcatgtgacatttggaatgacagatgacatgattatggacagagtattccgaggttttgataaagataatgatggctgtgtaaatgtattggagtggattcatggattatcactgtttcttcgaggatctttggaagaaaaaatgaaatattgctttgaagtgtttgatttgaatggtgacggattcatttcaaaggaggaaatgtttcacatgttgaagaacagccttctcaaacagccatctgaggaagaccctgatgaaggaattaaagatttggttgaaataacactgaagaaaatggatcatgaccatgatgggaagctgtcttttgcagactatgaactggctgtgagagaagagactcttctactggaggcctttgggccatgtcttcctgatccaaagagccagatggaatttgaagctcaagtattcaaagatccaaatgaattcaatgatatgtgaataactaaatgtctatattgtctcaagtgagtaaaaaaggaggcacacacatattgcttattttttctacttagttcagaaaaatgatgttgaattgtgtgtttcagggtgaagatgaggttcacttacatatatcatttaacatcagtgtaagatgcaattaaaatagatggaagacaagaagtcccttattagatgatgggtttggcaagacagttaacttttctacagatgttttatcacatagactatctgtcgaagcacataactggcataaaacctttgggttcattaaatgaatagagagattacataattatgaattgttaatacaaatattctgcatgtcaaaaagaagctgggtgtacactgaaaaatcattgaaactactggatttcctttgaaacaaataatgaagatggcatcaaaagaataagagtattctattgagcattgaaacgcctttctggtaggcattgagggagatctagagagatgaaagatacatggaaatcatattatattgaaatataatatgatttgcattattgtttgaggctttggctaaataacgttactgattgtaagcacctgaaggcaagggttttatccaccacatctttgtctgccatagcatttagtcctctgcatacaatgggctgtccataattactgtagattggactgaaaatcaaaaagtaccacaagataaatgcaaactcttggtgagcagagggagaacatgtactgagtttcttaggtttcatggctaatgcattggcacagctttcagtgtatccctgcagtccttccagatagtccctgccccatgcattgcagatggttgccaaggcccccctctgtcctggcacccagtgttcctccatcctgactccacgtattgcccccttgccactgcctgagtgcaccatagtgtccccatccccccatatgtgctgtgggcatcctgagaagcctgaaaaagacagggccaggttaggcttgggtgagctgctttctgccttcttggtacacacagtaagcagtggagaggcgtgttacaccgtatctgttctatcctcatctaaatactgagaggctagttgggatagtaaatctttcttactacatatgcattaagtttaagtaaaatagaatattgtgtgaaaaaatgcactgttactaataaatggaataaacagatccatgaaataaaagaaaacatattttactgtccaagtt

SEQ ID NO: 277298 - DNA, 1903 bp, Homo sapiens
  misc_feature (8)..(9): n is a, c, g, or t
tggatccnncgggctgcaggaattcggcacgagaaaccttgagacctcaccgcgttgacccagcaccagggctcgcgggggtcccgcgagggtctcggtagccgcgcgcccagagacccccgccgcggcccgattctctgagcgccagacatgaaccgcaagaaactgcagaagctgacggacaccttaaccaaaaattgcaagcatttattccgaggttttgataaagataatgatggctgtgtaaatgtattggagtggattcatggattatcactgtttcttcgaggatctttggaagaaaaaatgaaatattgctttgaagtgtttgatttgaatggtgacggattcatttcaaaggaggaaatgtttcacatgttgaagaacagccttctcaaacagccatctgaggaagaccctgatgaaggaattaaagatttggttgaaataacactgaagaaaatggatcatgaccatgatgggaagctgtcttttgcagactatgaactggctgtgagagaagagactcttctactggaggcctttgggccatgtcttcctgatccaaagagccagatggaatttgaagctcaagtattcaaagatccaaatgaattcaatgatatgtgaataactaaatgtctatattgtctcaaggtgaagatgaggttcacttacatatatcatttaacatcagtgtaagatgcaattaaaatagatggaagacaagaagtcccttattagatgatgggtttggcaagacagttaacttttctacagatgttttatcacatagactatctgtcgaagcacataactggcataaaacctttgggttcattaaatgaatagagagattacataattatgaattgttaatacaaatattctgcatgtcaaaaagaagctgggtgtacactgaaaaatcattgaaactactggatttcctttgaaacaaataatgaagatggcatcaaaagaataagagtattctattgagcattgaaacgcctttctggtaggcattgagggagatctagagagatgaaagatacatggaaatcatattatattgaaatataatatgatttgcattattgtttgaggctttggctaaataacgttactgattgtaagcacctgaaggcaagggttttatccaccacatctttgtctgccatagcatttagtcctctgcatacaatgggctgtccataattactgtagattggactgaaaatcaaaaagtaccacaagataaatgcaaactcttggtgagcagagggagaacatgtactgagtttcttaggtttcatggctaatgcattggcacagctttcagtgtatccctgcagtccttccagatagtccctgccccatgcattgcagatggttgccaaggcccccctctgtcctggcacccagtgttcctccatcctgactccacgtattgcccccttgccactgcctgagtgcaccatagtgtccccatccccccactgcctggagttccccttgtgtacccccttatcagggcacgacctaactgtgccctgctggctgtgacctcctgaagacagacctggcttctccctgcatccagttccccagtatgtgctgtgggcatcctgagaagcctgaaaaagacagggccaggttaggcttgggtgagctgctttctgccttcttggtacacacagtaagcagtggagaggcgtgttacaccgtatctgttctatcctcatctaaatactgagaggctagttgggatagtaaatctttcttactacatatgcattaagtttaagtaaaatagaatattgtgtgaaaaaatgcactgttactaataaatggaataaacagatccatgaaataaaagaaaacatattttactgtccaagtt

SEQ ID NO: 277299 - DNA, 581 bp, Homo sapiens
actttatacaagtgtttagacacttcgccagcagccttggttttcagagagaaaaataaaataaaaacagcacttaattaaaatggagcgtgaaacccagaaggaatcatggtgtgtgagtgcttagagtgttacagttcccacccattgtttggaatttgcatcttaattcaatataaagcctgacaataggtacagcaaagagacgaatcaagacttgggtctcacagaagttacctggtgccaacatcccacgcaccatcgtggagactggctggatgccctgtgctctatcagggcatgtcagaccaacagaggggcaaatcagagtgaagaggaagccagaagatgggagagacatttttgaaggaacaagctgccaataatgtctgcaaaaagtgaattcttccaacaactacgtgagcttggaagaggaccttgaacctagaatgagactgcagcagccccagccaacacccttctcagcttcgtggaccctgagcagagaacacagcaaatttgtccagacttctcatctacagaaactgagataataaatgattgttgttttaacatcccta

SEQ ID NO: 277300 - DNA, 521 bp, Homo sapiens
tttttgagacagagtcttgctctgtcacccaggctggaatgcagtggcggaatctcagctcactgcaaactccgcctcccaggttcaagcgattctcctgcctcagcatccggagtagctgggactagaggcgcccgccaccacgcccggctaattttttgtgttttcagtagagacagggtttcaccgtgttagccaggatggtctcgatctcctgaccttgtgatctgcctgcctcggcctcccaaagtgctgggattacaggcgtgagccaccgcgcctggccaattttctcacataagttggcaggaacaagctgccaataatgtctgcaaaaagtgaattcttccaacaactacgtgagcttggaagaggaccttgaacctagaatgagactgcagcagccccagccaacacccttctcagcttcgtggaccctgagcagagaacacagcaaatttgtccagacttctcatctacagaaactgagataataaatgattgttgttttaacatcccta

SEQ ID NO: 277301 - DNA, 364 bp, Homo sapiens
tgaggcctccccagctgcatggaactccaacatcccacgcaccatcgtggagactggctggatgccctgtgctctatcagggcatgtcagaccaacagaggggcaaatcagagtgaagaggaagccagaagatgggagagacatttttgaaggaacaagctgccaataatgtctgcaaaaagtgaattcttccaacaactacgtgagcttggaagaggaccttgaacctagaatgagactgcagcagccccagccaacacccttctcagcttcgtggaccctgagcagagaacacagcaaatttgtccagacttctcatctacagaaactgagataataaatgattgttgttttaacatcccta

SEQ ID NO: 277302 - DNA, 367 bp, Homo sapiens
caggcttggaggctgggaggtctaacattaaggtgccagcatctggtgagggcctttttgctaagtcatctcatggtggaacgtggaagggcaaaagagcatcagagaatgcatgcacatgagagacgggggaccaaactcattcttttatcagggaacaagctgccaataatgtctgcaaaaagtgaattcttccaacaactacgtgagcttggaagaggaccttgaacctagaatgagactgcagcagccccagccaacacccttctcagcttcgtggaccctgagcagagaacacagcaaatttgtccagacttctcatctacagaaactgagataataaatgattgttgttttaacatcccta

SEQ ID NO: 277303 - DNA, 1295 bp, Homo sapiens
  misc_feature (1044)..(1044): n is a, c, g, or t
  misc_feature (1100)..(1100): n is a, c, g, or t
  misc_feature (1103)..(1103): n is a, c, g, or t
ttacagaggttatgtttcctccgaggagccagctatgaactgcttctccataagcgccttcggtccagttgccttctccctggggctgctcctggtgttgcctgctgccttccctgccccagtacccccaggagaagattccaaagatgtagccgccccacacagacagccactcacctcttcagaacgaattgacaaacaaattcggtacatcctcgacggcatctcagccctgagaaaggagacatgtaacaagagtaacatgtgtgaaagcagcaaagaggcactggcagaaaacaacctgaaccttccaaagatggctgaaaaagatggatgcttccaatctggattcaatgaggagacttgcctggtgaaaatcatcactggtcttttggagtttgaggtatacctagagtacctccagaacagatttgagagtagtgaggaacaagccagagctgtgcagatgagtacaaaagtcctgatccagttcctgcagaaaaaggcaaagaatctagatgcaataaccacacccagcctccatctttaaacttttaaatgtgaaatttctatcatgtaccgttagcctaacaagattttctttcctatttctgactggtgcctttcccctttttaggagcaacgaaagctactctcttagttatgttcttgtgatgtgacaaaatgtcaagaagataggagaagagaatattttatttcgttgatgctttgttcccaagtgtgaccctaaacttaagcttgtaggagttgacattctttcatgtcccttccctttactcatgccgaaactatcaactgggacatttgtgctttggtttaaaagttaattgatattatacttggttttatctaaaaagtaaatgtatttgcctttgacaaaagactgacacaagagcaaataagctttaaaatcgggtgttatgtgctttcctccatttttgagcatattatccaaaatggtctgtataatataaatgagaatgatgcagtttaagtaagcctgttataccattgtcatggacncctgtcataaagccatttcttggtttgttgggaaagaggcatatgggattatacanatncactgtaaatgtcggatggggattttggtaaattttctccaattaaggctaagcagaaaccaaaaaaaaaaagaagtaggagagaaagaaaagaaaagagatagagagagaaaaaggacaggaataaacaacaaaaaaaaagagggggggatataatacgggggggaaagagagaacatgaagaagcaatag

SEQ ID NO: 277304 - DNA, 1437 bp, Homo sapiens
ccatgtttggtaaataagtgttttggtgttgtgcaagggtctggtttcagcctgaagccatctcagagctgtctgggtctctggagactggagggacaacctagtctagagcccatttgcatgagaccaaggatcctcctgcaagagacaccatcctgagggaagagggcttctgaaccagcttgacccaataagaaattcttgggtgccgacgcggaagcagattcagagcctagagccgtgcctgcgtccgtagtttccttctagcttcttttgatttcaaatcaagacttacagggagagggagcgataaacacaaactctgcaagatgccacaaggtcctcctttgacatccccaacaaagaggactggagatgtctgaggctcattctgccctcgagcccaccgggaacgaaagagaagctctatctcccctccaggagcccagctatgaactccttctccacaatacccccaggagaagattccaaagatgtagccgccccacacagacagccactcacctcttcagaacgaattgacaaacaaattcggtacatcctcgacggcatctcagccctgagaaaggagacatgtaacaagagtaacatgtgtgaaagcagcaaagaggcactggcagaaaacaacctgaaccttccaaagatggctgaaaaagatggatgcttccaatctggattcaatgaggagacttgcctggtgaaaatcatcactggtcttttggagtttgaggtatacctagagtacctccagaacagatttgagagtagtgaggaacaagccagagctgtgcagatgagtacaaaagtcctgatccagttcctgcagaaaaaggcaaagaatctagatgcaataaccacccctgacccaaccacaaatgccagcctgctgacgaagctgcaggcacagaaccagtggctgcaggacatgacaactcatctcattctgcgcagctttaaggagttcctgcagtccagcctgagggctcttcggcaaatgtagcatgggcacctcagattgttgttgttaatgggcattccttcttctggtcagaaacctgtccactgggcacagaacttatgttgttctctatggagaactaaaagtatgagcgttaggacactattttaattatttttaatttattaatatttaaatatgtgaagctgagttaatttatgtaagtcatatttatatttttaagaagtaccacttgaaacattttatgtattagttttgaaataataatggaaagtggctatgcagtttgaatatcctttgtttcagagccagatcatttcttggaaagtgtaggcttacctcaaataaatggctaacttatacatatttttaaagaaatatttatattgtatttatataatgtataaatggtttttataccaataaatggcatttta

SEQ ID NO: 277305 - DNA, 1452 bp, Homo sapiens
ccatgtttggtaaataagtgttttggtgttgtgcaagggtctggtttcagcctgaagccatctcagagctgtctgggtctctggagactggagggacaacctagtctagagcccatttgcatgagaccaaggatcctcctgcaagagacaccatcctgagggaagagggcttctgaaccagcttgacccaataagaaattcttgggtgccgacgcggaagcagattcagagcctagagccgtgcctgcgtccgtagtttccttctagcttcttttgatttcaaatcaagacttacagggagagggagcgataaacacaaactctgcaagatgccacaaggtcctcctttgacatccccaacaaagaggactggagatgtctgaggctcattctgccctcgagcccaccgggaacgaaagagaagctctatctcccctccaggagcccagctatgaactccttctccacaagcgccttcggtccagttgccttctccctggggctgctcctggtgttgcctgctgccttccctgccccagtacccccaggagaagattccaaagatgtagccgccccacacagacagccactcacctcttcagaacgaattgacaaacaaattcggtacatcctcgacggcatctcagccctgagaaaggagaacctgaaccttccaaagatggctgaaaaagatggatgcttccaatctggattcaatgaggagacttgcctggtgaaaatcatcactggtcttttggagtttgaggtatacctagagtacctccagaacagatttgagagtagtgaggaacaagccagagctgtgcagatgagtacaaaagtcctgatccagttcctgcagaaaaaggcaaagaatctagatgcaataaccacccctgacccaaccacaaatgccagcctgctgacgaagctgcaggcacagaaccagtggctgcaggacatgacaactcatctcattctgcgcagctttaaggagttcctgcagtccagcctgagggctcttcggcaaatgtagcatgggcacctcagattgttgttgttaatgggcattccttcttctggtcagaaacctgtccactgggcacagaacttatgttgttctctatggagaactaaaagtatgagcgttaggacactattttaattatttttaatttattaatatttaaatatgtgaagctgagttaatttatgtaagtcatatttatatttttaagaagtaccacttgaaacattttatgtattagttttgaaataataatggaaagtggctatgcagtttgaatatcctttgtttcagagccagatcatttcttggaaagtgtaggcttacctcaaataaatggctaacttatacatatttttaaagaaatatttatattgtatttatataatgtataaatggtttttataccaataaatggcatttta

SEQ ID NO: 277306 - DNA, 767 bp, Homo sapiens
actcaaaaaaaaaaaaaagaagtttgttgctatggaagggtcctactcagagcaggcaccccagttaatctcattcaccccacatttcacatttgaacatcatcccatagcccagagcatccctccactgcaaaggatttattcaacatttaaacaatcctttttactttcattttccttcaggcaaagaatctagatgcaataaccacccctgacccaaccacaaatgccagcctgctgacgaagctgcaggcacagaaccagtggctgcaggacatgacaactcatctcattctgcgcagctttaaggagttcctgcagtccagcctgagggctcttcggcaaatgtagcatgggcacctcagattgttgttgttaatgggcattccttcttctggtcagaaacctgtccactgggcacagaacttatgttgttctctatggagaactaaaagtatgagcgttaggacactattttaattatttttaatttattaatatttaaatatgtgaagctgagttaatttatgtaagtcatatttatatttttaagaagtaccacttgaaacattttatgtattagttttgaaataataatggaaagtggctatgcagtttgaatatcctttgtttcagagccagatcatttcttggaaagtgtaggcttacctcaaataaatggctaacttatacatatttttaaagaaatatttatattgtatttatataatgtataaatggtttttataccaataaatggcatttta

SEQ ID NO: 277307 - DNA, 1712 bp, Homo sapiens
  misc_feature (1461)..(1461): n is a, c, g, or t
  misc_feature (1517)..(1517): n is a, c, g, or t
  misc_feature (1520)..(1520): n is a, c, g, or t
ccatgtttggtaaataagtgttttggtgttgtgcaagggtctggtttcagcctgaagccatctcagagctgtctgggtctctggagactggagggacaacctagtctagagcccatttgcatgagaccaaggatcctcctgcaagagacaccatcctgagggaagagggcttctgaaccagcttgacccaataagaaattcttgggtgccgacgcggaagcagattcagagcctagagccgtgcctgcgtccgtagtttccttctagcttcttttgatttcaaatcaagacttacagggagagggagcgataaacacaaactctgcaagatgccacaaggtcctcctttgacatccccaacaaagaggactggagatgtctgaggctcattctgccctcgagcccaccgggaacgaaagagaagctctatctcccctccaggagcccagctatgaactccttctccacaagcgccttcggtccagttgccttctccctggggctgctcctggtgttgcctgctgccttccctgccccagtacccccaggagaagattccaaagatgtagccgccccacacagacagccactcacctcttcagaacgaattgacaaacaaattcggtacatcctcgacggcatctcagccctgagaaaggagacatgtaacaagagtaacatgtgtgaaagcagcaaagaggcactggcagaaaacaacctgaaccttccaaagatggctgaaaaagatggatgcttccaatctggattcaatgaggagacttgcctggtgaaaatcatcactggtcttttggagtttgaggtatacctagagtacctccagaacagatttgagagtagtgaggaacaagccagagctgtgcagatgagtacaaaagtcctgatccagttcctgcagaaaaaggcaaagaatctagatgcaataaccacacccagcctccatctttaaacttttaaatgtgaaatttctatcatgtaccgttagcctaacaagattttctttcctatttctgactggtgcctttcccctttttaggagcaacgaaagctactctcttagttatgttcttgtgatgtgacaaaatgtcaagaagataggagaagagaatattttatttcgttgatgctttgttcccaagtgtgaccctaaacttaagcttgtaggagttgacattctttcatgtcccttccctttactcatgccgaaactatcaactgggacatttgtgctttggtttaaaagttaattgatattatacttggttttatctaaaaagtaaatgtatttgcctttgacaaaagactgacacaagagcaaataagctttaaaatcgggtgttatgtgctttcctccatttttgagcatattatccaaaatggtctgtataatataaatgagaatgatgcagtttaagtaagcctgttataccattgtcatggacncctgtcataaagccatttcttggtttgttgggaaagaggcatatgggattatacanatncactgtaaatgtcggatggggattttggtaaattttctccaattaaggctaagcagaaaccaaaaaaaaaaagaagtaggagagaaagaaaagaaaagagatagagagagaaaaaggacaggaataaacaacaaaaaaaaagagggggggatataatacgggggggaaagagagaacatgaagaagcaatag

SEQ ID NO: 277308 - DNA, 1506 bp, Homo sapiens
ccatgtttggtaaataagtgttttggtgttgtgcaagggtctggtttcagcctgaagccatctcagagctgtctgggtctctggagactggagggacaacctagtctagagcccatttgcatgagaccaaggatcctcctgcaagagacaccatcctgagggaagagggcttctgaaccagcttgacccaataagaaattcttgggtgccgacgcggaagcagattcagagcctagagccgtgcctgcgtccgtagtttccttctagcttcttttgatttcaaatcaagacttacagggagagggagcgataaacacaaactctgcaagatgccacaaggtcctcctttgacatccccaacaaagaggactggagatgtctgaggctcattctgccctcgagcccaccgggaacgaaagagaagctctatctcccctccaggagcccagctatgaactccttctccacaagcgccttcggtccagttgccttctccctggggctgctcctggtgttgcctgctgccttccctgccccagtacccccaggagaagattccaaagatgtagccgccccacacagacagccactcacctcttcagaacgaattgacaaacaaattcggtacatcctcgacggcatctcagccctgagaaaggagacatgtaacaagagtaacatgtgtgaaagcagcaaagaggcactggcagaaaacaacctgaaccttccaaagatggctgaaaaagatggatgcttccaatctggattcaatgaggagacttgcctggtgaaaatcatcactggtcttttggagtttgaggtatacctagagtacctccagaacagatttgagagtagtgaggaacaagccagagctgtgcagatgagtacaaaagtcctgatccagttcctgcagaaaaaggcaaagaatctagatgcaataaccacccctgacccaaccacaaatgccagcctgctgacgaagctgcaggcacagaaccagtggctgcaggacatgacaactcatctcattctgcgcagctttaaggagttcctgcagtccagcctgagggctcttcggcaaatgtagcatgggcacctcagattgttgttgttaatgggcattccttcttctggtcagaaacctgtccactgggcacagaacttatgttgttctctatggagaactaaaagtatgagcgttaggacactattttaattatttttaatttattaatatttaaatatgtgaagctgagttaatttatgtaagtcatatttatatttttaagaagtaccacttgaaacattttatgtattagttttgaaataataatggaaagtggctatgcagtttgaatatcctttgtttcagagccagatcatttcttggaaagtgtaggcttacctcaaataaatggctaacttatacatatttttaaagaaatatttatattgtatttatataatgtataaatggtttttataccaataaatggcatttta

SEQ ID NO: 277309 - DNA, 1082 bp, Homo sapiens
agctgtgctgtcagctcacccctgcgctcgctcccctccggcacaggcgccttcggtccagttgccttctccctggggctgctcctggtgttgcctgctgccttccctgccccagtacccccaggagaagattccaaagatgtagccgccccacacagacagccactcacctcttcagaacgaattgacaaacaaattcggtacatcctcgacggcatctcagccctgagaaaggagacatgtaacaagagtaacatgtgtgaaagcagcaaagaggcactggcagaaaacaacctgaaccttccaaagatggctgaaaaagatggatgcttccaatctggattcaatgaggagacttgcctggtgaaaatcatcactggtcttttggagtttgaggtatacctagagtacctccagaacagatttgagagtagtgaggaacaagccagagctgtgcagatgagtacaaaagtcctgatccagttcctgcagaaaaaggcaaagaatctagatgcaataaccacccctgacccaaccacaaatgccagcctgctgacgaagctgcaggcacagaaccagtggctgcaggacatgacaactcatctcattctgcgcagctttaaggagttcctgcagtccagcctgagggctcttcggcaaatgtagcatgggcacctcagattgttgttgttaatgggcattccttcttctggtcagaaacctgtccactgggcacagaacttatgttgttctctatggagaactaaaagtatgagcgttaggacactattttaattatttttaatttattaatatttaaatatgtgaagctgagttaatttatgtaagtcatatttatatttttaagaagtaccacttgaaacattttatgtattagttttgaaataataatggaaagtggctatgcagtttgaatatcctttgtttcagagccagatcatttcttggaaagtgtaggcttacctcaaataaatggctaacttatacatatttttaaagaaatatttatattgtatttatataatgtataaatggtttttataccaataaatggcatttta

SEQ ID NO: 277310 - DNA, 1315 bp, Homo sapiens
ccatgtttggtaaataagtgttttggtgttgtgcaagggtctggtttcagcctgaagccatctcagagctgtctgggtctctggagactggagggacaacctagtctagagcccatttgcatgagaccaaggatcctcctgcaagagacaccatcctgagggaagagggcttctgaaccagcttgacccaataagaaattcttgggtgccgacgcggaagcagattcagagcctagagccgtgcctgcgtccgtagtttccttctagcttcttttgatttcaaatcaagacttacagggagagggagcgataaacacaaactctgcaagatgccacaaggtcctcctttgacatccccaacaaagaggactggagatgtctgaggctcattctgccctcgagcccaccgggaacgaaagagaagctctatctcccctccaggagcccagctatgaactccttctccacaaacatgtaacaagagtaacatgtgtgaaagcagcaaagaggcactggcagaaaacaacctgaaccttccaaagatggctgaaaaagatggatgcttccaatctggattcaatgaggagacttgcctggtgaaaatcatcactggtcttttggagtttgaggtatacctagagtacctccagaacagatttgagagtagtgaggaacaagccagagctgtgcagatgagtacaaaagtcctgatccagttcctgcagaaaaaggcaaagaatctagatgcaataaccacccctgacccaaccacaaatgccagcctgctgacgaagctgcaggcacagaaccagtggctgcaggacatgacaactcatctcattctgcgcagctttaaggagttcctgcagtccagcctgagggctcttcggcaaatgtagcatgggcacctcagattgttgttgttaatgggcattccttcttctggtcagaaacctgtccactgggcacagaacttatgttgttctctatggagaactaaaagtatgagcgttaggacactattttaattatttttaatttattaatatttaaatatgtgaagctgagttaatttatgtaagtcatatttatatttttaagaagtaccacttgaaacattttatgtattagttttgaaataataatggaaagtggctatgcagtttgaatatcctttgtttcagagccagatcatttcttggaaagtgtaggcttacctcaaataaatggctaacttatacatatttttaaagaaatatttatattgtatttatataatgtataaatggtttttataccaataaatggcatttta

SEQ ID NO: 277311 - DNA, 1126 bp, Homo sapiens
ccatgtttggtaaataagtgttttggtgttgtgcaagggtctggtttcagcctgaagccatctcagagctgtctgggtctctggagactggagggacaacctagtctagagcccatttgcatgagaccaaggatcctcctgcaagagacaccatcctgagggaagagggcttctgaaccagcttgacccaataagaaattcttgggtgccgacgcggaagcagattcagagcctagagccgtgcctgcgtccgtagtttccttctagcttcttttgatttcaaatcaagacttacagggagagggagcgataaacacaaactctgcaagatgccacaaggtcctcctttgacatccccaacaaagaggactggagatgtctgaggctcattctgccctcgagcccaccgggaacgaaagagaagctctatctcccctccaggagcccagctatgaactccttctccacaagcgccttcggtccagttgccttctccctggggctgctcctggtgttgcctgctgccttccctgccccagtacccccaggagaagattccaaagatgtagccgccccacacagacagccactcacctcttcagaacgaattgacaaacaaattcggtacatcctcgacggcatctcagccctgagaaaggagacatgtaacaagagtaacatgtgtgaaagcagcaaagaggcactggcagaaaacaacctgaaccttccaaagatggctgaaaaagatggatgcttccaatctggattcaatgaggagacttgcctggtgaaaatcatcactggtcttttggagtttgaggtatacctagagtacctccagaacagatttgagagtagtgaggaacaagccagagctgtgcagatgagtacaaaagtcctgatccagttcctgcagaaaaaggtgggtgtgtcctcattccctcaacttggtgtgggggaagacaggctcaaagacagtgtcctggacaactcagggatgcaatgccacttccaaaagagaaggctacacgtaaacaaaagagtctgagaaatagtttctgattgttattgttaaatctttttttgtttgtttggttggttggctctcttctgcaaaggacatcaa

SEQ ID NO: 277312 - DNA, 621 bp, Homo sapiens
gtacggttgagccgatttccggggccactggtgtgacgtgtcccgcgcttggcgcagcaggaagcggcggcgaacgcggcctgaattcccggcgccggccccagctcctctgccgctgccgccatgctcgacttcttcaccattttctccaagggcgggcttgtgctctggtgcttccagggcgttagcgactcatgcaccggacccgttaacgcgttgattcgttccgtgctgctgcaggaacggggaggtaacaactccttcacccatgaggcactcacactcaagtataaactggacaaccagtttgagctggtgtttgtggttggttttcagaagatcctgacactgacatatgtagacaaattgatagatgacgtgcatcggctgtttcgggacaagtaccgcacagagatccaacagcaaagtgctttaagtttattaaatggcacttttgatttccaaaatgacttcctgcggctccttcgtgaagcagaggagagcagtaagatccgtgctcccactaccatgaagaaatttgaagattctgaaaagggctatggcaaggatgctgctggcattgccatggaagccattgcttttggtacagtgcatgggaag

SEQ ID NO: 277313 - DNA, 2956 bp, Homo sapiens
aaagtcctagctggtaccggtcggagtcctagatcagctcctctgccgctgccgccatgctcgacttcttcaccattttctccaagggcgggcttgtgctctggtgcttccagggcgttagcgactcatgcaccggacccgttaacgcgttgattcgttccgtgctgctgcaggaacggggaggtaacaactccttcacccatgaggcactcacactcaagtataaactggacaaccagtttgagctggtgtttgtggttggttttcagaagatcctgacactgacatatgtagacaaattgatagatgacgtgcatcggctgtttcgggacaagtaccgcacagagatccaacagcaaagtgctttaagtttattaaatggcacttttgatttccaaaatgacttcctgcggctccttcgtgaagcagaggagagcagtaagatccgtgctcccactaccatgaagaaatttgaagattctgaaaaggccaagaaacctgtgaggtccatgattgagacacggggggaaaagcccaaggaaaaagcaaagaatagcaaaaaaaagggggccaagaaggaaggttctgatggtcctttggctaccagcaaaccagtccctgcagaaaagtcaggtcttccagtgggtcctgagaacggagtagaactttccaaagaggagctgatccgcaggaagcgcgaggagttcattcagaagcatgggaggggtatggagaagtccaacaagtccacgaagtcagatgctccaaaggagaagggcaaaaaagcaccccgggtgtgggaactgggtggctgtgctaacaaagaagtgttggattacagtactcccaccaccaatggaacccctgaggctgccttgtctgaggacatcaacctgattcgagggactgggtctggggggcagcttcaggatctggactgcagcagctctgatgacgaaggggctgctcaaaactctaccaaacctagtgcgaccaagggaacactgggtggcatgtttggtatgctgaagggccttgtgggttcaaagagcttgagtcgtgaagacatggaatctgtgctggacaagatgcgtgatcatctcattgctaagaacgtggctgcagacattgccgtccagctctgtgaatctgttgccaacaagttggaagggaaggtgatggggacgttcagcacggtgacttccacagtaaagcaagccctacaggagtccctggtgcagattctgcagccacagcgtcgtgtagacatgctccgggacatcatggatgcccagcgtcgccagcgcccttatgtcgtcaccttctgcggcgttaatggagtggggaaatctactaatcttgccaagatttccttctggttgttagagaatggcttcagtgtcctcattgctgcctgtgatacatttcgtgctggggccgtggagcagctgcgtacacacacccggcgtttgagtgccctacaccctccagagaagcatggtggccgcaccatggtgcagttgtttgaaaagggctatggcaaggatgctgctggcattgccatggaagccattgcttttgcacgtaaccaaggctttgacgtggtgctggtggacacggcaggccgcatgcaagacaatgcccctctgatgactgccctggccaaactcattactgtcaatacacctgatttggtgctgtttgtaggagaagccttagtaggcaatgaagccgtggaccagctggtcaagttcaacagagccttggctgaccattctatggctcagacacctcggctcattgatggcattgttcttaccaaatttgataccattgatgacaaggtgggagctgctatttctatgacgtacatcacaagcaaacccatcgtctttgtgggcaccggccagacctactgtgacctacgcagcctcaatgccaaggctgtggtggctgccctcatgaaggcttaacgtggctcttgcccaataccaaatcgccgctttccccacaagcccttcttcctgtatcaagaatgtgctttagagtatgtgagcaacctgtcttcagtgtagtacaaaggcagagtgagggggcttgtggctccttccaaccccactccccgttcagcacagccgccatctgcaaggaaggcctaatcatgttacaatcactgcccactgaccctctcccagcgggcctcccccttcctactcaggcacccccttcactctgcctacagactcagtcttattacagctttgaccaatggttggaacccaacaccagagctttgctaataattagtgtggtcaagagccgtctgagcctaatgagtcccagctgcattaggttaagagactcttccagagccagcgccaggtcttgaatggcacctctccctaggatacacagcctgcaggtccccaggacctggatgacacccgcctcactgtggcagtgtattgcctgttaattgctgctaattctaattctgatgatgactcctactccattgtttaccccaaagcatcagctaggctggagtgatttgttacaaatgagcaaaagatgagtccttgcttccctcagaaataaaaggagctcagctgcagcgttgcattgggcttcttggcctcccaactcttcccactcccagaatccagaagtaagctctgcatgttccccttcctgggaggaaaccaattgtcagaaggatgtatgatgaccccctcccctcccatccttcacctcctaagcagtcctggcttttcctcatcactcccctctacagtgcctggtagacaagtgctacattgaagaacacaaacctcttgttaagacttgtcctgtagcttgatattacagatgtgctattagtgcaataaggtgaaggctgtctgcccagagaaataagtaatttatataagaaaataaatttcataaataaattgcc

SEQ ID NO: 277314 - DNA, 3404 bp, Homo sapiens
gtacggttgagccgatttccggggccactggtgtgacgtgtcccgcgcttggcgcagcaggaagcggcggcgaacgcggcctgaattcccggcgccggccccagctcctctgccgctgccgccatgctcgacttcttcaccattttctccaagggcgggcttgtgctctggtgcttccagggcgttagcgactcatgcaccggacccgttaacgcgttgattcgttccgtgctgctgcaggaacggggaggtaacaactccttcacccatgaggcactcacactcaagtataaactggacaaccagtttgagctggtgtttgtggttggttttcagaagatcctgacactgacatatgtagacaaattgatagatgacgtgcatcggctgtttcgggacaagtaccgcacagagatccaacagcaaagtgctttaagtttattaaatggcacttttgatttccaaaatgacttcctgcggctccttcgtgaagcagaggagagcagtaagatccgtgctcccactaccatgaagaaatttgaagattctgaaaaggccaagaaacctgtgaggtccatgattgagacacggggggaaaagcccaaggaaaaagcaaagaatagcaaaaaaaagggggccaagaaggaaggttctgatggtcctttggctaccagcaaaccagtccctgcagaaaagtcaggtcttccagtgggtcctgagaacggagtagaactttccaaagaggagctgatccgcaggaagcgcgaggagttcattcagaagcatgggaggggtatggagaagtccaacaagtccacgaagtcagatgctccaaaggagaagggcaaaaaagcaccccgggtgtgggaactgggtggctgtgctaacaaagaagtgttggattacagtactcccaccaccaatggaacccctgaggctgccttgtctgaggacatcaacctgattcgagggactgggtctggggggcagcttcaggatctggactgcagcagctctgatgacgaaggggctgctcaaaactctaccaaacctagtgcgaccaagggaacactgggtggcatgtttggtatgctgaagggccttgtgggttcaaagagcttgagtcgtgaagacatggaatctgtgctggacaagatgcgtgatcatctcattgctaagaacgtggctgcagacattgccgtccagctctgtgaatctgttgccaacaagttggaagggaaggtgatggggacgttcagcacggtgacttccacagtaaagcaagccctacaggagtccctggtgcagattctgcagccacagcgtcgtgtagacatgctccgggacatcatggatgcccagcgtcgccagcgcccttatgtcgtcaccttctgcggcgttaatggagtggggaaatctactaatcttgccaagatttccttctggttgttagagaatggcttcagtgtcctcattgctgcctgtgatacatttcgtgctggggccgtggagcagctgcgtacacacacccggcgtttgagtgccctacaccctccagagaagcatggtggccgcaccatggtgcagttgtttgaaaagggctatggcaaggatgctgctggcattgccatggaagccattgcttttgcacgtaaccaaggctttgacgtggtgctggtggacacggcaggccgcatgcaagacaatgcccctctgatgactgccctggccaaactcattactgtcaatacacctgatttggtgctgtttgtaggagaagccttagtaggcaatgaagccgtggaccagctggtcaagttcaacagagccttggctgaccattctatggctcagacacctcggctcattgatggcattgttcttaccaaatttgataccattgatgacaaggtgggagctgctatttctatgacgtacatcacaagcaaacccatcgtctttgtgggcaccggccagacctactgtgacctacgcagcctcaatgccaaggctgtggtggctgccctcatgaaggcttaacgtggctcttgcccaataccaaatcgccgctttccccacaagcccttcttcctgtatcaagaatgtgctttagagtatgtgagcaacctgtcttcagtgtagtacaaaggcagagtgagggggcttgtggctccttccaaccccactccccgttcagcacagccgccatctgcaaggaaggcctaatcatgttacaatcactgcccactgaccctctcccagcgggcctcccccttcctactcaggcacccccttcactctgcctacagactcagtcttattacagctttgaccaatggttggaacccaacaccagagctttgctaataattagtgtggtcaagagccgtctgagcctaatgagtcccagctgcattaggttaagagactcttccagagccagcgccaggtcttgaatggcacctctccctaggatacacagcctgcaggtccccaggacctggatgacacccgcctcactgtggcagtgtattgcctgttaattgctgctaattctaattctgatgatgactcctactccattgtttaccccaaagcatcagctaggctggagtgatttgttacaaatgagcaaaagatgagtccttgcttccctcagaaataaaaggagctcagctgcagcgttgcattgggcttcttggcctcccaactcttcccactcccagaatccagaagtaagctctgcatgttccccttcctgggaggaaaccaattgtcagaaggatgtatgatgaccccctcccctcccatccttcacctcctaagcagtcctggcttttcctcatcactcccctctacagtgcctggtagacaagtgctacattgaagaacacaaacctcttgttaagacttgtcctgtagcttgatattacagatgtgctattagtgcaataaggtgaaggctgtctgcccagagaaataagtaatttatataagaaaataaatttcataaataaattgccaaaaaaaaaaaaaaaaaaaaaaaaaaaaaaaaaaaaaaaaaaaaaaaaaaaaaaaaaaaaaaaaaaaaaaaaaaaaaaggaaaaaaaaaaaaaaaaaaaaacttgcgcccgaatttgggcctcattggccaaattccccttatggggggccgattaacaatcaatggcccgcggtttaacacggtcggaatgggaaaaccctgggggttcccaaattaaacgccttggaagaaaatccccttttcgcaagtgggcgaaaaaccaaagagccccccccggatggcctttccaaacagtggcccacccttgatggccatgggaaattgaagccgttaatatttggtattccgcgtataatttttggtcagccaattttttccc

SEQ ID NO: 277315 - DNA, 2807 bp, Homo sapiens
  misc_feature (761)..(762): n is a, c, g, or t
  misc_feature (764)..(764): n is a, c, g, or t
  misc_feature (784)..(784): n is a, c, g, or t
  misc_feature (791)..(791): n is a, c, g, or t
agttctacatcgctgagccggccacccttatctatatcaactcatgaagcttccctcctacatgttagtcatcttcaacaatttctaacttctatctgactatgctagaaatcgcatgttcgctcttaattccaatgcctagcgtttttcgacaactatctatgttaatgcctctagcctgtcgacgacaactagcattaacaaaacaaacacagagaagataatgaaatagaccataacaacacacatcacaaaaaaaagcaataaatgagaccagcgagccagtggtgcagatgtttgcacccagggcgtatggcaaggatgctgctggcagttgcccattggaagccatggctctcttgcacgtaaccaaggctttgacgtggtgcgtggtggacacggcaggccgcatgcaagacaaatgcccctctgatgactgccctggccaaactcattactgtcagagtaccagcctgatttggtgctgtatgtagagagaagccttagtaggcacatgaagccgtggaccagctggtcaagttcaacagagcctatggctgaccattctatggctcagacacctcggctcattgatggcattgttcttaccaaatttgataccatggatgaccaaaggtgggaagctgctatttctatgacgtacatcacaagcaaaccatcgtctaatgtgggcaccggcagacctactgtgactacgcagctcaatgccaaggctgtggtggctgccctcatgaaggctnnangtggctcttgccaataccanatcgccnctttccccacaagcccttcttcctgtatctaaactcgaccaaaccttgtgcgaccaagggaacactgggtggcatgtttggtatgctgaagggccttgtgggttcaaagagcttgagtcgtgaagacatggaatctgtgctggacaagatgcgtgatcatctcattgctaagaacgtggctgcagacattgccgtccagctctgtgaatctgttgccaacaagttggaagggaaggtgatggggacgttcagcacggtgacttccacagtaaagcaagccctacaggagtccctggtgcagattctgcagccacagcgtcgtgtagacatgctccgggacatcatggatgcccagcgtcgccagcgcccttatgtcgtcaccttctgcggcgttaatggagtggggaaatctactaatcttgccaagatttccttctggttgttagagaatggcttcagtgtcctcattgctgcctgtgatacatttcgtgctggggccgtggagcagctgcgtacacacacccggcgtttgagtgccctacaccctccagagaagcatggtggccgcaccatggtgcagttgtttgaaaagggctatggcaaggatgctgctggcattgccatggaagccattgcttttgcacgtaaccaaggctttgacgtggtgctggtggacacggcaggccgcatgcaagacaatgcccctctgatgactgccctggccaaactcattactgtcaatacacctgatttggtgctgtttgtaggagaagccttagtaggcaatgaagccgtggaccagctggtcaagttcaacagagccttggctgaccattctatggctcagacacctcggctcattgatggcattgttcttaccaaatttgataccattgatgacaaggtgggagctgctatttctatgacgtacatcacaagcaaacccatcgtctttgtgggcaccggccagacctactgtgacctacgcagcctcaatgccaaggctgtggtggctgccctcatgaaggcttaacgtggctcttgcccaataccaaatcgccgctttccccacaagcccttcttcctgtatcaagaatgtgctttagagtatgtgagcaacctgtcttcagtgtagtacaaaggcagagtgagggggcttgtggctccttccaaccccactccccgttcagcacagccgccatctgcaaggaaggcctaatcatgttacaatcactgcccactgaccctctcccagcgggcctcccccttcctactcaggcacccccttcactctgcctacagactcagtcttattacagctttgaccaatggttggaacccaacaccagagctttgctaataattagtgtggtcaagagccgtctgagcctaatgagtcccagctgcattaggttaagagactcttccagagccagcgccaggtcttgaatggcacctctccctaggatacacagcctgcaggtccccaggacctggatgacacccgcctcactgtggcagtgtattgcctgttaattgctgctaattctaattctgatgatgactcctactccattgtttaccccaaagcatcagctaggctggagtgatttgttacaaatgagcaaaagatgagtccttgcttccctcagaaataaaaggagctcagctgcagcgttgcattgggcttcttggcctcccaactcttcccactcccagaatccagaagtaagctctgcatgttccccttcctgggaggaaaccaattgtcagaaggatgtatgatgaccccctcccctcccatccttcacctcctaagcagtcctggcttttcctcatcactcccctctacagtgcctggtagacaagtgctacattgaagaacacaaacctcttgttaagacttgtcctgtagcttgatattacagatgtgctattagtgcaataaggtgaaggctgtctgcccagagaaataagtaatttatataagaaaataaatttcataaataaattgcc

SEQ ID NO: 277316 - DNA, 3693 bp, Homo sapiens
gtacggttgagccgatttccggggccactggtgtgacgtgtcccgcgcttggcgcagcaggaagcggcggcgaacgcggcctgaattcccggcgccggccccagctcctctgccgctgccgccatgctcgacttcttcaccattttctccaagggcgggcttgtgctctggtgcttccagggcgttagcgactcatgcaccggacccgttaacgcgttgattcgttccgtgctgctgcaggaacggggaggtaacaactccttcacccatgaggcactcacactcaagtataaactggacaaccagtttgagctggtgtttgtggttggttttcagaagatcctgacactgacatatgtagacaaattgatagatgacgtgcatcggctgtttcgggacaagtaccgcacagagatccaacagcaaagtgctttaagtttattaaatggcacttttgatttccaaaatgacttcctgcggctccttcgtgaagcagaggagagcagtaagatccgtgctcccactaccatgaagaaatttgaagattctgaaaaggccaagaaacctgtgaggtccatgattgagacacggggggaaaagcccaaggaaaaagcaaagaatagcaaaaaaaagggggccaagaaggaaggttctgatggtcctttggctaccagcaaaccagtccctgcagaaaagtcaggtcttccagtgggtcctgagaacggagtagaactttccaaagaggagctgatccgcaggaagcgcgaggagttcattcagaagcatgggaggggtatggagaagtccaacaagtccacgaagtcagatgctccaaaggagaagggcaaaaaagcaccccgggtgtgggaactgggtggctgtgctaacaaagaagtgttggattacagtactcccaccaccaatggaacccctgaggctgccttgtctgaggacatcaacctgattcgagggactgggtctggggggcagcttcaggatctggactgcagcagctctgatgacgaaggggctgctcaaaactctaccaaacctagtgcgaccaagggaacactgggtggcatgtttggtatgctgaagggccttgtgggttcaaagagcttgagtcgtgaagacatggaatctgtgctggacaagatgcgtgatcatctcattgctaagaacgtggctgcagacattgccgtccagctctgtgaatctgttgccaacaagttggaagggaaggtgatggggacgttcagcacggtgacttccacagtaaagcaagccctacaggagtccctggtgcagattctgcagccacagcgtcgtgtagacatgctccgggacatcatggatgcccagcgtcgccagcgcccttatgtcgtcaccttctgcggcgttaatggagtggggaaatctactaatcttgccaagatttccttctggttgttagagaatggcttcagtgtcctcattgctgcctgtgatacatttcgtgctggggccgtggagcagctgcgtacacacacccggcgtttgagtgccctacaccctccagagaagcatggtggccgcaccatggtgcagttgtttgaaaagggctatggcaaggatgctgctggcattgccatggaagccattgcttttgcacgtaaccaaggctttgacgtggtgctggtggacacggcaggccgcatgcaagacaatgcccctctgatgactgccctggccaaactcattactgtcaatacacctgatttggtgctgtttgtaggagaagccttagtaggcaatgaagccgtggaccagctggtcaagttcaacagagccttggctgaccattctatggctcagacacctcggctcattgatggcattgttcttaccaaatttgataccattgatgacaaggtgggagctgctatttctatgacgtacatcacaagcaaacccatcgtctttgtgggcaccggccagacctactgtgacctacgcagcctcaatgccaaggctgtggtggctgccctcatgaaggcttaacgtggctcttgcccaataccaaatcgccgctttccccacaagcccttcttcctgtatcaagaatgtgctttagagtatgtgagcaacctgtcttcagtgtagtacaaaggcagagtgagggggcttgtggctccttccaaccccactccccgttcagcacagccgccatctgcaaggaaggcctaatcatgttacaatcactgcccactgaccctctcccagcgggcctcccccttcctactcaggcacccccttcactctgcctacagactcagtcttattacagctttgaccaatggttggaacccaacaccagagctttgctaataattagtgtggtcaagagccgtctgagcctaatgagtcccagctgcattaggttaagagactcttccagagccagcgccaggtcttgaatggcacctctccctaggatacacagcctgcaggtccccaggacctggatgacacccgcctcactgtggcagtgtattgcctgttaattgctgctaattctaattctgatgatgactcctactccattgtttaccccaaagcatcagctaggctggagtgatttgttacaaatgagcaaaagatgagtccttgcttccctcagaaataaaaggagctcagctgcagcgttgcattgggcttcttggcctcccaactcttcccactcccagaatccagaagtaagctctgcatgttccccttcctgggaggaaaccaattgtcagaaggatgtatgatgaccccctcccctcccatccttcacctcctaagcagtcctggcttttcctcatcactcccctctacagtgcctggtagacaagtgctacattgaagaacacaaacctcttgttaagacttgtcctgtagcttgatattacagatgtgctattagtgcaataaggtgaaggctgtctgcccagagaaataagtaatttatataagaaaataaatttcataaataaattgccttttaggtcttggagttcttttatacaggattcaaaactaaaattccacaacacacttaactgtagttctaggacatatgtatggtcaggacaacagagcagaagttgataatgctccgaggaatcaggtaagtaaacggttgtcctgagaatgagatcactccaccccaaggagaaagatcggaacctttaaactttgggttattaaaattaagcttattagtaccttgatgcaagttagagtttcttacaatgactctaaaagtagagccagggtcctggcaagtaaatgaacaagcttttaatacagcttagttatgtaaaatactgtacactgtaaaagatctagaaaactagagcttcaagtcatgttttaaaaaagccattaagcttaattgaaaaaccaagtatagagtacaaaactgcaacaagagccacagtgattccatggcatccagaccccgagtccttcatgcagagctgcagccggtcagtggaagtatcacattggtgtgctgtgtggacacaagcatgtctagcctggggagtgggttgggagctgcatttgggtcctgcttgtcgcttttattcttgaacttgaacaggcggcagaatatcaagaaccaggtggtatgaaggattacgctgcaacattcccccctcttctacc

SEQ ID NO: 277317 - DNA, 1329 bp, Homo sapiens
cggacgcgtgggtcgacccacgcgtcctgccctggccaaactcattactgtcaatacacctgatttggtgctgtttgtaggagaagccttagtaggcaatgaagccgtggaccagctggtcaagttcaacagagccttggctgaccattctatggctcagacacctcggctcattgatggcattgttcttaccaaatttgataccattgatgacaaggtgggagctgctatttctatgacgtacatcacaagcaaacccatcgtctttgtgggcaccggccagacctactgtgacctacgcagcctcaatgccaaggctgtggtggctgccctcatgaaggcttaacgtggctcttgcccaataccaaatcgccgctttccccacaagcccttcttcctgtatcaagaatgtgctttagagtatgtgagcaacctgtcttcagtgtagtacaaaggcagagtgagggggcttgtggctccttccaaccccactccccgttcagcacagccgccatctgcaaggaaggcctaatcatgttacaatcactgcccactgaccctctcccagcgggcctcccccttcctactcaggcacccccttcactctgcctacagactcagtcttattacagctttgaccaatggttggaacccaacaccagagctttgctaataattagtgtggtcaagagccgtctgagcctaatgagtcccagctgcattaggttaagagactcttccagagccagcgccaggtcttgaatggcacctctccctaggatacacagcctgcaggtccccaggacctggatgacacccgcctcactgtggcagtgtattgcctgttaattgctgctaattctaattctgatgatgactcctactccattgtttaccccaaagcatcagctaggctggagtgatttgttacaaatgagcaaaagatgagtccttgcttccctcagaaataaaaggagctcagctgcagcgttgcattgggcttcttggcctcccaactcttcccactcccagaatccagaagtaagctctgcatgttccccttcctgggaggaaaccaattgtcagaaggatgtatgatgaccccctcccctcccatccttcacctcctaagcagtcctggcttttcctcatcactcccctctacagtgcctggtagacaagtgctacattgaagaacacaaacctcttgttaagacttgtcctgtagcttgatattacagatgtgctattagtgcaataaggtgaaggctgtctgcccagagaaataagtaatttatataagaaaataaatttcataaataaattgcc

SEQ ID NO: 277318 - DNA, 1285 bp, Homo sapiens
cggacgcgtgggtcgacccacgcgtcctgtttgtaggagaagccttagtaggcaatgaagccgtggaccagctggtcaagttcaacagagccttggctgaccattctatggctcagacacctcggctcattgatggcattgttcttaccaaatttgataccattgatgacaaggtgggagctgctatttctatgacgtacatcacaagcaaacccatcgtctttgtgggcaccggccagacctactgtgacctacgcagcctcaatgccaaggctgtggtggctgccctcatgaaggcttaacgtggctcttgcccaataccaaatcgccgctttccccacaagcccttcttcctgtatcaagaatgtgctttagagtatgtgagcaacctgtcttcagtgtagtacaaaggcagagtgagggggcttgtggctccttccaaccccactccccgttcagcacagccgccatctgcaaggaaggcctaatcatgttacaatcactgcccactgaccctctcccagcgggcctcccccttcctactcaggcacccccttcactctgcctacagactcagtcttattacagctttgaccaatggttggaacccaacaccagagctttgctaataattagtgtggtcaagagccgtctgagcctaatgagtcccagctgcattaggttaagagactcttccagagccagcgccaggtcttgaatggcacctctccctaggatacacagcctgcaggtccccaggacctggatgacacccgcctcactgtggcagtgtattgcctgttaattgctgctaattctaattctgatgatgactcctactccattgtttaccccaaagcatcagctaggctggagtgatttgttacaaatgagcaaaagatgagtccttgcttccctcagaaataaaaggagctcagctgcagcgttgcattgggcttcttggcctcccaactcttcccactcccagaatccagaagtaagctctgcatgttccccttcctgggaggaaaccaattgtcagaaggatgtatgatgaccccctcccctcccatccttcacctcctaagcagtcctggcttttcctcatcactcccctctacagtgcctggtagacaagtgctacattgaagaacacaaacctcttgttaagacttgtcctgtagcttgatattacagatgtgctattagtgcaataaggtgaaggctgtctgcccagagaaataagtaatttatataagaaaataaatttcataaataaattgcc

SEQ ID NO: 277319 - DNA, 3655 bp, Homo sapiens
gtacggttgagccgatttccggggccactggtgtgacgtgtcccgcgcttggcgcagcaggaagcggcggcgaacgcggcctgaattcccggcgccggccccagctcctctgccgctgccgccatgctcgacttcttcaccattttctccaagggcgggcttgtgctctggtgcttccagggcgttagcgactcatgcaccggacccgttaacgcgttgattcgttccgtgctgctgcaggaacggggaggtaacaactccttcacccatgaggcactcacactcaagtataaactggacaaccagtttgagctggtgtttgtggttggttttcagaagatcctgacactgacatatgtagacaaattgatagatgacgtgcatcggctgtttcgggacaagtaccgcacagagatccaacagcaaagtgctttaagtttattaaatggcacttttgatttccaaaatgacttcctgcggctccttcgtgaagcagaggagagcagtaagatccgtgctcccactaccatgaagaaatttgaagattctgaaaaggccaagaaacctgtgaggtccatgattgagacacggggggaaaagcccaaggaaaaagcaaagaatagcaaaaaaaagggggccaagaaggaaggttctgatggtcctttggctaccagcaaaccagtccctgcagaaaagtcaggtcttccagtgggtcctgagaacggagtagaactttccaaagaggagctgatccgcaggaagcgcgaggagttcattcagaagcatgggaggggtatggagaagtccaacaagtccacgaagtcagatgctccaaaggagaagggcaaaaaagcaccccgggtgtgggaactgggtggctgtgctaacaaagaagtgttggattacagtactcccaccaccaatggaacccctgaggctgccttgtctgaggacatcaacctgattcgagggactgggtctggggggcagcttcaggatctggactgcagcagctctgatgacgaaggggctgctcaaaactctaccaaacctagtgcgaccaagggaacactgggtggcatgtttggtatgctgaagggccttgtgggttcaaagagcttgagtcgtgaagacatggaatctgtgctggacaagatgcgtgatcatctcattgctaagaacgtggctgcagacattgccgtccagctctgtgaatctgttgccaacaagttggaagggaaggtgatggggacgttcagcacggtgacttccacagtaaagcaagccctacaggagtccctggtgcagattctgcagccacagcgtcgtgtagacatgctccgggacatcatggatgcccagcgtcgccagcgcccttatgtcgtcaccttctgcggcgttaatggagtggggaaatctactaatcttgccaagatttccttctggttgttagagaatggcttcagtgtcctcattgctgcctgtgatacatttcgtgctggggccgtggagcagctgcgtacacacacccggcgtttgagtgccctacaccctccagagaagcatggtggccgcaccatggtgcagttgtttgaaaagggctatggcaaggatgctgctggcattgccatggaagccattgcttttgcacgtaaccaaggctttgacgtggtgctggtggacacggcaggccgcatgcaagacaatgcccctctgatgactgccctggccaaactcattactgtcaatacacctgatttggtgctgtttgtaggagaagccttagtaggcaatgaagccgtggaccagctggtcaagttcaacagagccttggctgaccattctatggctcagacacctcggctcattgatggcattgttcttaccaaatttgataccattgatgacaaggtgggagctgctatttctatgacgtacatcacaagcaaacccatcgtctttgtgggcaccggccagacctactgtgacctacgcagcctcaatgccaaggctgtggtggctgccctcatgaaggcttaacgtggctcttgcccaataccaaatcgccgctttccccacaagcccttcttcctgtatcaagaatgtgctttagagtatgtgagcaacctgtcttcagtgtagtacaaaggcagagtgagggggcttgtggctccttccaaccccactccccgttcagcacagccgccatctgcaaggaaggcctaatcatgttacaatcactgcccactgaccctctcccagcgggcctcccccttcctactcaggcacccccttcactctgcctacagactcagtcttattacagctttgaccaatggttggaacccaacaccagagctttgctaataattagtgtggtcaagagccgtctgagcctaatgagtcccagctgcattaggttaagagactcttccagagccagcgccaggtcttgaatggcacctctccctaggatacacagcctgcaggtccccaggacctggatgacacccgcctcactgtggcagtgtattgcctgttaattgctgctaattctaattctgatgatgactcctactccattgtttaccccaaagcatcagctaggctggagtgatttgttacaaatgagcaaaagatgagtccttgcttccctcagaaataaaaggagctcagctgcagcgttgcattgggcttcttggcctcccaactcttcccactcccagaatccagaagtaagctctgcatgttccccttcctgggaggaaaccaattgtcagaaggatgtatgatgaccccctcccccatcactcccctctacagtgcctggtagacaagtgctacattgaagaacacaaacctcttgttaagacttgtcctgtagcttgatattacagatgtgctattagtgcaataaggtgaaggctgtctgcccagagaaataagtaatttatataagaaaataaatttcataaataaattgccttttaggtcttggagttcttttatacaggattcaaaactaaaattccacaacacacttaactgtagttctaggacatatgtatggtcaggacaacagagcagaagttgataatgctccgaggaatcaggtaagtaaacggttgtcctgagaatgagatcactccaccccaaggagaaagatcggaacctttaaactttgggttattaaaattaagcttattagtaccttgatgcaagttagagtttcttacaatgactctaaaagtagagccagggtcctggcaagtaaatgaacaagcttttaatacagcttagttatgtaaaatactgtacactgtaaaagatctagaaaactagagcttcaagtcatgttttaaaaaagccattaagcttaattgaaaaaccaagtatagagtacaaaactgcaacaagagccacagtgattccatggcatccagaccccgagtccttcatgcagagctgcagccggtcagtggaagtatcacattggtgtgctgtgtggacacaagcatgtctagcctggggagtgggttgggagctgcatttgggtcctgcttgtcgcttttattcttgaacttgaacaggcggcagaatatcaagaaccaggtggtatgaaggattacgctgcaacattcccccctcttctacc

SEQ ID NO: 277320 - DNA, 1081 bp, Homo sapiens
gcgggggttcctggcagagcgtgggttccttgcagacctactgtgacctacgcagcctcaatgccaaggctgtggtggctgccctcatgaaggcttaacgtggctcttgcccaataccaaatcgccgctttccccacaagcccttcttcctgtatcaagaatgtgctttagagtatgtgagcaacctgtcttcagtgtagtacaaaggcagagtgagggggcttgtggctccttccaaccccactccccgttcagcacagccgccatctgcaaggaaggcctaatcatgttacaatcactgcccactgaccctctcccagcgggcctcccccttcctactcaggcacccccttcactctgcctacagactcagtcttattacagctttgaccaatggttggaacccaacaccagagctttgctaataattagtgtggtcaagagccgtctgagcctaatgagtcccagctgcattaggttaagagactcttccagagccagcgccaggtcttgaatggcacctctccctaggatacacagcctgcaggtccccaggacctggatgacacccgcctcactgtggcagtgtattgcctgttaattgctgctaattctaattctgatgatgactcctactccattgtttaccccaaagcatcagctaggctggagtgatttgttacaaatgagcaaaagatgagtccttgcttccctcagaaataaaaggagctcagctgcagcgttgcattgggcttcttggcctcccaactcttcccactcccagaatccagaagtaagctctgcatgttccccttcctgggaggaaaccaattgtcagaaggatgtatgatgaccccctcccctcccatccttcacctcctaagcagtcctggcttttcctcatcactcccctctacagtgcctggtagacaagtgctacattgaagaacacaaacctcttgttaagacttgtcctgtagcttgatattacagatgtgctattagtgcaataaggtgaaggctgtctgcccagagaaataagtaatttatataagaaaataaatttcataaataaattgcc

SEQ ID NO: 277321 - DNA, 2972 bp, Homo sapiens
gtacggttgagccgatttccggggccactggtgtgacgtgtcccgcgcttggcgcagcaggaagcggcggcgaacgcggcctgaattcccggcgccggccccagctcctctgccgctgccgccatgctcgacttcttcaccattttctccaagggcgggcttgtgctctggtgcttccagggcgttagcgactcatgcaccggacccgttaacgcgttgattcgttccgtgctgctgcaggaacggggaggtaacaactccttcacccatgaggcactcacactcaagtataaactggacaaccagtttgagctggtgtttgtggttggttttcagaagatcctgacactgacatatgtagacaaattgatagatgacgtgcatcggctgtttcgggacaagtaccgcacagagatccaacagcaaagtgctttaagtttattaaatggcacttttgatttccaaaatgacttcctgcggctccttcgtgaagcagaggagagcagtaagatccgtgctcccactaccatgaagaaatttgaagattctgaaaaggccaagaaacctgtgaggtccatgattgagacacggggggaaaagcccaaggaaaaagcaaagaatagcaaaaaaaagggggccaagaaggaaggttctgatggtcctttggctaccagcaaaccagtccctgcagaaaagtcaggtcttccagtgggtcctgagaacggagtagaactttccaaagaggagctgatccgcaggaagcgcgaggagttcattcagaagcatgggaggggtatggagaagtccaacaagtccacgaagtcagatgctccaaaggagaagggcaaaaaagcaccccgggtgtgggaactgggtggctgtgctaacaaagaagtgttggattacagtactcccaccaccaatggaacccctgaggctgccttgtctgaggacatcaacctgattcgagggactgggtctggggggcagcttcaggatctggactgcagcagctctgatgacgaaggggctgctcaaaactctaccaaacctagtgcgaccaagggaacactgggtggcatgtttggtatgctgaagggccttgtgggttcaaagagcttgagtcgtgaagacatggaatctgtgctggacaagatgcgtgatcatctcattgctaagaacgtggctgcagacattgccgtccagctctgtgaatctgttgccaacaagttggaagggaaggtgatggggacgttcagcacggtgacttccacagtaaagcaagccctacaggagtccctggtgcagattctgcagccacagcgtcgtgtagacatgctccgggacatcatggatgcccagcgtcgccagcgcccttatgtcgtcaccttctgcggcgttaatggagtggggaaatctactaatcttgccaagatttccttctggttgttagagaatggcttcagtgtcctcattgctgcctgtgatacatttcgtgctggggccgtggagcagctgcgtacacacacccggcgtttgagtgccctacaccctccagagaagcatggtggccgcaccatggtgcagttgtttgaaaagggctatggcaaggatgctgctggcattgccatggaagccattgcttttgcacgtaaccaaggctttgacgtggtgctggtggacacggcaggccgcatgcaagacaatgcccctctgatgactgccctggccaaactcattactgtcaatacacctgatttggtgctgtttgtaggagaagccttagtaggcaatgaagccgtggaccagctggtcaagttcaacagagccttggctgaccattctatggctcagacacctcggctcattgatggcattgttcttaccaaatttgataccattgatgacaaggtgggagctgctatttctatgacgtacatcacaagcaaacccatcgtctttgtgggcaccggccagacctactgtgacctacgcagcctcaatgccaaggctgtggtggctgccctcatgaaggcttaacgtggctcttgcccaataccaaatcgccgctttccccacaagcccttcttcctgtatcaagaatgtgctttagagtatgtgagcaacctgtcttcagtgtagtacaaaggcagagtgagggggcttgtggctccttccaaccccactccccgttcagcacagccgccatctgcaaggaaggcctaatcatgttacaatcactgcccactgaccctctcccagcgggcctcccccttcctactcaggcacccccttcactctgcctacagactcagtcttattacagctttgaccaatggttggaacccaacaccagagctttgctaataattagtgtggtcaagagccgtctgagcctaatgagtcccagctgcattaggttaagagactcttccagagccagcgccaggtcttgaatggcacctctccctaggatacacagcctgcaggtccccaggacctggatgacacccgcctcactgtggcagtgtattgcctgttaattgctgctaattctaattctgatgatgactcctactccattgtttaccccaaagcatcagctaggctggagtgatttgttacaaatgagcaaaagatgagtccttgcttccctcagaaattcccactcccagaatccagaagtaagctctgcatgttccccttcctgggaggaaaccaattgtcagaaggatgtatgatgaccccctcccctcccatccttcacctcctaagcagtcctggcttttcctcatcactcccctctacagtgcctggtagacaagtgctacattgaagaacacaaacctcttgttaagacttgtcctgtagcttgatattacagatgtgctattagtgcaataaggtgaaggctgtctgcccagagaaataagtaatttatataagaaaataaatttcataaataaattgcc

SEQ ID NO: 277322 - DNA, 2739 bp, Homo sapiens
  misc_feature (2737)..(2737): n is a, c, g, or t
gtacggttgagccgatttccggggccactggtgtgacgtgtcccgcgcttggcgcagcaggaagcggcggcgaacgcggcctgaattcccggcgccggccccagctcctctgccgctgccgccatgctcgacttcttcaccattttctccaagggcgggcttgtgctctggtgcttccagggcgttagcgactcatgcaccggacccgttaacgcgttgattcgttccgtgctgctgcaggaacggggaggtaacaactccttcacccatgaggcactcacactcaagtataaactggacaaccagtttgagctggtgtttgtggttggttttcagaagatcctgacactgacatatgtagacaaattgatagatgacgtgcatcggctgtttcgggacaagtaccgcacagagatccaacagcaaagtgctttaagtttattaaatggcacttttgatttccaaaatgacttcctgcggctccttcgtgaagcagaggagagcagtaagatccgtgctcccactaccatgaagaaatttgaagattctgaaaaggccaagaaacctgtgaggtccatgattgagacacggggggaaaagcccaaggaaaaagcaaagaatagcaaaaaaaagggggccaagaaggaaggttctgatggtcctttggctaccagcaaaccagtccctgcagaaaagtcaggtcttccagtgggtcctgagaacggagtagaactttccaaagaggagctgatccgcaggaagcgcgaggagttcattcagaagcatgggaggggtatggagaagtccaacaagtccacgaagtcagatgctccaaaggagaagggcaaaaaagcaccccgggtgtgggaactgggtggctgtgctaacaaagaagtgttggattacagtactcccaccaccaatggaacccctgaggctgccttgtctgaggacatcaacctgattcgagggactgggtctggggggcagcttcaggatctggactgcagcagctctgatgacgaaggggctgctcaaaactctaccaaacctagtgcgaccaagggaacactgggtggcatgtttggtatgctgaagggccttgtgggttcaaagagcttgagtcgtgaagacatggaatctgtgctggacaagatgcgtgatcatctcattgctaagaacgtggctgcagacattgccgtccagctctgtgaatctgttgccaacaagttggaagggaaggtgatggggacgttcagcacggtgacttccacagtaaagcaagccctacaggagtccctggtgcagattctgcagccacagcgtcgtgtagacatgctccgggacatcatggatgcccagcgtcgccagcgcccttatgtcgtcaccttctgcggcgttaatggagtggggaaatctactaatcttgccaagatttccttctggttgttagagaatggcttcagtgtcctcattgctgcctgtgatacatttcgtgctggggccgtggagcagctgcgtacacacacccggcgtttgagtgccctacaccctccagagaagcatggtggccgcaccatggtgcagttgtttgaaaagggctatggcaaggatgctgctggcattgccatggaagccattgcttttgcacgtaaccaaggctttgacgtggtgctggtggacacggcaggccgcatgcaagacaatgcccctctgatgactgccctggccaaactcattactgtcaatacacctgatttggtgctgtttgtaggagaagccttagtaggcaatgaagccgtggaccagctggtcaagttcaacagagccttggctgaccattctatggctcagacacctcggctcattgatggcattgttcttaccaaatttgataccattgatgacaaggtgggagctgctatttctatgacgtacatcacaagcaaacccatcgtctttgtgggcaccggccagacctactgtgacctacgcagcctcaatgccaaggctgtggtggctgccctcatgaaggcttaacgtggctcttgcccaataccaaatcgccgctttccccacaagcccttcttcctgtatcaagaatgtgctttagagtatgtgagcaacctgtcttcagtgtagtacaaaggcagagtgagggggcttgtggctccttccaaccccactccccgttcagcacagccgccatctgcaaggaaggcctaatcatgttacaatcactgcccactgaccctctcccagcgggcctcccccttcctactcaggcacccccttcactctgcctacagactcagtcttattacagctttgaccaatggttggaacccaacaccagagctttgctaataattagtgtggtcaagagccgtctgagcctaatgagtcccagctgcattaggttaagagactcttccagagccagcgccaggtcttgaatggcacctctccctaggatacacagcctgcaggtccccaggacctggatgacacccgcctcactgtggcagtgtattgcctgttaattgctgctaattctaattctgatgatgactcctactccattgtttaccccaaagcatcagctaggctggagtgatttgttacaaatgagcaaaagatgagtccttgcttccctcagaaataaaaggagctcagctgcagcgttgcattgggcttcttggcctcccaactctagttggggatactctagagcggncc

SEQ ID NO: 277323 - DNA, 2054 bp, Homo sapiens
gtacggttgagccgatttccggggccactggtgtgacgtgtcccgcgcttggcgcagcaggaagcggcggcgaacgcggcctgaattcccggcgccggccccagctcctctgccgctgccgccatgctcgacttcttcaccattttctccaagggcgggcttgtgctctggtgcttccagggcgttagcgactcatgcaccggacccgttaacgcgttgattcgttccgtgctgctgcaggaacggggaggtaacaactccttcacccatgaggcactcacactcaagtataaactggacaaccagtttgagctggtgtttgtggttggttttcagaagatcctgacactgacatatgtagacaaattgatagatgacgtgcatcggctgtttcgggacaagtaccgcacagagatccaacagcaaagtgctttaagtttattaaatggcacttttgatttccaaaatgacttcctgcggctccttcgtgaagcagaggagagcagtaagatccgtgctcccactaccatgaagaaatttgaagattctgaaaaggccaagaaacctgtgaggtccatgattgagacacggggggaaaagcccaaggaaaaagcaaagaatagcaaaaaaaagggggccaagaaggaaggttctgatggtcctttggctaccagcaaaccagtccctgcagaaaagtcaggtcttccagtgggtcctgagaacggagtagaactttccaaagaggagctgatccgcaggaagcgcgaggagttcattcagaagcatgggaggggtatggagaagtccaacaagtccacgaagtcagatgctccaaaggagaagggcaaaaaagcaccccgggtgtgggaactgggtggctgtgctaacaaagaagtgttggattacagtactcccaccaccaatggaacccctgaggctgccttgtctgaggacatcaacctgattcgagggactgggtctggggggcagcttcaggatctggactgcagcagctctgatgacgaaggggctgctcaaaactctaccaaacctagtgcgaccaagggaacactgggtggcatgtttggtatgctgaagggccttgtgggttcaaagagcttgagtcgtgaagacatggaatctgtgctggacaagatgcgtgatcatctcattgctaagaacgtggctgcagacattgccgtccagctctgtgaatctgttgccaacaagttggaagggaaggtgatggggacgttcagcacggtgacttccacagtaaagcaagccctacaggagtccctggtgcagattctgcagccacagcgtcgtgtagacatgctccgggacatcatggatgcccagcgtcgccagcgcccttatgtcgtcaccttctgcggcgttaatggagtggggaaatctactaatcttgccaagatttccttctggttgttagagaatggcttcagtgtcctcattgctgcctgtgatacatttcgtgctggggccgtggagcagctgcgtacacacacccggcgtttgagtgccctacaccctccagagaagcatggtggccgcaccatggtgcagttgtttgaaaagggctatggcaaggatgctgctggcattgccatggaagccattgcttttgcacgtaaccaaggctttgacgtggtgctggtggacacggcaggccgcatgcaagacaatgcccctctgatgactgccctggccaaactcattactgtcaatacacctgatttggtgctgtttgtaggagaagccttagtaggcaatgaagccgtggaccagctggtcaagttcaacagagccttggctgaccattctatggctcagacacctcggctcattgatggcattgttcttaccaaatttgataccattgatgacaaggtggtccacggcttcattgcctactaaggcttctcctacaaacaggaccaaatcaggtgtattgacagtcatgagtatggccagggcagtcatcacaggggcattgtcttgcatgcggtctgccgtgtccaccagtgcatcca

SEQ ID NO: 277324 - DNA, 1643 bp, Homo sapiens
  misc_feature (1643)..(1643): n is a, c, g, or t
gtacggttgagccgatttccggggccactggtgtgacgtgtcccgcgcttggcgcagcaggaagcggcggcgaacgcggcctgaattcccggcgccggccccagctcctctgccgctgccgccatgctcgacttcttcaccattttctccaagggcgggcttgtgctctggtgcttccagggcgttagcgactcatgcaccggacccgttaacgcgttgattcgttccgtgctgctgcaggaacggggaggtaacaactccttcacccatgaggcactcacactcaagtataaactggacaaccagtttgagctggtgtttgtggttggttttcagaagatcctgacactgacatatgtagacaaattgatagatgacgtgcatcggctgtttcgggacaagtaccgcacagagatccaacagcaaagtgctttaagtttattaaatggcacttttgatttccaaaatgacttcctgcggctccttcgtgaagcagaggagagcagtaagatccgtgctcccactaccatgaagaaatttgaagattctgaaaaggccaagaaacctgtgaggtccatgattgagacacggggggaaaagcccaaggaaaaagcaaagaatagcaaaaaaaagggggccaagaaggaaggttctgatggtcctttggctaccagcaaaccagtccctgcagaaaagtcaggtcttccagtgggtcctgagaacggagtagaactttccaaagaggagctgatccgcaggaagcgcgaggagttcattcagaagcatgggaggggtatggagaagtccaacaagtccacgaagtcagatgctccaaaggagaagggcaaaaaagcaccccgggtgtgggaactgggtggctgtgctaacaaagaagtgttggattacagtactcccaccaccaatggaacccctgaggctgccttgtctgaggacatcaacctgattcgagggactgggtctggggggcagcttcaggatctggactgcagcagctctgatgacgaaggggctgctcaaaactctaccaaacctagtgcgaccaagggaacactgggtggcatgtttggtatgctgaagggccttgtgggttcaaagagcttgagtcgtgaagacatggaatctgtgctggacaagatgcgtgatcatctcattggctaagaacgtggctgccgaccattgcccgttcccaggctctgctggactcttgacgaccaaacaaagttgggacagggaacgtgactgcgggaacgttaccgcacccggtgcacatccacagacaaaccaagccctagcaggagttccctgagatgacacaattcctgcaaggccacacaggtccgttgctaagaacaggtggcatccagggggacactcgaatgggaatagcccccagcatgcatcagcacaagaaggccctattaaatagtccgagaccacccacttccggagccagacgcactacaacttggaacagctgcgagggaacaagttctacacagtaaaagcacttgagcaacagagtagctcccacattactaagagctaccgataacgcagcgaaagtcggggcttcgaaagcaggacaacaccactacgttggcacgcgcctagggtggcgaaan

SEQ ID NO: 277325 - DNA, 886 bp, Homo sapiens
gtacggttgagccgatttccggggccactggtgtgacgtgtcccgcgcttggcgcagcaggaagcggcggcgaacgcggcctgaattcccggcgccggccccagctcctctgccgctgccgccatgctcgacttcttcaccattttctccaagggcgggcttgtgctctggtgcttccagggcgttagcgactcatgcaccggacccgttaacgcgttgattcgttccgtgctgctgcaggaacggggaggtaacaactccttcacccatgaggcactcacactcaagtataaactggacaaccagtttgagctggtgtttgtggttggttttcagaagatcctgacactgacatatgtagacaaattgatagatgacgtgcatcggctgtttcgggacaagtaccgcacagagatccaacagcaaagtgctttaagtttattaaatggcacttttgatttccaaaatgacttcctgcggctccttcggtgagagacctgccttctctaaaatcaatttatttccatgatttgatgacctctctgaaggtggttcaaaggtggtaaattgatgtgttcaaagacattcctaatttgctacccagttctcattgtcctcttgggtgtgagagtcctttctctggaccgttatttttccttctgcatggggtagaaagataaaccattctcctttttgtttagtgaagcagaggagagcagtaagatccgtgctcccactaccatgaagaaatttgaagattctgaaaaggccaagaaacctgtgaggtccatgattgagacacggggggaaaagcccaaggaaaaagcaaagaatagcaaaaaaaagggggccaagaaggaaggcaagtttgagttctttggatata

SEQ ID NO: 277326 - DNA, 550 bp, Homo sapiens
gtacggttgagccgatttccggggccactggtgtgacgtgtcccgcgcttggcgcagcaggaagcggcggcgaacgcggcctgaattcccggcgccggccccagctcctctgccgctgccgccatgctcgacttcttcaccattttctccaagggcgggcttgtgctctggtgcttccagggcgttagcgactcatgcaccggacccgttaacgcgttgattcgttccgtgctgctgcaggaacggggaggtaacaactccttcacccatgaggcactcacactcaagtataaactggacaaccagtttgagctggtgtttgtggttggttttcagaagatcctgacactgacatatgtagacaaattgatagatgacgtgcatcggctgtttcgggacaagtaccgcacagagatccaacagcaaagtgctttaagtttattaaatggcacttttgatttccaaaatgacttcctgcggctccttcgtgaagcagggagcagtaagatacatgctcagccacgcgatgggatcctctaagtcgcgcaga

SEQ ID NO: 277327 - DNA, 466 bp, Homo sapiens
gtacggttgagccgatttccggggccactggtgtgacgtgtcccgcgcttggcgcagcaggaagcggcggcgaacgcggcctgaattcccggcgccggccccagctcctctgccgctgccgccatgctcgacttcttcaccattttctccaagggcgggcttgtgctctggtgcttccagggcgttagcgactcatgcaccggacccgttaacgcgttgattcgttccgtgctgctgcaggaacggggaggtaacaactccttcacccatgaggcactcacactcaagtataaactggacaaccagtttgagctggtgtttgtggttggttttcagaagatcctgacactgacatatgtagacaaattgatattacagatgtgctattagtgcaataaggtgaaggctgtctgcccagagaaataagtaatttatataagaaaataaatttcataaataaattgcc

SEQ ID NO: 277328 - DNA, 478 bp, Homo sapiens
catctttttcccccaacttggttatcttatttctggtggaatgccagagagaagtgccccaacatcctcttgtcctggggacagatttgagtttgggggaaatgtttggctctttcccaaaggttatccaaacccagggcccaaacctgggttttctggggatagtctgaacactgagacatactctttctccaggaacggggaggtaacaactccttcacccatgaggcactcacactcaagtataaactggacaaccagtttgagctggtgtttgtggtaagtggggtgttgtagagggacgattgcattgttaacatagccctgatttttaagagaactctgattaattgcagccagtgtatatgatgacgtaactgaaaaaactagaaaggtagatgggggaaaacagcagctactgggcccaggcagggagcttggctgcctctcaggacagggaaaccggccaggtagctga

SEQ ID NO: 277329 - DNA, 487 bp, Homo sapiens
tatactgggacatgaaaggtgttaacacggtgctaaggactgaggtggtccttccttttgtcattgcttacctgcttctcactcaaatggtcaccatcctataatccccaggccttatgaactccaagatgtttggtccaaatttcctttgaacaatttggaagacttttagccattgtctagtggttgggattggtcttcttttttcttcagtgagttttttccccaacaggttctgatggtcctttggctaccagcaaaccagtccctgcagaaaagtcaggtcttccagtgggtcctgagaacggagtagaactttccaaagaggagctgatccgcaggaagcgcgaggagttcattcagaagcatgggaggggtatggagaagtccaagtgagcactctttctccagtactctcaaaatactgttatctagacacaatgggtgcaagggagttctggtctctggctcatgtttcctttcctac

SEQ ID NO: 277330 - DNA, 333 bp, Homo sapiens
cagagacctagtgttcctgacccacatcctttccccgtatctccagattcgagggactgggtctggggggcagcttcaggatctggactgcagcagctctgatgacgaaggggctgctcaaaactctaccaaacctaggtaggggaatttcaggtgggggttggtatatgcatctgcaaaactggtaagatacaactcctgcctactggttttatgtgtatgtgtaatctcctgtccctgcagtgcgaccaagggaacactgggtggcatgtttggtatgctgaagggccttgtgggttcaaagagcttgagtcgtgaagacatggaatctgt

SEQ ID NO: 277331 - DNA, 660 bp, Homo sapiens
gaggctggaatgggcgtcctgcacaaaggagctgaggctgcaaggaaatcttggctccagcgcttcctgttcctgagagggtgagtgaaaagtgggcttgtgttgatgggctgtcctctttctccacttaggtgggagctgctatttctatgacgtacatcacaagcaaacccatcgtctttgtgggcaccggccagacctactgtgacctacgcagcctcaatgccaaggctgtggtggctgccctcatgaaggcttaacgtggctcttgcccaataccaaatcgccgctttccccacaagcccttcttcctgtatcaagaatgtgctttagagtatgtgagcaacctgtcttcagtgtagtacaaaggcagagtgagggggcttgtggctccttccaaccccactccccgttcagcacagccgccatctgcaaggaaggcctaatcatgttacaatcactgcccactgaccctctcccagcgggcctcccccttcctactcaggcacccccttcactctgcctacagactcagtcttattacagctttgaccaatggttggaacccaacaccagagctttgctaataattagtgtggtcaagagccgtctgagcctaatgagtcccagctgcattaggttaagagactcttccagagc

SEQ ID NO: 277332 - DNA, 3023 bp, Homo sapiens
gtacggttgagccgatttccggggccactggtgtgacgtgtcccgcgcttggcgcagcaggaagcggcggcgaacgcggcctgaattcccggcgccggccccagctcctctgccgctgccgccatgctcgacttcttcaccattttctccaagggcgggcttgtgctctggtgcttccagggcgttagcgactcatgcaccggacccgttaacgcgttgattcgttccgtgctgctgcaggaacggggaggtaacaactccttcacccatgaggcactcacactcaagtataaactggacaaccagtttgagctggtgtttgtggttggttttcagaagatcctgacactgacatatgtagacaaattgatagatgacgtgcatcggctgtttcgggacaagtaccgcacagagatccaacagcaaagtgctttaagtttattaaatggcacttttgatttccaaaatgacttcctgcggctccttcgtgaagcagaggagagcagtaagatccgtgctcccactaccatgaagaaatttgaagattctgaaaaggccaagaaacctgtgaggtccatgattgagacacggggggaaaagcccaaggaaaaagcaaagaatagcaaaaaaaagggggccaagaaggaaggttctgatggtcctttggctaccagcaaaccagtccctgcagaaaagtcaggtcttccagtgggtcctgagaacggagtagaactttccaaagaggagctgatccgcaggaagcgcgaggagttcattcagaagcatgggaggggtatggagaagtccaacaagtccacgaagtcagatgctccaaaggagaagggcaaaaaagcaccccgggtgtgggaactgggtggctgtgctaacaaagaagtgttggattacagtactcccaccaccaatggaacccctgaggctgccttgtctgaggacatcaacctgattcgagggactgggtctggggggcagcttcaggatctggactgcagcagctctgatgacgaaggggctgctcaaaactctaccaaacctagtgcgaccaagggaacactgggtggcatgtttggtatgctgaagggccttgtgggttcaaagagcttgagtcgtgaagacatggaatctgtgctggacaagatgcgtgatcatctcattgctaagaacgtggctgcagacattgccgtccagctctgtgaatctgttgccaacaagttggaagggaaggtgatggggacgttcagcacggtgacttccacagtaaagcaagccctacaggagtccctggtgcagattctgcagccacagcgtcgtgtagacatgctccgggacatcatggatgcccagcgtcgccagcgcccttatgtcgtcaccttctgcggcgttaatggagtggggaaatctactaatcttgccaagatttccttctggttgttagagaatggcttcagtgtcctcattgctgcctgtgatacatttcgtgctggggccgtggagcagctgcgtacacacacccggcgtttgagtgccctacaccctccagagaagcatggtggccgcaccatggtgcagttgtttgaaaagggctatggcaaggatgctgctggcattgccatggaagccattgcttttgcacgtaaccaaggctttgacgtggtgctggtggacacggcaggccgcatgcaagacaatgcccctctgatgactgccctggccaaactcattactgtcaatacacctgatttggtgctgtttgtaggagaagccttagtaggcaatgaagccgtggaccagctggtcaagttcaacagagccttggctgaccattctatggctcagacacctcggctcattgatggcattgttcttaccaaatttgataccattgatgacaaggtgggagctgctatttctatgacgtacatcacaagcaaacccatcgtctttgtgggcaccggccagacctactgtgacctacgcagcctcaatgccaaggctgtggtggctgccctcatgaaggcttaacgtggctcttgcccaataccaaatcgccgctttccccacaagcccttcttcctgtatcaagaatgtgctttagagtatgtgagcaacctgtcttcagtgtagtacaaaggcagagtgagggggcttgtggctccttccaaccccactccccgttcagcacagccgccatctgcaaggaaggcctaatcatgttacaatcactgcccactgaccctctcccagcgggcctcccccttcctactcaggcacccccttcactctgcctacagactcagtcttattacagctttgaccaatggttggaacccaacaccagagctttgctaataattagtgtggtcaagagccgtctgagcctaatgagtcccagctgcattaggttaagagactcttccagagccagcgccaggtcttgaatggcacctctccctaggatacacagcctgcaggtccccaggacctggatgacacccgcctcactgtggcagtgtattgcctgttaattgctgctaattctaattctgatgatgactcctactccattgtttaccccaaagcatcagctaggctggagtgatttgttacaaatgagcaaaagatgagtccttgcttccctcagaaataaaaggagctcagctgcagcgttgcattgggcttcttggcctcccaactcttcccactcccagaatccagaagtaagctctgcatgttccccttcctgggaggaaaccaattgtcagaaggatgtatgatgaccccctcccctcccatccttcacctcctaagcagtcctggcttttcctcatcactcccctctacagtgcctggtagacaagtgctacattgaagaacacaaacctcttgttaagacttgtcctgtagcttgatattacagatgtgctattagtgcaataaggtgaaggctgtctgcccagagaaataagtaatttatataagaaaataaatttcataaataaattgcc

SEQ ID NO: 277333 - DNA, 321 bp, Homo sapiens
tcgactcttgagtatcccggttcattgctgataccagccatgaggcactcacactcaagtataaactggacaaccagtttgagctggtgtttgtggttggttttcagaagatcctgacactgacatatgtagacaaattgatagatgacgtgcatcggctgtttcgggacaagtaccgcacagagatccaacagcaaagtgctttaagtttattaaatggcacttttgatttccaaaatgacttcctgcggctccttcgtgaagcagaggagagcagtaagatccgtgctcctgttataatcgcgtagacaagtgaccggg

SEQ ID NO: 277334 - DNA, 2859 bp, Homo sapiens
gtacggttgagccgatttccggggccactggtgtgacgtgtcccgcgcttggcgcagcaggaagcggcggcgaacgcggcctgaattcccggcgccggccccagctcctctgccgctgccgccatgctcgacttcttcaccattttctccaagggcgggcttgtgctctggtgcttccagggcgttagcgactcatgcaccggacccgttaacgcgttgattcgttccgtgctgctgcaggaacggggaggtaacaactccttcacccatgaggcactcacactcaagtataaactggacaaccagtttgagctggtgtttgtggttggttttcagaagatcctgacactgacatatgtagacaaattgatagatgacgtgcatcggctgtttcgggacaagtaccgcacagagatccaacagcaaagtgctttaagtttattaaatggcacttttgatttccaaaatgacttcctgcggctccttcgtgaagcagaggagagcagtaagatccgtgctcccactaccatgaagaaatttgaagattctgaaaaggccaagaaacctgtgaggtccatgattgagacacggggggaaaagcccaaggaaaaagcaaagaatagcaaaaaaaagggggccaagaaggaaggttctgatggtcctttggctaccagcaaaccagtccctgcagaaaagtcaggtcttccagtgggtcctgagaacggagtagaactttccaaagaggagctgatccgcaggaagcgcgaggagttcattcagaagcatgggaggggtatggagaagtccaacaagtccacgaagtcagatgctccaaaggagaagggcaaaaaagcaccccgggtgtgggaactgggtggctgtgctaacaaagaagtgttggattacagtactcccaccaccaatggaacccctgaggctgccttgtctgaggacatcaacctgattcgagggactgggtctggggggcagcttcaggatctggactgcagcagctctgatgacgaaggggctgctcaaaactctaccaaacctagtgcgaccaagggaacactgggtggcatgtttggtatgctgaagggccttgtgggttcaaagagcttgagtcgtgaagacatggaatctgtgctggacaagatgcgtgatcatctcattgctaagaacgtggctgcagacattgccgtccagctctgtgaatctgttgccaacaagttggaagggaaggtgatggggacgttcagcacggtgacttccacagtaaagcaagccctacaggagtccctggtgcagattctgcagccacagcgtcgtgtagacatgctccgggacatcatggatgcccagcgtcgccagcgcccttatgtcgtcaccttctgcggcgttaatggagtggggaaatctactaatcttgccaagatttccttctggttgttagagaatggcttcagtgtcctcattgctgcctgtgatacatttcgtgctggggccgtggagcagctgcgtacacacacccggcgtttgagtgccctacaccctccagagaagcatggtggccgcaccatggtgcagttgtttgaaaagggctatggcaaggatgctgctggcattgccatggaagccattgcttttggtcaagttcaacagagccttggctgaccattctatggctcagacacctcggctcattgatggcattgttcttaccaaatttgataccattgatgacaaggtgggagctgctatttctatgacgtacatcacaagcaaacccatcgtctttgtgggcaccggccagacctactgtgacctacgcagcctcaatgccaaggctgtggtggctgccctcatgaaggcttaacgtggctcttgcccaataccaaatcgccgctttccccacaagcccttcttcctgtatcaagaatgtgctttagagtatgtgagcaacctgtcttcagtgtagtacaaaggcagagtgagggggcttgtggctccttccaaccccactccccgttcagcacagccgccatctgcaaggaaggcctaatcatgttacaatcactgcccactgaccctctcccagcgggcctcccccttcctactcaggcacccccttcactctgcctacagactcagtcttattacagctttgaccaatggttggaacccaacaccagagctttgctaataattagtgtggtcaagagccgtctgagcctaatgagtcccagctgcattaggttaagagactcttccagagccagcgccaggtcttgaatggcacctctccctaggatacacagcctgcaggtccccaggacctggatgacacccgcctcactgtggcagtgtattgcctgttaattgctgctaattctaattctgatgatgactcctactccattgtttaccccaaagcatcagctaggctggagtgatttgttacaaatgagcaaaagatgagtccttgcttccctcagaaataaaaggagctcagctgcagcgttgcattgggcttcttggcctcccaactcttcccactcccagaatccagaagtaagctctgcatgttccccttcctgggaggaaaccaattgtcagaaggatgtatgatgaccccctcccctcccatccttcacctcctaagcagtcctggcttttcctcatcactcccctctacagtgcctggtagacaagtgctacattgaagaacacaaacctcttgttaagacttgtcctgtagcttgatattacagatgtgctattagtgcaataaggtgaaggctgtctgcccagagaaataagtaatttatataagaaaataaatttcataaataaattgcc

SEQ ID NO: 277335 - DNA, 3236 bp, Homo sapiens
gtacggttgagccgatttccggggccactggtgtgacgtgtcccgcgcttggcgcagcaggaagcggcggcgaacgcggcctgaattcccggcgccggccccagctcctctgccgctgccgccatgctcgacttcttcaccattttctccaagggcgggcttgtgctctggtgcttccagggcgttagcgactcatgcaccggacccgttaacgcgttgattcgttccgtgctgctgcaggaacggggaggtaacaactccttcacccatgaggcactcacactcaagtataaactggacaaccagtttgagctggtgtttgtggttggttttcagaagatcctgacactgacatatgtagacaaattgatagatgacgtgcatcggctgtttcgggacaagtaccgcacagagatccaacagcaaagtgctttaagtttattaaatggcacttttgatttccaaaatgacttcctgcggctccttcggtgagagacctgccttctctaaaatcaatttatttccatgatttgatgacctctctgaaggtggttcaaaggtggtaaattgatgtgttcaaagacattcctaatttgctacccagttctcattgtcctcttgggtgtgagagtcctttctctggaccgttatttttccttctgcatggggtagaaagataaaccattctcctttttgtttagtgaagcagaggagagcagtaagatccgtgctcccactaccatgaagaaatttgaagattctgaaaaggccaagaaacctgtgaggtccatgattgagacacggggggaaaagcccaaggaaaaagcaaagaatagcaaaaaaaagggggccaagaaggaaggttctgatggtcctttggctaccagcaaaccagtccctgcagaaaagtcaggtcttccagtgggtcctgagaacggagtagaactttccaaagaggagctgatccgcaggaagcgcgaggagttcattcagaagcatgggaggggtatggagaagtccaacaagtccacgaagtcagatgctccaaaggagaagggcaaaaaagcaccccgggtgtgggaactgggtggctgtgctaacaaagaagtgttggattacagtactcccaccaccaatggaacccctgaggctgccttgtctgaggacatcaacctgattcgagggactgggtctggggggcagcttcaggatctggactgcagcagctctgatgacgaaggggctgctcaaaactctaccaaacctagtgcgaccaagggaacactgggtggcatgtttggtatgctgaagggccttgtgggttcaaagagcttgagtcgtgaagacatggaatctgtgctggacaagatgcgtgatcatctcattgctaagaacgtggctgcagacattgccgtccagctctgtgaatctgttgccaacaagttggaagggaaggtgatggggacgttcagcacggtgacttccacagtaaagcaagccctacaggagtccctggtgcagattctgcagccacagcgtcgtgtagacatgctccgggacatcatggatgcccagcgtcgccagcgcccttatgtcgtcaccttctgcggcgttaatggagtggggaaatctactaatcttgccaagatttccttctggttgttagagaatggcttcagtgtcctcattgctgcctgtgatacatttcgtgctggggccgtggagcagctgcgtacacacacccggcgtttgagtgccctacaccctccagagaagcatggtggccgcaccatggtgcagttgtttgaaaagggctatggcaaggatgctgctggcattgccatggaagccattgcttttgcacgtaaccaaggctttgacgtggtgctggtggacacggcaggccgcatgcaagacaatgcccctctgatgactgccctggccaaactcattactgtcaatacacctgatttggtgctgtttgtaggagaagccttagtaggcaatgaagccgtggaccagctggtcaagttcaacagagccttggctgaccattctatggctcagacacctcggctcattgatggcattgttcttaccaaatttgataccattgatgacaaggtgggagctgctatttctatgacgtacatcacaagcaaacccatcgtctttgtgggcaccggccagacctactgtgacctacgcagcctcaatgccaaggctgtggtggctgccctcatgaaggcttaacgtggctcttgcccaataccaaatcgccgctttccccacaagcccttcttcctgtatcaagaatgtgctttagagtatgtgagcaacctgtcttcagtgtagtacaaaggcagagtgagggggcttgtggctccttccaaccccactccccgttcagcacagccgccatctgcaaggaaggcctaatcatgttacaatcactgcccactgaccctctcccagcgggcctcccccttcctactcaggcacccccttcactctgcctacagactcagtcttattacagctttgaccaatggttggaacccaacaccagagctttgctaataattagtgtggtcaagagccgtctgagcctaatgagtcccagctgcattaggttaagagactcttccagagccagcgccaggtcttgaatggcacctctccctaggatacacagcctgcaggtccccaggacctggatgacacccgcctcactgtggcagtgtattgcctgttaattgctgctaattctaattctgatgatgactcctactccattgtttaccccaaagcatcagctaggctggagtgatttgttacaaatgagcaaaagatgagtccttgcttccctcagaaataaaaggagctcagctgcagcgttgcattgggcttcttggcctcccaactcttcccactcccagaatccagaagtaagctctgcatgttccccttcctgggaggaaaccaattgtcagaaggatgtatgatgaccccctcccctcccatccttcacctcctaagcagtcctggcttttcctcatcactcccctctacagtgcctggtagacaagtgctacattgaagaacacaaacctcttgttaagacttgtcctgtagcttgatattacagatgtgctattagtgcaataaggtgaaggctgtctgcccagagaaataagtaatttatataagaaaataaatttcataaataaattgcc

SEQ ID NO: 277336 - DNA, 2040 bp, Homo sapiens
gagaaagtgcttatgtgtaggttaagtgcatagacctcagttcttactaggtatgtgactttcggcaaattccttaacctctaaacctctgtaacctagattttaagggttattgagaggattcagtgagttagtccttgtaatgtgcgtctgttctggatttctgggacaagagtctaatttactgttttagtccccttagctcagaaaggtgttaggcatttttgagagcattccttgagtttcacagctgcaacctcctccacctcccctttcagcggtgacttccacagtaaagcaagccctacaggagtccctggtgcagattctgcagccacagcgtcgtgtagacatgctccgggacatcatggatgcccagcgtcgccagcgcccttatgtcgtcaccttctgcggcgttaatggagtggggaaatctactaatcttgccaagatttccttctggttgttagagaatggcttcagtgtcctcattgctgcctgtgatacatttcgtgctggggccgtggagcagctgcgtacacacacccggcgtttgagtgccctacaccctccagagaagcatggtggccgcaccatggtgcagttgtttgaaaagggctatggcaaggatgctgctggcattgccatggaagccattgcttttgcacgtaaccaaggctttgacgtggtgctggtggacacggcaggccgcatgcaagacaatgcccctctgatgactgccctggccaaactcattactgtcaatacacctgatttggtgctgtttgtaggagaagccttagtaggcaatgaagccgtggaccagctggtcaagttcaacagagccttggctgaccattctatggctcagacacctcggctcattgatggcattgttcttaccaaatttgataccattgatgacaaggtgggagctgctatttctatgacgtacatcacaagcaaacccatcgtctttgtgggcaccggccagacctactgtgacctacgcagcctcaatgccaaggctgtggtggctgccctcatgaaggcttaacgtggctcttgcccaataccaaatcgccgctttccccacaagcccttcttcctgtatcaagaatgtgctttagagtatgtgagcaacctgtcttcagtgtagtacaaaggcagagtgagggggcttgtggctccttccaaccccactccccgttcagcacagccgccatctgcaaggaaggcctaatcatgttacaatcactgcccactgaccctctcccagcgggcctcccccttcctactcaggcacccccttcactctgcctacagactcagtcttattacagctttgaccaatggttggaacccaacaccagagctttgctaataattagtgtggtcaagagccgtctgagcctaatgagtcccagctgcattaggttaagagactcttccagagccagcgccaggtcttgaatggcacctctccctaggatacacagcctgcaggtccccaggacctggatgacacccgcctcactgtggcagtgtattgcctgttaattgctgctaattctaattctgatgatgactcctactccattgtttaccccaaagcatcagctaggctggagtgatttgttacaaatgagcaaaagatgagtccttgcttccctcagaaataaaaggagctcagctgcagcgttgcattgggcttcttggcctcccaactcttcccactcccagaatccagaagtaagctctgcatgttccccttcctgggaggaaaccaattgtcagaaggatgtatgatgaccccctcccctcccatccttcacctcctaagcagtcctggcttttcctcatcactcccctctacagtgcctggtagacaagtgctacattgaagaacacaaacctcttgttaagacttgtcctgtagcttgatattacagatgtgctattagtgcaataaggtgaaggctgtctgcccagagaaataagtaatttatataagaaaataaatttcataaataaattgcc

SEQ ID NO: 277337 - DNA, 3056 bp, Homo sapiens
  misc_feature (3048)..(3048): n is a, c, g, or t
gtacggttgagccgatttccggggccactggtgtgacgtgtcccgcgcttggcgcagcaggaagcggcggcgaacgcggcctgaattcccggcgccggccccagctcctctgccgctgccgccatgctcgacttcttcaccattttctccaagggcgggcttgtgctctggtgcttccagggcgttagcgactcatgcaccggacccgttaacgcgttgattcgttccgtgctgctgcaggaacggggaggtaacaactccttcacccatgaggcactcacactcaagtataaactggacaaccagtttgagctggtgtttgtggttggttttcagaagatcctgacactgacatatgtagacaaattgatagatgacgtgcatcggctgtttcgggacaagtaccgcacagagatccaacagcaaagtgctttaagtttattaaatggcacttttgatttccaaaatgacttcctgcggctccttcgtgaagcagaggagagcagtaagatccgtgctcccactaccatgaagaaatttgaagattctgaaaaggccaagaaacctgtgaggtccatgattgagacacggggggaaaagcccaaggaaaaagcaaagaatagcaaaaaaaagggggccaagaaggaaggttctgatggtcctttggctaccagcaaaccagtccctgcagaaaagtcaggtcttccagtgggtcctgagaacggagtagaactttccaaagaggagctgatccgcaggaagcgcgaggagttcattcagaagcatgggaggggtatggagaagtccaacaagtccacgaagtcagatgctccaaaggagaagggcaaaaaagcaccccgggtgtgggaactgggtggctgtgctaacaaagaagtgttggattacagtactcccaccaccaatggaacccctgaggctgccttgtctgaggacatcaacctgattcgagggactgggtctggggggcagcttcaggatctggactgcagcagctctgatgacgaaggggctgctcaaaactctaccaaacctagtgcgaccaagggaacactgggtggcatgtttggtatgctgaagggccttgtgggttcaaagagcttgagtcgtgaagacatggaatctgtgctggacaagatgcgtgatcatctcattgctaagaacgtggctgcagacattgccgtccagctctgtgaatctgttgccaacaagttggaagggaaggtgatggggacgttcagcacggtgacttccacagtaaagcaagccctacaggagtccctggtgcagattctgcagccacagcgtcgtgtagacatgctccgggacatcatggatgcccagcgtcgccagcgcccttatgtcgtcaccttctgcggcgttaatggagtggggaaatctactaatcttgccaagatttccttctggttgttagagaatggcttcagtgtcctcattgctgcctgtgatacatttcgtgctggggccgtggagcagctgcgtacacacacccggcgtttgagtgccctacaccctccagagaagcatggtggccgcaccatggtgcagttgtttgaaaagggctatggcaaggatgctgctggcattgccatggaagccattgcttttgcacgtaaccaaggctttgacgtggtgctggtggacacggcaggccgcatgcaagacaatgcccctctgatgactgccctggccaaactcattactgtcaatacacctgatttggtgctgtttgtaggagaagccttagtaggcaatgaagccgtggaccagctggtcaagttcaacagagccttggctgaccattctatggctcagacacctcggctcattgatggcattgttcttaccaaatttgataccattgatgacaaggtgggagctgctatttctatgacgtacatcacaagcaaacccatcgtctttgtgggcaccggccagacctactgtgacctacgcagcctcaatgccaaggctgtggtggctgccctcatgaaggcttaacgtggctcttgcccaataccaaatcgccgctttccccacaagcccttcttcctgtatcaagaatgtgctttagagtatgtgagcaacctgtcttcagtgtagtacaaaggcagagtgagggggcttgtggctccttccaaccccactccccgttcagcacagccgccatctgcaaggaaggcctaatcatgttacaatcactgcccactgaccctctcccagcgggcctcccccttcctactcaggcacccccttcactctgcctacagactcagtcttattacagctttgaccaatggttggaacccaacaccagagctttgctaataattagtgtggtcaagagccgtctgagcctaatgagtcccagctgcattaggttaagagactcttccagagccagcgccaggtcttgaatggcacctctccctaggatacacagcctgcaggtccccaggacctggatgacacccgcctcactgtggcagtgtattgcctgttaattgctgctaattctaattctgatgatgactcctactccattgtttaccccaaagcatcagctaggctggagtgatttgttacaaatgagcaaaagatgagtccttgcttccctcagaaataaaaggagctcagctgcagcgttgcattgggcttcttggcctcccaactcttcccactcccagaatccagaagtaagctctgcatgttccccttcctgggaggaaaccaattgtcagaaggatgtatgatgaccccctcccctcccatccttcacctcctaagcagtcctggcttttcctcatcactcccctctacagtgcctggtagacaagtgctacattgaagaacacaaacctcttgttaagacttgtcctgtagcttgatattacagatgtgctattagtgcaataaggtgaaggctgtctgcccagagaaataagtcgagagggctggggtgctccttcgtctctcagctctcactagcaccatcccctcacagagcanagaatggg

SEQ ID NO: 277338 - DNA, 1423 bp, Homo sapiens
cttccggagcccagctccatgctaacctgcccacattgcccacgcgtccacgtaaccaaggctttgacgtggtgctggtggacacggcaggccgcatgcaagacaatgcccctctgatgactgccctggccaaactcattactgtcaatacacctgatttggtgctgtttgtaggagaagccttagtaggcaatgaagccgtggaccagctggtcaagttcaacagagccttggctgaccattctatggctcagacacctcggctcattgatggcattgttcttaccaaatttgataccattgatgacaaggtgggagctgctatttctatgacgtacatcacaagcaaacccatcgtctttgtgggcaccggccagacctactgtgacctacgcagcctcaatgccaaggctgtggtggctgccctcatgaaggcttaacgtggctcttgcccaataccaaatcgccgctttccccacaagcccttcttcctgtatcaagaatgtgctttagagtatgtgagcaacctgtcttcagtgtagtacaaaggcagagtgagggggcttgtggctccttccaaccccactccccgttcagcacagccgccatctgcaaggaaggcctaatcatgttacaatcactgcccactgaccctctcccagcgggcctcccccttcctactcaggcacccccttcactctgcctacagactcagtcttattacagctttgaccaatggttggaacccaacaccagagctttgctaataattagtgtggtcaagagccgtctgagcctaatgagtcccagctgcattaggttaagagactcttccagagccagcgccaggtcttgaatggcacctctccctaggatacacagcctgcaggtccccaggacctggatgacacccgcctcactgtggcagtgtattgcctgttaattgctgctaattctaattctgatgatgactcctactccattgtttaccccaaagcatcagctaggctggagtgatttgttacaaatgagcaaaagatgagtccttgcttccctcagaaataaaaggagctcagctgcagcgttgcattgggcttcttggcctcccaactcttcccactcccagaatccagaagtaagctctgcatgttccccttcctgggaggaaaccaattgtcagaaggatgtatgatgaccccctcccctcccatccttcacctcctaagcagtcctggcttttcctcatcactcccctctacagtgcctggtagacaagtgctacattgaagaacacaaacctcttgttaagacttgtcctgtagcttgatattacagatgtgctattagtgcaataaggtgaaggctgtctgcccagagaaataagtaatttatataagaaaataaatttcataaataaattgcc

SEQ ID NO: 277339 - DNA, 3016 bp, Homo sapiens
  misc_feature (3002)..(3002): n is a, c, g, or t
gtacggttgagccgatttccggggccactggtgtgacgtgtcccgcgcttggcgcagcaggaagcggcggcgaacgcggcctgaattcccggcgccggccccagctcctctgccgctgccgccatgctcgacttcttcaccattttctccaagggcgggcttgtgctctggtgcttccagggcgttagcgactcatgcaccggacccgttaacgcgttgattcgttccgtgctgctgcaggaacggggaggtaacaactccttcacccatgaggcactcacactcaagtataaactggacaaccagtttgagctggtgtttgtggttggttttcagaagatcctgacactgacatatgtagacaaattgatagatgacgtgcatcggctgtttcgggacaagtaccgcacagagatccaacagcaaagtgctttaagtttattaaatggcacttttgatttccaaaatgacttcctgcggctccttcgtgaagcagaggagagcagtaagatccgtgctcccactaccatgaagaaatttgaagattctgaaaaggccaagaaacctgtgaggtccatgattgagacacggggggaaaagcccaaggaaaaagcaaagaatagcaaaaaaaagggggccaagaaggaaggttctgatggtcctttggctaccagcaaaccagtccctgcagaaaagtcaggtcttccagtgggtcctgagaacggagtagaactttccaaagaggagctgatccgcaggaagcgcgaggagttcattcagaagcatgggaggggtatggagaagtccaacaagtccacgaagtcagatgctccaaaggagaagggcaaaaaagcaccccgggtgtgggaactgggtggctgtgctaacaaagaagtgttggattacagtactcccaccaccaatggaacccctgaggctgccttgtctgaggacatcaacctgattcgagggactgggtctggggggcagcttcaggatctggactgcagcagctctgatgacgaaggggctgctcaaaactctaccaaacctagtgcgaccaagggaacactgggtggcatgtttggtatgctgaagggccttgtgggttcaaagagcttgagtcgtgaagacatggaatctgtgctggacaagatgcgtgatcatctcattgctaagaacgtggctgcagacattgccgtccagctctgtgaatctgttgccaacaagttggaagggaaggtgatggggacgttcagcacggtgacttccacagtaaagcaagccctacaggagtccctggtgcagattctgcagccacagcgtcgtgtagacatgctccgggacatcatggatgcccagcgtcgccagcgcccttatgtcgtcaccttctgcggcgttaatggagtggggaaatctactaatcttgccaagatttccttctggttgttagagaatggcttcagtgtcctcattgctgcctgtgatacatttcgtgctggggccgtggagcagctgcgtacacacacccggcgtttgagtgccctacaccctccagagaagcatggtggccgcaccatggtgcagttgtttgaaaagggctatggcaaggatgctgctggcattgccatggaagccattgcttttgcacgtaaccaaggctttgacgtggtgctggtggacacggcaggccgcatgcaagacaatgcccctctgatgactgccctggccaaactcattactgtcaatacacctgatttggtgctgtttgtaggagaagccttagtaggcaatgaagccgtggaccagctggtcaagttcaacagagccttggctgaccattctatggctcagacacctcggctcattgatggcattgttcttaccaaatttgataccattgatgacaaggtgggagctgctatttctatgacgtacatcacaagcaaacccatcgtctttgtgggcaccggccagacctactgtgacctacgcagcctcaatgccaaggctgtggtggctgccctcatgaaggcttaacgtggctcttgcccaataccaaatcgccgctttccccacaagcccttcttcctgtatcaagaatgtgctttagagtatgtgagcaacctgtcttcagtgtagtacaaaggcagagtgagggggcttgtggctccttccaaccccactccccgttcagcacagccgccatctgcaaggaaggcctaatcatgttacaatcactgcccactgaccctctcccagcgggcctcccccttcctactcaggcacccccttcactctgcctacagactcagtcttattacagctttgaccaatggttggaacccaacaccagagctttgctaataattagtgtggtcaagagccgtctgagcctaatgagtcccagctgcattaggttaagagactcttccagagccagcgccaggtcttgaatggcacctctccctaggatacacagcctgcaggtccccaggacctggatgacacccgcctcactgtggcagtgtattgcctgttaattgctgctaattctaattctgatgatgactcctactccattgtttaccccaaagcatcagctaggctggagtgatttgttacaaatgagcaaaagatgagtccttgcttccctcagaaataaaaggagctcagctgcagcgttgcattgggcttcttggcctcccaactcttcccactcccagaatccagaagtaagctctgcatgttccccttcctgggaggaaaccaattgtcagaaggatgtatgatgaccccctcccctcccatccttcacctcctaagcagtcctggcttttcctcatcactcccctctacagtgcctggtagacaagtgctacattgaagaacacaaacctcttgttaagacttgtcctgtagcttgatattacagatgtgcaaaacacaacatcagatgaagaaaacacaacagcgaactaagaaaacacaacgcaaatctnataaaacacataca

SEQ ID NO: 277340 - DNA, 1346 bp, Homo sapiens
tacggggaggcgggggcccggccgaggggctgccgaccaagcggcggcgcggggacacggcggccgcagcagacaagcccccgagacgcccggcaaccacgcaacccgagggcggcgggcagccagaggcagccgccgggaccgcgggcagcacagagccggcgaccaccaggccagacacctcggctcattgatggcattgttcttaccaaatttgataccattgatgacaaggtgggagctgctatttctatgacgtacatcacaagcaaacccatcgtctttgtgggcaccggccagacctactgtgacctacgcagcctcaatgccaaggctgtggtggctgccctcatgaaggcttaacgtggctcttgcccaataccaaatcgccgctttccccacaagcccttcttcctgtatcaagaatgtgctttagagtatgtgagcaacctgtcttcagtgtagtacaaaggcagagtgagggggcttgtggctccttccaaccccactccccgttcagcacagccgccatctgcaaggaaggcctaatcatgttacaatcactgcccactgaccctctcccagcgggcctcccccttcctactcaggcacccccttcactctgcctacagactcagtcttattacagctttgaccaatggttggaacccaacaccagagctttgctaataattagtgtggtcaagagccgtctgagcctaatgagtcccagctgcattaggttaagagactcttccagagccagcgccaggtcttgaatggcacctctccctaggatacacagcctgcaggtccccaggacctggatgacacccgcctcactgtggcagtgtattgcctgttaattgctgctaattctaattctgatgatgactcctactccattgtttaccccaaagcatcagctaggctggagtgatttgttacaaatgagcaaaagatgagtccttgcttccctcagaaataaaaggagctcagctgcagcgttgcattgggcttcttggcctcccaactcttcccactcccagaatccagaagtaagctctgcatgttccccttcctgggaggaaaccaattgtcagaaggatgtatgatgaccccctcccctcccatccttcacctcctaagcagtcctggcttttcctcatcactcccctctacagtgcctggtagacaagtgctacattgaagaacacaaacctcttgttaagacttgtcctgtagcttgatattacagatgtgctattagtgcaataaggtgaaggctgtctgcccagagaaataagtaatttatataagaaaataaatttcataaataaattgcc

SEQ ID NO: 277341 - DNA, 3081 bp, Homo sapiens
  misc_feature (3080)..(3080): n is a, c, g, or t
gtacggttgagccgatttccggggccactggtgtgacgtgtcccgcgcttggcgcagcaggaagcggcggcgaacgcggcctgaattcccggcgccggccccagctcctctgccgctgccgccatgctcgacttcttcaccattttctccaagggcgggcttgtgctctggtgcttccagggcgttagcgactcatgcaccggacccgttaacgcgttgattcgttccgtgctgctgcaggaacggggaggtaacaactccttcacccatgaggcactcacactcaagtataaactggacaaccagtttgagctggtgtttgtggttggttttcagaagatcctgacactgacatatgtagacaaattgatagatgacgtgcatcggctgtttcgggacaagtaccgcacagagatccaacagcaaagtgctttaagtttattaaatggcacttttgatttccaaaatgacttcctgcggctccttcgtgaagcagaggagagcagtaagatccgtgctcccactaccatgaagaaatttgaagattctgaaaaggccaagaaacctgtgaggtccatgattgagacacggggggaaaagcccaaggaaaaagcaaagaatagcaaaaaaaagggggccaagaaggaaggttctgatggtcctttggctaccagcaaaccagtccctgcagaaaagtcaggtcttccagtgggtcctgagaacggagtagaactttccaaagaggagctgatccgcaggaagcgcgaggagttcattcagaagcatgggaggggtatggagaagtccaacaagtccacgaagtcagatgctccaaaggagaagggcaaaaaagcaccccgggtgtgggaactgggtggctgtgctaacaaagaagtgttggattacagtactcccaccaccaatggaacccctgaggctgccttgtctgaggacatcaacctgattcgagggactgggtctggggggcagcttcaggatctggactgcagcagctctgatgacgaaggggctgctcaaaactctaccaaacctagtgcgaccaagggaacactgggtggcatgtttggtatgctgaagggccttgtgggttcaaagagcttgagtcgtgaagacatggaatctgtgctggacaagatgcgtgatcatctcattgctaagaacgtggctgcagacattgccgtccagctctgtgaatctgttgccaacaagttggaagggaaggtgatggggacgttcagcacggtgacttccacagtaaagcaagccctacaggagtccctggtgcagattctgcagccacagcgtcgtgtagacatgctccgggacatcatggatgcccagcgtcgccagcgcccttatgtcgtcaccttctgcggcgttaatggagtggggaaatctactaatcttgccaagatttccttctggttgttagagaatggcttcagtgtcctcattgctgcctgtgatacatttcgtgctggggccgtggagcagctgcgtacacacacccggcgtttgagtgccctacaccctccagagaagcatggtggccgcaccatggtgcagttgtttgaaaagggctatggcaaggatgctgctggcattgccatggaagccattgcttttgcacgtaaccaaggctttgacgtggtgctggtggacacggcaggccgcatgcaagacaatgcccctctgatgactgccctggccaaactcattactgtcaatacacctgatttggtgctgtttgtaggagaagccttagtaggcaatgaagccgtggaccagctggtcaagttcaacagagccttggctgaccattctatggctcagacacctcggctcattgatggcattgttcttaccaaatttgataccattgatgacaaggtgggagctgctatttctatgacgtacatcacaagcaaacccatcgtctttgtgggcaccggccagacctactgtgacctacgcagcctcaatgccaaggctgtggtggctgccctcatgaaggcttaacgtggctcttgcccaataccaaatcgccgctttccccacaagcccttcttcctgtatcaagaatgtgctttagagtatgtgagcaacctgtcttcagtgtagtacaaaggcagagtgagggggcttgtggctccttccaaccccactccccgttcagcacagccgccatctgcaaggaaggcctaatcatgttacaatcactgcccactgaccctctcccagcgggcctcccccttcctactcaggcacccccttcactctgcctacagactcagtcttattacagctttgaccaatggttggaacccaacaccagagctttgctaataattagtgtggtcaagagccgtctgagcctaatgagtcccagctgcattaggttaagagactcttccagagccagcgccaggtcttgaatggcacctctccctaggatacacagcctgcaggtccccaggacctggatgacacccgcctcactgtggcagtgtattgcctgttaattgctgctaattctaattctgatgatgactcctactccattgtttaccccaaagcatcagctaggctggagtgatttgttacaaatgagcaaaagatgagtccttgcttccctcagaaataaaaggagctcagctgcagcgttgcattgggcttcttggcctcccaactcttcccactcccagaatccagaagtaagctctgcatgttccccttcctgggaggaaaccaattgtcagaaggatgtatgatgaccccctcccctcccatccttcacctcctaagcagtcctggcttttcctcatcactcccctctacagtgcctggtagacaagtgctacattgcaacacggtctctcatgagagacccagcctctacagaaaaatttaaaaattagccaggcatggtggcatacatctgtagtcccagctacttgggagcctaaggtgggaggatcgcttgagcccaggacgttgaggctgcagtgagccatgttcatgccacttcactccagcgtgatacatgcaacacgtctctna

SEQ ID NO: 277342 - DNA, 1234 bp, Homo sapiens
tgctacatgaacacagacacatgcaggtgctttgcagaaacaaagtcaggcttcttcaagtcacaaagggaagggcaggaacaactcttgctctcagtcccacacaaggcagctgtctcacggtgggagctgctatttctatgacgtacatcacaagcaaacccatcgtctttgtgggcaccggccagacctactgtgacctacgcagcctcaatgccaaggctgtggtggctgccctcatgaaggcttaacgtggctcttgcccaataccaaatcgccgctttccccacaagcccttcttcctgtatcaagaatgtgctttagagtatgtgagcaacctgtcttcagtgtagtacaaaggcagagtgagggggcttgtggctccttccaaccccactccccgttcagcacagccgccatctgcaaggaaggcctaatcatgttacaatcactgcccactgaccctctcccagcgggcctcccccttcctactcaggcacccccttcactctgcctacagactcagtcttattacagctttgaccaatggttggaacccaacaccagagctttgctaataattagtgtggtcaagagccgtctgagcctaatgagtcccagctgcattaggttaagagactcttccagagccagcgccaggtcttgaatggcacctctccctaggatacacagcctgcaggtccccaggacctggatgacacccgcctcactgtggcagtgtattgcctgttaattgctgctaattctaattctgatgatgactcctactccattgtttaccccaaagcatcagctaggctggagtgatttgttacaaatgagcaaaagatgagtccttgcttccctcagaaataaaaggagctcagctgcagcgttgcattgggcttcttggcctcccaactcttcccactcccagaatccagaagtaagctctgcatgttccccttcctgggaggaaaccaattgtcagaaggatgtatgatgaccccctcccctcccatccttcacctcctaagcagtcctggcttttcctcatcactcccctctacagtgcctggtagacaagtgctacattgaagaacacaaacctcttgttaagacttgtcctgtagcttgatattacagatgtgctattagtgcaataaggtgaaggctgtctgcccagagaaataagtaatttatataagaaaataaatttcataaataaattgcc

SEQ ID NO: 277343 - DNA, 3602 bp, Homo sapiens
gtacggttgagccgatttccggggccactggtgtgacgtgtcccgcgcttggcgcagcaggaagcggcggcgaacgcggcctgaattcccggcgccggccccagctcctctgccgctgccgccatgctcgacttcttcaccattttctccaagggcgggcttgtgctctggtgcttccagggcgttagcgactcatgcaccggacccgttaacgcgttgattcgttccgtgctgctgcaggaacggggaggtaacaactccttcacccatgaggcactcacactcaagtataaactggacaaccagtttgagctggtgtttgtggttggttttcagaagatcctgacactgacatatgtagacaaattgatagatgacgtgcatcggctgtttcgggacaagtaccgcacagagatccaacagcaaagtgctttaagtttattaaatggcacttttgatttccaaaatgacttcctgcggctccttcgtgaagcagaggagagcagtaagatccgtgctcccactaccatgaagaaatttgaagattctgaaaaggccaagaaacctgtgaggtccatgattgagacacggggggaaaagcccaaggaaaaagcaaagaatagcaaaaaaaagggggccaagaaggaaggttctgatggtcctttggctaccagcaaaccagtccctgcagaaaagtcaggtcttccagtgggtcctgagaacggagtagaactttccaaagaggagctgatccgcaggaagcgcgaggagttcattcagaagcatgggaggggtatggagaagtccaacaagtccacgaagtcagatgctccaaaggagaagggcaaaaaagcaccccgggtgtgggaactgggtggctgtgctaacaaagaagtgttggattacagtactcccaccaccaatggaacccctgaggctgccttgtctgaggacatcaacctgattcgagggactgggtctggggggcagcttcaggatctggactgcagcagctctgatgacgaaggggctgctcaaaactctaccaaacctagtgcgaccaagggaacactgggtggcatgtttggtatgctgaagggccttgtgggttcaaagagcttgagtcgtgaagacatggaatctgtgctggacaagatgcgtgatcatctcattgctaagaacgtggctgcagacattgccgtccagctctgtgaatctgttgccaacaagttggaagggaaggtgatggggacgttcagcacggtgacttccacagtaaagcaagccctacaggagtccctggtgcagattctgcagccacagcgtcgtgtagacatgctccgggacatcatggatgcccagcgtcgccagcgcccttatgtcgtcaccttctgcggcgttaatggagtggggaaatctactaatcttgccaagatttccttctggttgttagagaatggcttcagtgtcctcattgctgcctgtgatacatttcgtgctggggccgtggagcagctgcgtacacacacccggcgtttgagtgccctacaccctccagagaagcatggtggccgcaccatggtgcagttgtttgaaaagggctatggcaaggatgctgctggcattgccatggaagccattgcttttgcacgtaaccaaggctttgacgtggtgctggtggacacggcaggccgcatgcaagacaatgcccctctgatgactgccctggccaaactcattactgtcaatacacctgatttggtgctgtttgtaggagaagccttagtaggcaatgaagccgtggaccagctggtcaagttcaacagagccttggctgaccattctatggctcagacacctcggctcattgatggcattgttcttaccaaatttgataccattgatgacaaggtgggagctgctatttctatgacgtacatcacaagcaaacccatcgtctttgtgggcaccggccagacctactgtgacctacgcagcctcaatgccaaggctgtggtggctgccctcatgaaggcttaacgtggctcttgcccaataccaaatcgccgctttccccacaagcccttcttcctgtatcaagaatgtgctttagagtatgtgagcaacctgtcttcagtgtagtacaaaggcagagtgagggggcttgtggctccttccaaccccactccccgttcagcacagccgccatctgcaaggaaggcctaatcatgttacaatcactgcccactgaccctctcccagcgggcctcccccttcctactcaggcacccccttcactctgcctacagactcagtcttattacagctttgaccaatggttggaacccaacaccagagctttgctaataattagtgtggtcaagagccgtctgagcctaatgagtcccagctgcattaggttaagagactcttccagagccagcgccaggtcttgaatggcacctctccctaggatacacagcctgcaggtccccaggacctggatgacacccgcctcactgtggcagtgtattgcctgttaattgctgctaattctaattctgatgatgactcctactccattgtttaccccaaagcatcagctaggctggagtgatttgttacaaatgagcaaaagatgagtccttgcttccctcagaaataaaaggagctcagctgcagcgttgcattgggcttcttggcctcccaactcttcccatccttcacctcctaagcagtcctggcttttcctcatcactcccctctacagtgcctggtagacaagtgctacattgaagaacacaaacctcttgttaagacttgtcctgtagcttgatattacagatgtgctattagtgcaataaggtgaaggctgtctgcccagagaaataagtaatttatataagaaaataaatttcataaataaattgccttttaggtcttggagttcttttatacaggattcaaaactaaaattccacaacacacttaactgtagttctaggacatatgtatggtcaggacaacagagcagaagttgataatgctccgaggaatcaggtaagtaaacggttgtcctgagaatgagatcactccaccccaaggagaaagatcggaacctttaaactttgggttattaaaattaagcttattagtaccttgatgcaagttagagtttcttacaatgactctaaaagtagagccagggtcctggcaagtaaatgaacaagcttttaatacagcttagttatgtaaaatactgtacactgtaaaagatctagaaaactagagcttcaagtcatgttttaaaaaagccattaagcttaattgaaaaaccaagtatagagtacaaaactgcaacaagagccacagtgattccatggcatccagaccccgagtccttcatgcagagctgcagccggtcagtggaagtatcacattggtgtgctgtgtggacacaagcatgtctagcctggggagtgggttgggagctgcatttgggtcctgcttgtcgcttttattcttgaacttgaacaggcggcagaatatcaagaaccaggtggtatgaaggattacgctgcaacattcccccctcttctacc

SEQ ID NO: 277344 - DNA, 2932 bp, Homo sapiens
gtacggttgagccgatttccggggccactggtgtgacgtgtcccgcgcttggcgcagcaggaagcggcggcgaacgcggcctgaattcccggcgccggccccagctcctctgccgctgccgccatgctcgacttcttcaccattttctccaagggcgggcttgtgctctggtgcttccagggcgttagcgactcatgcaccggacccgttaacgcgttgattcgttccgtgctgctgcaggaacggggaggtaacaactccttcacccatgaggcactcacactcaagtataaactggacaaccagtttgagctggtgtttgtggttggttttcagaagatcctgacactgacatatgtagacaaattgatagatgacgtgcatcggctgtttcgggacaagtaccgcacagagatccaacagcaaagtgctttaagtttattaaatggcacttttgatttccaaaatgacttcctgcggctccttcgtgaagcagaggagagcagtaagatccgtgctcccactaccatgaagaaatttgaagattctgaaaaggccaagaaacctgtgaggtccatgattgagacacggggggaaaagcccaaggaaaaagcaaagaatagcaaaaaaaagggggccaagaaggaaggttctgatggtcctttggctaccagcaaaccagtccctgcagaaaagtcaggtcttccagtgggtcctgagaacggagtagaactttccaaagaggagctgatccgcaggaagcgcgaggagttcattcagaagcatgggaggggtatggagaagtccaacaagtccacgaagtcagatgctccaaaggagaagggcaaaaaagcaccccgggtgtgggaactgggtggctgtgctaacaaagaagtgttggattacagtactcccaccaccaatggaacccctgaggctgccttgtctgaggacatcaacctgattcgagggactgggtctggggggcagcttcaggatctggactgcagcagctctgatgacgaaggggctgctcaaaactctaccaaacctagtgcgaccaagggaacactgggtggcatgtttggtatgctgaagggccttgtgggttcaaagagcttgagtcgtgaagacatggaatctgtgctggacaagatgcgtgatcatctcattgctaagaacgtggctgcagacattgccgtccagctctgtgaatctgttgccaacaagttggaagggaaggtgatggggacgttcagcacggtgacttccacagtaaagcaagccctacaggagtccctggtgcagattctgcagccacagcgtcgtgtagacatgctccgggacatcatggatgcccagcgtcgccagcgcccttatgtcgtcaccttctgcggcgttaatggagtggggaaatctactaatcttgccaagatttccttctggttgttagagaatggcttcagtgtcctcattgctgcctgtgatacatttcgtgctggggccgtggagcagctgcgtacacacacccggcgtttgagtgccctacaccctccagagaagcatggtggccgcaccatggtgcagttgtttgaaaagggctatggcaaggatgctgctggcattgccatggaagccattgcttttgcacgtaaccaaggctttgacgtggtgctggtggacacggcaggccgcatgcaagacaatgcccctctgatgactgccctggccaaactcattactgtcaatacacctgatttggtgctgtttgtaggagaagccttagtaggcaatgaagccgtggaccagctggtcaagttcaacagagccttggctgaccattctatggctcagacacctcggctcattgatggcattgttcttaccaaatttgataccattgatgacaaggtgggagctgctatttctatgacgtacatcacaagcaaacccatcgtctttgtgggcaccggccagacctactgtgacctacgcagcctcaatgccaaggctgtggtggctgccctcatgaaggcttaacgtggctcttgcccaataccaaatcgccgctttccccacaagcccttcttcctgtatcaagaatgtgctttagagtatgtgagcaacctgtcttcagtgtagtacaaaggcagagtgagggggcttgtggctccttccaaccccactccccgttcagcacagccgccatctgcaaggaaggcctaatcatgttacaatcactgcccactgaccctctcccagcgggcctcccccttcctactcaggcacccccttcactctgcctacagactcagtcttattacagctttgaccaatggttggaacccaacaccagagctttgctaataattagtgtggtcaagagccgtctgagcctaatgagtcccagctgcattaggttaagagactcttccagagccagcgccaggtcttgaatggcacctctccctaggatacacagcctgcaggtccccaggacctggatgacacccgcctcactgtggcagtgtattgcctgttaattgctgctaattctaattctgatgatgactcctactccattgtttaccccaaagcatcagctaggctggagtgatttgttacaaatgagcaaaagatgagtccttgcttccctcagaaataaaaggagctcagctgcagcgttgcattgggcttcttggcctcccaactcttcccatccttcacctcctaagcagtcctggcttttcctcatcactcccctctacagtgcctggtagacaagtgctacattgaagaacacaaacctcttgttaagacttgtcctgtagcttgatattacagatgtgctattagtgcaataaggtgaaggctgtctgcccagagaaataagtaatttatataagaaaataaatttcataaataaattgcc

SEQ ID NO: 277345 - DNA, 2206 bp, Homo sapiens
gtacggttgagccgatttccggggccactggtgtgacgtgtcccgcgcttggcgcagcaggaagcggcggcgaacgcggcctgaattcccggcgccggccccagctcctctgccgctgccgccatgctcgacttcttcaccattttctccaagggcgggcttgtgctctggtgcttccagggcgttagcgactcatgcaccggacccgttaacgcgttgattcgttccgtgctgctgcaggaacggggaggtaacaactccttcacccatgaggcactcacactcaagtataaactggacaaccagtttgagctggtgtttgtggttggttttcagaagatcctgacactgacatatgtagacaaattgatagatgacgtgcatcggctgtttcgggacaagtaccgcacagagatccaacagcaaagtgctttaagtttattaaatggcacttttgatttccaaaatgacttcctgcggctccttcgtgaagcagaggagagcagtaagatccgtgctcccactaccatgaagaaatttgaagattctgaaaaggccaagaaacctgtgaggtccatgattgagacacggggggaaaagcccaaggaaaaagcaaagaatagcaaaaaaaagggggccaagaaggaaggttctgatggtcctttggctaccagcaaaccagtccctgcagaaaagtcaggtcttccagtgggtcctgagaacggagtagaactttccaaagaggagctgatccgcaggaagcgcgaggagttcattcagaagcatgggaggggtatggagaagtccaacaagtccacgaagtcagatgctccaaaggagaagggcaaaaaagcaccccgggtgtgggaactgggtggctgtgctaacaaagaagtgttggattacagtactcccaccaccaatggaacccctgaggctgccttgtctgaggacatcaacctgattcgagggactgggtctggggggcagcttcaggatctggactgcagcagctctgatgacgaaggggctgctcaaaactctaccaaacctagtgcgaccaagggaacactgggtggcatgtttggtatgctgaagggccttgtgggttcaaagagcttgagtcgtgaagacatggaatctgtgctggacaagatgcgtgatcatctcattgctaagaacgtggctgcagacattgccgtccagctctgtgaatctgttgccaacaagttggaagggaaggtgatggggacgttcagcacggtgacttccacagtaaagcaagccctacaggagtccctggtgcagattctgcagccacagcgtcgtgtagacatgctccgggacatcatggatgcccagcgtcgccagcgcccttatgtcgtcaccttctgcggcgttaatggagtggggaaatctactaatcttgccaagatttccttctggttgttagagaatggcttcagtgtcctcattgctgcctgtgatacatttcgtgctggggccgtggagcagctgcgtacacacacccggcgtttgagtgccctacaccctccagagaagcatggtggccgcaccatggtgcagttgtttgaaaagggctatggcaaggatgctgctggcattgccatggaagccattgcttttgcacgtaaccaaggctttgacgtggtgctggtggacacggcaggccgcatgcaagacaatgcccctctgatgactgccctggccaaactcattactgtcaatacacctgatttggtgctgtttgtaggagaagccttagtaggcaatgaagccgtggaccagctggtcaagttcaacagagccttggctgaccattctatggctcagacacctcggctcattgatggcattgttcttaccaaatttgataccattgatgacaaggtgggagctgctatttctatgacgtacatcacaagcaaacccatcgtctttgtgggcaccggccagacctactgtgacctacgcagcctcaatgccaaggctgtggtggctgccctcatgaaggcttaacgtggctcttgcccaataccaaatcgccgctttccccacaagcccttcttcctgtatcaagaatgtgctttagagtatgtgagcaacctgtcttcagtgtagtacaaaggcagagtggggttggaaggagccacaagccccctcactctgcctttgtactacactg

SEQ ID NO: 277346 - DNA, 1899 bp, Homo sapiens
gtacggttgagccgatttccggggccactggtgtgacgtgtcccgcgcttggcgcagcaggaagcggcggcgaacgcggcctgaattcccggcgccggccccagctcctctgccgctgccgccatgctcgacttcttcaccattttctccaagggcgggcttgtgctctggtgcttccagggcgttagcgactcatgcaccggacccgttaacgcgttgattcgttccgtgctgctgcaggaacggggaggtaacaactccttcacccatgaggcactcacactcaagtataaactggacaaccagtttgagctggtgtttgtggttggttttcagaagatcctgacactgacatatgtagacaaattgatagatgacgtgcatcggctgtttcgggacaagtaccgcacagagatccaacagcaaagtgctttaagtttattaaatggcacttttgatttccaaaatgacttcctgcggctccttcgtgaagcagaggagagcagtaagatccgtgctcccactaccatgaagaaatttgaagattctgaaaaggccaagaaacctgtgaggtccatgattgagacacggggggaaaagcccaaggaaaaagcaaagaatagcaaaaaaaagggggccaagaaggaaggttctgatggtcctttggctaccagcaaaccagtccctgcagaaaagtcaggtcttccagtgggtcctgagaacggagtagaactttccaaagaggagctgatccgcaggaagcgcgaggagttcattcagaagcatgggaggggtatggagaagtccaacaagtccacgaagtcagatgctccaaaggagaagggcaaaaaagcaccccgggtgtgggaactgggtggctgtgctaacaaagaagtgttggattacagtactcccaccaccaatggaacccctgaggctgccttgtctgaggacatcaacctgattcgagggactgggtctggggggcagcttcaggatctggactgcagcagctctgatgacgaaggggctgctcaaaactctaccaaacctagtgcgaccaagggaacactgggtggcatgtttggtatgctgaagggccttgtgggttcaaagagcttgagtcgtgaagacatggaatctgtgctggacaagatgcgtgatcatctcattgctaagaacgtggctgcagacattgccgtccagctctgtgaatctgttgccaacaagttggaagggaaggtgatggggacgttcagcacggtgacttccacagtaaagcaagccctacaggagtccctggtgcagattctgcagccacagcgtcgtgtagacatgctccgggacatcatggatgcccagcgtcgccagcgcccttatgtcgtcaccttctgcggcgttaatggagtggggaaatctactaatcttgccaagatttccttctggttgttagagaatggcttcagtgtcctcattgctgcctgtgatacatttcgtgctggggccgtggagcagctgcgtacacacacccggcgtttgagtgccctacaccctccagagaagcatggtggccgcaccatggtgcagttgtttgaaaagggctatggcaaggatgctgctggcattgccatggaagccattgcttttgcacgtaaccaaggctttgacgtggtgctggtggacacggcaggccgcatgcaagacaatgcccctctgatgactgccctggccaaactcattactgtcaatacacctgatttggtgctgtttgtaggagaagccttagtaggcaatgaagccgtggaccagctgcatcaatggtatcaaatttggtaagaacaatgccatcaatgagccgaggtgtctgagccatagaatggtcagccaagctctgttgaa

SEQ ID NO: 277347 - DNA, 1161 bp, Homo sapiens
gtacggttgagccgatttccggggccactggtgtgacgtgtcccgcgcttggcgcagcaggaagcggcggcgaacgcggcctgaattcccggcgccggccccagctcctctgccgctgccgccatgctcgacttcttcaccattttctccaagggcgggcttgtgctctggtgcttccagggcgttagcgactcatgcaccggacccgttaacgcgttgattcgttccgtgctgctgcaggaacggggaggtaacaactccttcacccatgaggcactcacactcaagtataaactggacaaccagtttgagctggtgtttgtggttggttttcagaagatcctgacactgacatatgtagacaaattgatagatgacgtgcatcggctgtttcgggacaagtaccgcacagagatccaacagcaaagtgctttaagtttattaaatggcacttttgatttccaaaatgacttcctgcggctccttcgtgaagcagaggagagcagtaagatccgtgctcccactaccatgaagaaatttgaagattctgaaaaggccaagaaacctgtgaggtccatgattgagacacggggggaaaagcccaaggaaaaagcaaagaatagcaaaaaaaagggggccaagaaggaaggttctgatggtcctttggctaccagcaaaccagtccctgcagaaaagtcaggtcttccagtgggtcctgagaacggagtagaactttccaaagaggagctgatccgcaggaagcgcgaggagttcattcagaagcatgggaggggtatggagaagtccaacaagtccacgaagtcagatgctccaaaggagaagggcaaaaaagcaccccgggtgtgggaactgggtggctgtgctaacaaagaagtgttggattacagtactcccaccaccaatggaacccctgaggctgccttgtctgaggacatcaacctgattcgagggactgggtctggggggcagcttcaggatctggactgcagcagctctgatgacgaagaacacaaacctcttgttaagacttgtcctgtagcttgatattacagatgtgctattagtgcaataaggtgaaggctgtctgcccagagaaataagtaatttatataagaaaataaatttcataaataaattgcc

SEQ ID NO: 277348 - DNA, 1308 bp, Homo sapiens
gtacggttgagccgatttccggggccactggtgtgacgtgtcccgcgcttggcgcagcaggaagcggcggcgaacgcggcctgaattcccggcgccggccccagctcctctgccgctgccgccatgctcgacttcttcaccattttctccaagggcgggcttgtgctctggtgcttccagggcgttagcgactcatgcaccggacccgttaacgcgttgattcgttccgtgctgctgcaggaacggggaggtaacaactccttcacccatgaggcactcacactcaagtataaactggacaaccagtttgagctggtgtttgtggttggttttcagaagatcctgacactgacatatgtagacaaattgatagatgacgtgcatcggctgtttcgggacaagtaccgcacagagatccaacagcaaagtgctttaagtttattaaatggcacttttgacatcactcccctctacagtgcctggtagacaagtgctacattgaagaacacaaacctcttgttaagacttgtcctgtagcttgatattacagatgtgctattagtgcaataaggtgaaggctgtctgcccagagaaataagtaatttatataagaaaataaatttcataaataaattgccttttaggtcttggagttcttttatacaggattcaaaactaaaattccacaacacacttaactgtagttctaggacatatgtatggtcaggacaacagagcagaagttgataatgctccgaggaatcaggtaagtaaacggttgtcctgagaatgagatcactccaccccaaggagaaagatcggaacctttaaactttgggttattaaaattaagcttattagtaccttgatgcaagttagagtttcttacaatgactctaaaagtagagccagggtcctggcaagtaaatgaacaagcttttaatacagcttagttatgtaaaatactgtacactgtaaaagatctagaaaactagagcttcaagtcatgttttaaaaaagccattaagcttaattgaaaaaccaagtatagagtacaaaactgcaacaagagccacagtgattccatggcatccagaccccgagtccttcatgcagagctgcagccggtcagtggaagtatcacattggtgtgctgtgtggacacaagcatgtctagcctggggagtgggttgggagctgcatttgggtcctgcttgtcgcttttattcttgaacttgaacaggcggcagaatatcaagaaccaggtggtatgaaggattacgctgcaacattcccccctcttctacc

SEQ ID NO: 277349 - DNA, 638 bp, Homo sapiens
gtacggttgagccgatttccggggccactggtgtgacgtgtcccgcgcttggcgcagcaggaagcggcggcgaacgcggcctgaattcccggcgccggccccagctcctctgccgctgccgccatgctcgacttcttcaccattttctccaagggcgggcttgtgctctggtgcttccagggcgttagcgactcatgcaccggacccgttaacgcgttgattcgttccgtgctgctgcaggaacggggaggtaacaactccttcacccatgaggcactcacactcaagtataaactggacaaccagtttgagctggtgtttgtggttggttttcagaagatcctgacactgacatatgtagacaaattgatagatgacgtgcatcggctgtttcgggacaagtaccgcacagagatccaacagcaaagtgctttaagtttattaaatggcacttttgacatcactcccctctacagtgcctggtagacaagtgctacattgaagaacacaaacctcttgttaagacttgtcctgtagcttgatattacagatgtgctattagtgcaataaggtgaaggctgtctgcccagagaaataagtaatttatataagaaaataaatttcataaataaattgcc

SEQ ID NO: 277350 - DNA, 550 bp, Homo sapiens
gtacggttgagccgatttccggggccactggtgtgacgtgtcccgcgcttggcgcagcaggaagcggcggcgaacgcggcctgaattcccggcgccggccccagctcctctgccgctgccgccatgctcgacttcttcaccattttctccaagggcgggcttgtgctctggtgcttccagggcgttagcgactcatgcaccggacccgttaacgcgttgattcgttccgtgctgctgcaggaacggggaggtaacaactccttcacccatgaggcactcacactcaagtataaactggacaaccagtttgagctggtgtttgtggttggttttcagaagatcctgacactgacatatgtagacaaattgatagatgacgtgcatcggctgtttcgggacaagtaccgcacagagatccaacagcaaagtgctttaagtttattaaatggcacttttgatttccaaaatgacttcctgcggctccttcgtgaagcagaggagagcagtaagatccgtgctcctgttataatcgcgtagacaagtgaccggg

SEQ ID NO: 277351 - DNA, 698 bp, Homo sapiens
gtcctcctctttctcctgccagcttcccaagcgctcgctcgacccgaagtccactctgctgctctcgctctcctctgggggcagctctgcggactggattcccatagcctcagagaggcggggccttgagccagctgcgggtccttccaggatggggcaagggacccgaaatgcactcccaacaggcatggcctggagaccctcagcgaagagtcctctcttcccttaaccaggttaactctccttacctccaccagtgagcctgagaacattcacctcccttagctgcatggagcccttaagctcctctaactgggtcagcattcctcaatacgtggctcccagttctgagcctgcacctccagctgtggccggagcactgccaacaactgcaccaatatcacctctctggctctggattcctacctctattaatacagccaaaagcttcactcaatgttggctcatagggaattaagggtcaaaaagccccaggtcatttccaggtcagtagttgtcagagggcccctgtcctagctctacttatgcaattggtgttttcagccttaaaaaaatggtcgactattgaaatcaatcctttaaaattttatctgctagtttcagcctgccattggttggcttgcagagtatttatttggccttctgcctcccgtgaaatgggaacttcctttagaatg

SEQ ID NO: 277352 - DNA, 787 bp, Homo sapiens
gtcctcctctttctcctgccagcttcccaagcgctcgctcgacccgaagtccactctgctgctctcgctctcctctgggggcagctctgcggactggattcccatagcctcagagaggcggggccttgagccagctgcgggtccttccaggatggggcaagggacccgaaatgcactcccaacaggcatggcctggagaccctcagcgaagagtcctctcttcccttaaccaggttaactctccttacctccaccagtgagcctgagaacattcacctcccttagctgcatggagcccttaaggtgcagagacagtcatcctgttctcccacaccccttcctatcctggggactcctacccacctggtgccttctttctctattttcctcagctcctctaactgggtcagcattcctcaatacgtggctcccagttctgagcctgcacctccagctgtggccggagcactgccaacaactgcaccaatatcacctctctggctctggattcctacctctattaatacagccaaaagcttcactcaatgttggctcatagggaattaagggtcaaaaagccccaggtcatttccaggtcagtagttgtcagagggcccctgtcctagctctacttatgcaattggtgttttcagccttaaaaaaatggtcgactattgaaatcaatcctttaaaattttatctgctagtttcagcctgccattggttggcttgcagagtatttatttggccttctgcctcccgtgaaatgggaacttcctttagaatg

SEQ ID NO: 277353 - DNA, 436 bp, Homo sapiens
ccccggaacttcctagacgccgtacgtgccagatggtgttacctggagcttaaaaagctgcacgcaagtgttaaacttctgaacagacaaattaagagggccgaagtccaggaatgtatttcacatagccagccaaaaaaactttaaggctaaaaacaaagcaaaaccagttaccactaatcttaagaagataaacattatgaatgaggaaaaagttaacagagtaaataaagcttttgtaaatgtacaaaaggaacttgcacatttcgcaaaaagcatttcacttgaacctctgcagaaagaactgattcctcagcagcgtcatgaaagcaaaccagttaatgttgatgaagctacaagattaatggctctgttgtaatatactggtgatgcatctaattctccacaaagaccaataaattgaatgttttataca

SEQ ID NO: 277354 - DNA, 646 bp, Homo sapiens
  misc_feature (367)..(367): n is a, c, g, or t
aagctcggtacccattggtccgagagaacagacaaattaagagggccgaagtccaggaatgtatttcacatagccagccaaaaaaactttaaggctaaaaacaaagcaaaaccagttaccactaatcttaagaagataaacattatgaatgaggaaaaagttaacagagtaaataaagcttttgtaaatgtacaaaaggaacttgcacatttcgcaaaaagcatttcacttgaacctctgcagaaagaactgattcctcagcagcgtcatgaaagcaaaccagttaatgttgatgaagctacaagattaatggctctgttgtaatatactggtgatgcatctaatttctctcggaccaatgcattgntccgagagaaattagtcgcggtcaatgcaattctactctttggaatccgtttagctaaatgaatgtagtgctcttgttgaatggaaacaggtgataggaaatgcctaccatttgactcaatatggataatcaagagttgctcaggatgcttggatctgggggtagattctcattcatcattgcatggcacatgtcaattagaacataaaaggtcaaatgcaatgtcaaaatccaaagcctcaggagaaagtgagttcagttctccatagacagcatagt

SEQ ID NO: 277355 - DNA, 660 bp, Homo sapiens
ccccggaacttcctagacgccgtacgtgccagatggtgttacctggagcttaaaaagctgcacgcaagtgttaaacttctgaacagacaaattaagagggccgaagtccaggaatgtatttcacatagccagccaaaaaaactttaaggctaaaaacaaagcaaaaccagttaccactaatcttaagaagataaacattatgaatgaggaaaaagttaacagagtaaataaagcttttgtaaatgtacaaaaggaacttgcacatttcgcaaaaagcatttcacttgaacctctgcagaaagaactgattcctcagcagcgtcatgaaagcaaaccagttaatgttgatgaagctacaagattaatggctctgttgtaatatactggtgatgcatctaattctccacaaagaccaataaattgaatgttttatacaaaaaaaaaaaaaaaaaaaaaaaaaaaaaaaaaaaaaaaaaaaaaacaaaaaaaaagaaaaaatttgaaatctggttaggctggtgttagggttctttgtttttggggtttggcagagatgtgtttaagtgctgtgaccagaagcggggggagggggggtttggtggaaattttttgttatgatgtctgtgtggaaagcggctgtgcagacattcaattgttatt

SEQ ID NO: 277356 - DNA, 564 bp, Homo sapiens
ccccggaacttcctagacgccgtacgtgccagatggtgttacctggagcttaaaaagctgcacgcaagtgttaaacttctgtaggaggaatactgttggcgttcaaaagcattgctgtttcagttaagtagttccttaattacttacaatgtagtaaggctacattgaaggaagatataaatttcagtcaagactacgactgagcaaagaacagacaaattaagagggccgaagtccaggaatgtatttcacatagccagccaaaaaaactttaaggctaaaaacaaagcaaaaccagttaccactaatcttaagaagataaacattatgaatgaggaaaaagttaacagagtaaataaagcttttgtaaatgtacaaaaggaacttgcacatttcgcaaaaagcatttcacttgaacctctgcagaaagaactgattcctcagcagcgtcatgaaagcaaaccagttaatgttgatgaagctacaagattaatggctctgttgtaatatactggtgatgcatctaattctccacaaagaccaataaattgaatgttttataca

SEQ ID NO: 277357 - DNA, 477 bp, Homo sapiens
ccccggaacttcctagacgccgtacgtgccagatggtgttacctggagcttaaaaagctgcacgcaagtgttaaacttctgtaggaggaatactgttggcgttcaaaagcattgctgtttcaaacagacaaattaagagggccgaagtccaggaatgtatttcacatagccagccaaaaaaactttaaggctaaaaacaaagcaaaaccagttaccactaatcttaagaagataaacattatgaatgaggaaaaagttaacagagtaaataaagcttttgtaaatgtacaaaaggaacttgcacatttcgcaaaaagcatttcacttgaacctctgcagaaagaactgattcctcagcagcgtcatgaaagcaaaccagttaatgttgatgaagctacaagattaatggctctgttgtaatatactggtgatgcatctaattctccacaaagaccaataaattgaatgttttataca

SEQ ID NO: 277358 - DNA, 665 bp, Homo sapiens
  misc_feature (505)..(506): n is a, c, g, or t
  misc_feature (511)..(511): n is a, c, g, or t
  misc_feature (514)..(514): n is a, c, g, or t
ccccggaacttcctagacgccgtacgtgccagatggtgttacctggagcttaaaaagctgcacgcaagtgttaaacttctgtaggaggaatactgttggcgttcaaaagcattgctgtttcaaacagacaaattaagagggccgaagtccaggaatgtatttcacatagccagccaaaaaaactttaaggctaaaaacaaagcaaaaccagttaccactaatcttaagaagataaacattatgaatgaggaaaaagttaacagagtaaataaagcttttgtaaatgtacaaaaggaacttgcacatttcgcaaaaagcatttcacttgaacctctgcagaaagaactgattcctcagcagcgtcatgaaagcaaaccagttaatgttgatgaagctacaagattaatggctctgttgtaatatactggtgatgcatctaattctccacaaagaccaataaattgaatgttttatacaaaaaaaaaaaggcaacaacaaaaaaaannctttnggngccgccttgggcgcttgaaaaagttttcttaaaccattcggtttgggcggcggggccccagttagggttacgttgacctggcgctcatacgcgtgttccctaggagactactgcgccatgacctagtgctgggatttcctctccatttaac

SEQ ID NO: 277359 - DNA, 1473 bp, Homo sapiens
ctttaattaaaatctgacactgctgacctggagatagcgtcagattccacaggttgagagttgagtcctaagcctctccccaacttccagtgacaatcacaagtcccagatgttttacctgtgcttctcaccaaccagttataaataagtgttcccatgaccccctccttgggtttgattaatttgctagagcagctcacagaacccaggaaaatacttttaccagtttattataaaggatattacaaaggggacagatgcgtagccagatggaagaggtgcagagggcaaggtacatgggaaggggcatggagcttccctgctctctctgggcatgccactttctaggagcccccatgtgttcagctatccagaagctctttgaacccagttcttttgtagatttccggaggcttcattatgtaggcataattcattaaatcattggccattagtgatgggcttaacctttatccccactcctctggagcagaaagtcctaatcctctaaccctgtgtttttatctgactagccctcctcctgaagctatctagagactcccagctaccagccatcttattagcattcaaaagacactcttatccctcttaatacaatgatttaaaaagctgtatgacaggaaatgaggacaaagaccaaatatatatatatatcttattatgaatcacaatatcacagtcacatattttagccttctgaaccataagtgtgaggcatagccacataaatcccattttttaaaaaccaaaactttttgtctgtaatttcccaataagactataagaatttttgagtgaattatccctaatttgttggtaagagtttttagattttagatttaacaggttaaggttgaatatatcttatctttaatggttatgagatcatagattaatgctttttttctttttaaaagataaacattatgaatgaggaaaaagttaacagagtaaataaagcttttgtaaatgtacaaaaggaacttgcacatttcgcaaaaagcatttcacttgaacctctgcagaaagaactggtaagcagaaatcatttgcttttttttatggctaacaaattgaggctaataaattaaactcccaagttttcaaagcctgtaagttgagtgtaatttttagtacttggctctctagtactaggctctatagtataaatagcatattcagactctaaaacattgtcagaatatacagattgttctacttccaaagatatgactagaaaaattaaattgaataacagcttatataagtcatttgtctgctattgttgtctgtgtttttaaatataatactttctcctttcagattcctcagcagcgtcatgaaagcaaaccagttaatgttgatgaagctacaagattaatggctctgttgtaatatactggtgatgcatctaattctccacaaagaccaataaattgaatgttttataca

SEQ ID NO: 277360 - DNA, 1184 bp, Homo sapiens
ctttaattaaaatctgacactgctgacctggagatagcgtcagattccacaggttgagagttgagtcctaagcctctccccaacttccagtgacaatcacaagtcccagatgttttacctgtgcttctcaccaaccagttataaataagtgttcccatgaccccctccttgggtttgattaatttgctagagcagctcacagaacccaggaaaatacttttaccagtttattataaaggatattacaaaggggacagatgcgtagccagatggaagaggtgcagagggcaaggtacatgggaaggggcatggagcttccctgctctctctgggcatgccactttctaggagcccccatgtgttcagctatccagaagctctttgaacccagttcttttgtagatttccggaggcttcattatgtaggcataattcattaaatcattggccattagtgatgggcttaacctttatccccactcctctggagcagaaagtcctaatcctctaaccctgtgtttttatctgactagccctcctcctgaagctatctagagactcccagctaccagccatcttattagcattcaaaagacactcttatccctcttaatacaatgatttaaaaagctgtatgacaggaaatgaggacaaagaccaaatatatatatatatcttattatgaatcacaatatcacagtcacatattttagccttctgaaccataagtgtgaggcatagccacataaatcccattttttaaaaaccaaaactttttgtctgtaatttcccaataagactataagaatttttgagtgaattatccctaatttgttggtaagagtttttagattttagatttaacaggttaaggttgaatatatcttatctttaatggttatgagatcatagattaatgctttttttctttttaaaagataaacattatgaatgaggaaaaagttaacagagtaaataaagcttttgtaaatgtacaaaaggaacttgcacatttcgcaaaaagcatttcacttgaacctctgcagaaagaactgattcctcagcagcgtcatgaaagcaaaccagttaatgttgatgaagctacaagattaatggctctgttgtaatatactggtgatgcatctaattctccacaaagaccaataaattgaatgttttataca

SEQ ID NO: 277361 - DNA, 467 bp, Homo sapiens
ccattggtcgagagaaattaggaatcagtacttttcatctttatcggtcaactgtcgaccttatgtagtgcgcgttgtccttgttgcacgatcagtgccagtgcatccaccttgttgccgttgatcatcacatctcagtttctagtagattagccgattgataacggtcaaaatggtaatccagcgaagcatagctaatttctctcggaccaatgcattggtccgagagaacagacaaattaagagggccgaagtccaggaatgtatttcacatagccagccaaaaaaactttaaggctaaaaacaaagcaaaaccagttaccactaatcttaagaagattcctcagcagcgtcatgaaagcaaaccagttaatgttgatgaagctacaagattaatggctctgttgtaatatactggtgatgcatctaatttctctcggaccaatgggtccgagcgtgacttgtta

SEQ ID NO: 277362 - DNA, 854 bp, Homo sapiens
  misc_feature (608)..(608): n is a, c, g, or t
  misc_feature (848)..(848): n is a, c, g, or t
ccccggaacttcctagacgccgtacgtgccagatggtgttacctggagcttaaaaagctgcacgcaagtgttaaacttctgtaggaggaatactgttggcgttcaaaagcattgctgtttcaaacagacaaattaagagggccgaagtccaggaatgtatttcacatagccagccaaaaaaactttaaggctaaaaacaaagcaaaaccagttaccactaatcttaagaaggttcttcatttttcctagaaaggtaaggatggtttcaagcatttgtctaaaaaaatataaaaaaaaaggaagaaaaataacctccctttcttgaaaacaaatgttgaaaagaaataaacattttaactacaaaaaaaaaaaaaaaaaaaaaaaaaaaaaaaaaaaaaaaaaggggggggcccccaaaaattccccccggggggccccattccccccccccgtttttgtgttccaaagggggccccccataagatgggaggcgcgtatatttaatagcccaagaaggcacgggcgccggcattttaaacaccggctggtcgctggggaaagaccggcgctacgcgctgggcgcactcttgtggaaagggagggaccgnccttccactctccgggggggggggggacccaatagtggggggccacaatctaccccctcagaggagggatattatagcggccctcggaggggcaacaactttacacttttccaggcggggctattcgtgcgcgttaacccccagccggcaaatgcccctggcgcgctgggaacaaattttggcccgaccgcgagattgcttttgggacctttttttttcgcggacttggttttataaagncgcata

SEQ ID NO: 277363 - DNA, 402 bp, Homo sapiens
ccccggaacttcctagacgccgtacgtgccagatggtgttacctggagcttaaaaagctgcacgcaagtgttaaacttctgaacagacaaattaagagggccgaagtccaggaatgtatttcacatagccagccaaaaaaactttaaggctaaaaacaaagcaaaaccagttaccactaatcttaagaagataaacattatgaatgaggaaaaagttaacagagtaaataaagcttttgtaaatgtacaaaaggaacttgcacatttcgcaaaaagcatttcacttgaacctctgcagaaagaactgattcctcagcagcgtcatgaaagcagaccagttaatgttgatgaagctacaagataatgctcttatacctaagagggccttggttgaactggcac

SEQ ID NO: 277364 - DNA, 2792 bp, Homo sapiens
ccccggaacttcctagacgccgtacgtgccagatggtgttacctggagcttaaaaagctgcacgcaagtgttaaacttctgtaggaggaatactgttggcgttcaaaagcattgctgtttcagttaagtagttccttaattacttacaatgtagtaaggctacattgaaggaagatataaatttcagtcaagactacgactgagcaaaggaaaaaaaggaagaatgttcaaggtgtctgtgcaagagaacagttagaccaggctggctagagcagtgtttatagggacgtaacaggagatatgtgtggcagatttagggtagattcagagtgccagtaatatgccaagccaaggcacgttgccccttatacattgggaaaactgttgaaggtttttaacattgggaaggtcgatcgcatagcttggtgccagatagccactgtgcagatggcttaagccaggagttggcagactttctgttaaaggtcggacactaaatattttggactttgtgggtcatagttatagcaggaaagcagccatatcagcatatgattgaatggacataactgtattccaattaaactttattttttaattaattaatttttttgagacagagtcttgctctgtcactcaggctggagtgcactggtgcaatcttggctcactgcaaccttcgccttccggattcaagcgattctccttcctcagtctcccgagtagctgggatcacaggcatgtgccaccacgcccagctaatttttgtatttgtagtagagacagggtttcaccatggtgaggctggtctctgccttcgcctcccaaagtgctgggattataggtgtgagccaccgcgcctgcacttggcctccaattaaactttactacaaggacaggtgcttggcctgatttggtccatgggcatagtttgacaaacagtggtttgaacaaatggacctagggacttcagcagtaatccagtcctgaactaagcaatactataccatttttttgtatagcttttatatttatacatgaagtgtaatatcacataacgttagctctgatctagtctgcctggctgtaagtcctggcatctcctggttattgacagtgtgacattgggcaaattaacttctctttgcgtcagttttttaattttaatctttaaaatggggataatagtacttcttacaaagggttgtaaggagtaaatgagttaaagcacataagtgtagtgcttgtacatataataaaagctcaatatgtgttaacttaatattttaaaaattattcctcatatacattattaaaggcagatctgagagatgttttaaggtagaatttactggcttaatgcatctctagctacggaggaaagacagtatccaacacttcaaggcaagggccgttcacatagaggtaatatggaagtcataaaagtaaattaagggagagagggaggtaggaaatggaggattaaggactgattttgatgggatgcacaggagagaaagtggggagagtaaaaaggaataaaaaagaagtcaagaaggaggcagaatcagtctctaaagtatgataggaaccagaatagcatagtagtatatagactaacagaaggatgggtggtgaggtactgctgagaataacagttattgtgttgatgatattagtgaattcaaccagcagatattaattggatgcctcctatgggcccattactggggatacagggaagaattagatacatactctgtactcaaagagcagaaaatctactaggagtgaaagacttggaaataatatatgcaccaactttaaaaataatcaagagtaagatagaattttttagatttaattggtacctttaaaaacttaaaattgacttacggttcataaatgtgggcaatttaattgaatttattttcttttctagacaacagacaaattaagagggccgaagtccaggaatgtatttcacatagccagccaaaaaaactttaaggctaaaaacaaagcaaaaccagttaccactaatcttaagaagataaacattatgaatgaggaaaaagttaacagagtaaataaagcttttgtaaatgtacaaaaggaacttgcacatttcgcaaaaagcatttcacttgaacctctgcagaaagaactgattcctcagcagcgtcatgaaagcaaaccagttaatgttgatgaagctacaagattaatggctctgttgtaatatactggtgatgcatctaattctccacaaagaccaataaattgaatgttttatacaattttatttttaaaaatcttgttaatgtacaggcattggcacattttaaaaacaaactacataaacagatctttcctataacctaggaaagtggaatgtcagaagtcaacaaaatgtgataaacttaaagtgctaaaacagaaggcacttcacaaaatctgttcactgaaacagttatatatcctcgtttacatccttcactttacaagtggcagtgaacgtctgtttggatagaaggacatacagaaatacaggcagtttagtggcagtaaaaatataagacaagtaatgagtccttggccaacttgtttttgatgacctgtagtgtcctttaactttcctccttaagaagaaaaaacagaaggattcacaattagaagaaaagttgaaatccagaatatagttacttttgggagtggggacgtttgtggatattaaatcacttatcccctaaagcaatcagagccctttgtttttatggttgaagttttgt

SEQ ID NO: 277365 - DNA, 1057 bp, Homo sapiens
ccccggaacttcctagacgccgtacgtgccagatggtgttacctggagcttaaaaagctgcacgcaagtgttaaacttctgtaggaggaatactgttggcgttcaaaagcattgctgtttcagttaagtagttccttaattacttacaatgtagtaaggctacattgaaggaagatataaatttcagtcaagactacgactgagcaaagaacagacaaattaagagggccgaagtccaggaatgtatttcacatagccagccaaaaaaactttaaggctaaaaacaaagcaaaaccagttaccactaatcttaagaagataaacattatgaatgaggaaaaagttaacagagtaaataaagcttttgtaaatgtacaaaaggaacttgcacatttcgcaaaaagcatttcacttgaacctctgcagaaagaactgattcctcagcagcgtcatgaaagcaaaccagttaatgttgatgaagctacaagattaatggctctgttgtaatatactggtgatgcatctaattctccacaaagaccaataaattgaatgttttatacaattttatttttaaaaatcttgttaatgtacaggcattggcacattttaaaaacaaactacataaacagatctttcctataacctaggaaagtggaatgtcagaagtcaacaaaatgtgataaacttaaagtgctaaaacagaaggcacttcacaaaatctgttcactgaaacagttatatatcctcgtttacatccttcactttacaagtggcagtgaacgtctgtttggatagaaggacatacagaaatacaggcagtttagtggcagtaaaaatataagacaagtaatgagtccttggccaacttgtttttgatgacctgtagtgtcctttaactttcctccttaagaagaaaaaacagaaggattcacaattagaagaaaagttgaaatccagaatatagttacttttgggagtggggacgtttgtggatattaaatcacttatcccctaaagcaatcagagccctttgtttttatggttgaagttttgt

SEQ ID NO: 277366 - DNA, 2299 bp, Homo sapiens
ccccggaacttcctagacgccgtacgtgccagatggtgttacctggagcttaaaaagctgcacgcaagtgttaaacttctgtaggaggaatactgttggcgttcaaaagcattgctgtttcagttaagtagttccttaattacttacaatgtagtaaggctacattgaaggaagatataaatttcagtcaagactacgactgagcaaaggaaaaaaaggaagaatgttcaaggtgtctgtgcaagagaacagttagaccaggctggctagagcagtgtttatagggacgtaacaggagatatgtgtggcagatttagggtagattcagagtgccagtaatatgccaagccaaggcacgttgccccttatacattgggaaaactgttgaaggtttttaacattgggaaggtcgatcgcatagcttggtgccagatagccactgtgcagatggcttaagccaggagttggcagactttctgttaaaggtcggacactaaatattttggactttgtgggtcatagttatagcaggaaagcagccatatcagcatatgattgaatggacataactgtattccaattaaactttattttttaattaattaatttttttgagacagagtcttgctctgtcactcaggctggagtgcactggtgcaatcttggctcactgcaaccttcgccttccggattcaagcgattctccttcctcagtctcccgagtagctgggatcacaggcatgtgccaccacgcccagctaatttttgtatttgtagtagagacagggtttcaccatggtgaggctggtctctgccttcgcctcccaaagtgctgggattataggtgtgagccaccgcgcctgcacttggcctccaattaaactttactacaaggacaggtgcttggcctgatttggtccatgggcatagtttgacaaacagtggtttgaacaaatggacctagggacttcagcagtaatccagtcctgaactaagcaatactataccatttttttgtatagcttttatatttatacatgaagtgtaatatcacataacgttagctctgatctagtctgcctggctgtaagtcctggcatctcctggttattgacagtgtgacattgggcaaattaacttctctttgcgtcagttttttaattttaatctttaaaatggggataatagtacttcttacaaagggttgtaaggagtaaatgagttaaagcacataagtgtagtgcttgtacatataataaaagctcaatatgtgttaacttaatattttaaaaattattcctcatatacattattaaaggcagatctgagagatgttttaaggtagaatttactggcttaatgcatctctagctacggaggaaagacagtatccaacacttcaaggcaagggccgttcacatagaggtaatatggaagtcataaaagtaaattaagggagagagggaggtaggaaatggaggattaaggactgattttgatgggatgcacaggagagaaagtggggagagtaaaaaggaataaaaaagaagtcaagaaggaggcagaatcagtctctaaagtatgataggaaccagaatagcatagtagtatatagactaacagaaggatgggtggtgaggtactgctgagaataacagttattgtgttgatgatattagtgaattcaaccagcagatattaattggatgcctcctatgggcccattactggggatacagggaagaattagatacatactctgtactcaaagagcagaaaatctactaggagtgaaagacttggaaataatatatgcaccaactttaaaaataatcaagagtaagatagaattttttagatttaattggtacctttaaaaacttaaaattgacttacggttcataaatgtgggcaatttaattgaatttattttcttttctagacaacagacaaattaagagggccgaagtccaggaatgtatttcacatagccagccaaaaaaactttaaggctaaaaacaaagcaaaaccagttaccactaatcttaagaagataaacattatgaatgaggaaaaagttaacagagtaaataaagcttttgtaaatgtacaaaaggaacttgcacatttcgcaaaaagcatttcacttgaacctctgcagaaagaactgattcctcagcagcgtcatgaaagcaaaccagttaatgttgatgaagctacaagattaatggctctgttgtaatatactggtgatgcatctaattctccacaaagaccaataaattgaatgttttataca

SEQ ID NO: 277367 - DNA, 2310 bp, Homo sapiens
ccccggaacttcctagacgccgtacgtgccagatggtgttacctggagcttaaaaagctgcacgcaagtgttaaacttctgtaggaggaatactgttggcgttcaaaagcattgctgtttcagttaagtagttccttaattacttacaatgtagtaaggctacattgaaggaagatataaatttcagtcaagactacgactgagcaaaggaaaaaaaggaagaatgttcaaggtgtctgtgcaagagaacagttagaccaggctggctagagcagtgtttatagggacgtaacaggagatatgtgtggcagatttagggtagattcagagtgccagtaatatgccaagccaaggcacgttgccccttatacattgggaaaactgttgaaggtttttaacattgggaaggtcgatcgcatagcttggtgccagatagccactgtgcagatggcttaagccaggagttggcagactttctgttaaaggtcggacactaaatattttggactttgtgggtcatagttatagcaggaaagcagccatatcagcatatgattgaatggacataactgtattccaattaaactttattttttaattaattaatttttttgagacagagtcttgctctgtcactcaggctggagtgcactggtgcaatcttggctcactgcaaccttcgccttccggattcaagcgattctccttcctcagtctcccgagtagctgggatcacaggcatgtgccaccacgcccagctaatttttgtatttgtagtagagacagggtttcaccatggtgaggctggtctctgccttcgcctcccaaagtgctgggattataggtgtgagccaccgcgcctgcacttggcctccaattaaactttactacaaggacaggtgcttggcctgatttggtccatgggcatagtttgacaaacagtggtttgaacaaatggacctagggacttcagcagtaatccagtcctgaactaagcaatactataccatttttttgtatagcttttatatttatacatgaagtgtaatatcacataacgttagctctgatctagtctgcctggctgtaagtcctggcatctcctggttattgacagtgtgacattgggcaaattaacttctctttgcgtcagttttttaattttaatctttaaaatggggataatagtacttcttacaaagggttgtaaggagtaaatgagttaaagcacataagtgtagtgcttgtacatataataaaagctcaatatgtgttaacttaatattttaaaaattattcctcatatacattattaaaggcagatctgagagatgttttaaggtagaatttactggcttaatgcatctctagctacggaggaaagacagtatccaacacttcaaggcaagggccgttcacatagaggtaatatggaagtcataaaagtaaattaagggagagagggaggtaggaaatggaggattaaggactgattttgatgggatgcacaggagagaaagtggggagagtaaaaaggaataaaaaagaagtcaagaaggaggcagaatcagtctctaaagtatgataaggaaaaagttaacagagtaaataaagcttttgtaaatgtacaaaaggaacttgcacatttcgcaaaaagcatttcacttgaacctctgcagaaagaactgattcctcagcagcgtcatgaaagcaaaccagttaatgttgatgaagctacaagattaatggctctgttgtaatatactggtgatgcatctaattctccacaaagaccaataaattgaatgttttatacaattttatttttaaaaatcttgttaatgtacaggcattggcacattttaaaaacaaactacataaacagatctttcctataacctaggaaagtggaatgtcagaagtcaacaaaatgtgataaacttaaagtgctaaaacagaaggcacttcacaaaatctgttcactgaaacagttatatatcctcgtttacatccttcactttacaagtggcagtgaacgtctgtttggatagaaggacatacagaaatacaggcagtttagtggcagtaaaaatataagacaagtaatgagtccttggccaacttgtttttgatgacctgtagtgtcctttaactttcctccttaagaagaaaaaacagaaggattcacaattagaagaaaagttgaaatccagaatatagttacttttgggagtggggacgtttgtggatattaaatcacttatcccctaaagcaatcagagccctttgtttttatggttgaagttttgt

SEQ ID NO: 277368 - DNA, 2675 bp, Homo sapiens
ccccggaacttcctagacgccgtacgtgccagatggtgttacctggagcttaaaaagctgcacgcaagtgttaaacttctgtaggaggaatactgttggcgttcaaaagcattgctgtttcagttaagtagttccttaattacttacaatgtagtaaggctacattgaaggaagatataaatttcagtcaagactacgactgagcaaaggaaaaaaaggaagaatgttcaaggtgtctgtgcaagagaacagttagaccaggctggctagagcagtgtttatagggacgtaacaggagatatgtgtggcagatttagggtagattcagagtgccagtaatatgccaagccaaggcacgttgccccttatacattgggaaaactgttgaaggtttttaacattgggaaggtcgatcgcatagcttggtgccagatagccactgtgcagatggcttaagccaggagttggcagactttctgttaaaggtcggacactaaatattttggactttgtgggtcatagttatagcaggaaagcagccatatcagcatatgattgaatggacataactgtattccaattaaactttattttttaattaattaatttttttgagacagagtcttgctctgtcactcaggctggagtgcactggtgcaatcttggctcactgcaaccttcgccttccggattcaagcgattctccttcctcagtctcccgagtagctgggatcacaggcatgtgccaccacgcccagctaatttttgtatttgtagtagagacagggtttcaccatggtgaggctggtctctgccttcgcctcccaaagtgctgggattataggtgtgagccaccgcgcctgcacttggcctccaattaaactttactacaaggacaggtgcttggcctgatttggtccatgggcatagtttgacaaacagtggtttgaacaaatggacctagggacttcagcagtaatccagtcctgaactaagcaatactataccatttttttgtatagcttttatatttatacatgaagtgtaatatcacataacgttagctctgatctagtctgcctggctgtaagtcctggcatctcctggttattgacagtgtgacattgggcaaattaacttctctttgcgtcagttttttaattttaatctttaaaatggggataatagtacttcttacaaagggttgtaaggagtaaatgagttaaagcacataagtgtagtgcttgtacatataataaaagctcaatatgtgttaacttaatattttaaaaattattcctcatatacattattaaaggcagatctgagagatgttttaaggtagaatttactggcttaatgcatctctagctacggaggaaagacagtatccaacacttcaaggcaagggccgttcacatagaggtaatatggaagtcataaaagtaaattaagggagagagggaggtaggaaatggaggattaaggactgattttgatgggatgcacaggagagaaagtggggagagtaaaaaggaataaaaaagaagtcaagaaggaggcagaatcagtctctaaagtatgataggaaccagaatagcatagtagtatatagactaacagaaggatgggtggtgaggtactgctgagaataacagttattgtgttgatgatattagtgaattcaaccagcagatattaattggatgcctcctatgggcccattactggggatacagggaagaattagatacatactctgtactcaaagagcagaaaatctactaggagtgaaagacttggaaataatatatgcaccaactttaaaaataatcaagagtaagatagaattttttagatttaattggtacctttaaaaacttaaaattgacttacggttcataaatgtgggcaatttaattgaatttattttcttttctagacaacagacaaattaagagggccgaagtccaggaatgtatttcacatagccagccaaaaaaactttaaggctaaaaacaaagcaaaaccagttaccactaatcttaagaagattcctcagcagcgtcatgaaagcaaaccagttaatgttgatgaagctacaagattaatggctctgttgtaatatactggtgatgcatctaattctccacaaagaccaataaattgaatgttttatacaattttatttttaaaaatcttgttaatgtacaggcattggcacattttaaaaacaaactacataaacagatctttcctataacctaggaaagtggaatgtcagaagtcaacaaaatgtgataaacttaaagtgctaaaacagaaggcacttcacaaaatctgttcactgaaacagttatatatcctcgtttacatccttcactttacaagtggcagtgaacgtctgtttggatagaaggacatacagaaatacaggcagtttagtggcagtaaaaatataagacaagtaatgagtccttggccaacttgtttttgatgacctgtagtgtcctttaactttcctccttaagaagaaaaaacagaaggattcacaattagaagaaaagttgaaatccagaatatagttacttttgggagtggggacgtttgtggatattaaatcacttatcccctaaagcaatcagagccctttgtttttatggttgaagttttgt

SEQ ID NO: 277369 - DNA, 1469 bp, Homo sapiens
ccccggaacttcctagacgccgtacgtgccagatggtgttacctggagcttaaaaagctgcacgcaagtgttaaacttctgtaggaggaatactgttggcgttcaaaagcattgctgtttcagttaagtagttccttaattacttacaatgtagtaaggctacattgaaggaagatataaatttcagtcaagactacgactgagcaaaggaaaaaaaggaagaatgttcaaggtgtctgtgcaagagaacagttagaccaggctggctagagcagtgtttatagggacgtaacaggagatatgtgtggcagatttagggtagattcagagtgccagtaatatgccaagccaaggcacgttgccccttatacattgggaaaactgttgaaggtttttaacattgggaaggtcgatcgcatagcttggtgccagatagccactgtgcagatggcttaagccaggagttggcagactttctgttaaaggtcggacactaaatattttggactttgtgggtcatagttatagcaggaaagcagccatatcagcatatgattgaatggacataactgtattccaattaaactttattttttaattaattaatttttttgagacagagtcttgctctgtcactcaggctggagtgcactggtgcaatcttggctcactgcaaccttcgccttccggattcaagcgattctccttcctcagtctcccgagtagctgggatcacagaacagacaaattaagagggccgaagtccaggaatgtatttcacatagccagccaaaaaaactttaaggctaaaaacaaagcaaaaccagttaccactaatcttaagaagattcctcagcagcgtcatgaaagcaaaccagttaatgttgatgaagctacaagattaatggctctgttgtaatatactggtgatgcatctaattctccacaaagaccaataaattgaatgttttatacaattttatttttaaaaatcttgttaatgtacaggcattggcacattttaaaaacaaactacataaacagatctttcctataacctaggaaagtggaatgtcagaagtcaacaaaatgtgataaacttaaagtgctaaaacagaaggcacttcacaaaatctgttcactgaaacagttatatatcctcgtttacatccttcactttacaagtggcagtgaacgtctgtttggatagaaggacatacagaaatacaggcagtttagtggcagtaaaaatataagacaagtaatgagtccttggccaacttgtttttgatgacctgtagtgtcctttaactttcctccttaagaagaaaaaacagaaggattcacaattagaagaaaagttgaaatccagaatatagttacttttgggagtggggacgtttgtggatattaaatcacttatcccctaaagcaatcagagccctttgtttttatggttgaagttttgt

SEQ ID NO: 277370 - DNA, 1677 bp, Homo sapiens
ctttaattaaaatctgacactgctgacctggagatagcgtcagattccacaggttgagagttgagtcctaagcctctccccaacttccagtgacaatcacaagtcccagatgttttacctgtgcttctcaccaaccagttataaataagtgttcccatgaccccctccttgggtttgattaatttgctagagcagctcacagaacccaggaaaatacttttaccagtttattataaaggatattacaaaggggacagatgcgtagccagatggaagaggtgcagagggcaaggtacatgggaaggggcatggagcttccctgctctctctgggcatgccactttctaggagcccccatgtgttcagctatccagaagctctttgaacccagttcttttgtagatttccggaggcttcattatgtaggcataattcattaaatcattggccattagtgatgggcttaacctttatccccactcctctggagcagaaagtcctaatcctctaaccctgtgtttttatctgactagccctcctcctgaagctatctagagactcccagctaccagccatcttattagcattcaaaagacactcttatccctcttaatacaatgatttaaaaagctgtatgacaggaaatgaggacaaagaccaaatatatatatatatcttattatgaatcacaatatcacagtcacatattttagccttctgaaccataagtgtgaggcatagccacataaatcccattttttaaaaaccaaaactttttgtctgtaatttcccaataagactataagaatttttgagtgaattatccctaatttgttggtaagagtttttagattttagatttaacaggttaaggttgaatatatcttatctttaatggttatgagatcatagattaatgctttttttctttttaaaagataaacattatgaatgaggaaaaagttaacagagtaaataaagcttttgtaaatgtacaaaaggaacttgcacatttcgcaaaaagcatttcacttgaacctctgcagaaagaactgattcctcagcagcgtcatgaaagcaaaccagttaatgttgatgaagctacaagattaatggctctgttgtaatatactggtgatgcatctaattctccacaaagaccaataaattgaatgttttatacaattttatttttaaaaatcttgttaatgtacaggcattggcacattttaaaaacaaactacataaacagatctttcctataacctaggaaagtggaatgtcagaagtcaacaaaatgtgataaacttaaagtgctaaaacagaaggcacttcacaaaatctgttcactgaaacagttatatatcctcgtttacatccttcactttacaagtggcagtgaacgtctgtttggatagaaggacatacagaaatacaggcagtttagtggcagtaaaaatataagacaagtaatgagtccttggccaacttgtttttgatgacctgtagtgtcctttaactttcctccttaagaagaaaaaacagaaggattcacaattagaagaaaagttgaaatccagaatatagttacttttgggagtggggacgtttgtggatattaaatcacttatcccctaaagcaatcagagccctttgtttttatggttgaagttttgt

SEQ ID NO: 277371 - DNA, 1966 bp, Homo sapiens
ctttaattaaaatctgacactgctgacctggagatagcgtcagattccacaggttgagagttgagtcctaagcctctccccaacttccagtgacaatcacaagtcccagatgttttacctgtgcttctcaccaaccagttataaataagtgttcccatgaccccctccttgggtttgattaatttgctagagcagctcacagaacccaggaaaatacttttaccagtttattataaaggatattacaaaggggacagatgcgtagccagatggaagaggtgcagagggcaaggtacatgggaaggggcatggagcttccctgctctctctgggcatgccactttctaggagcccccatgtgttcagctatccagaagctctttgaacccagttcttttgtagatttccggaggcttcattatgtaggcataattcattaaatcattggccattagtgatgggcttaacctttatccccactcctctggagcagaaagtcctaatcctctaaccctgtgtttttatctgactagccctcctcctgaagctatctagagactcccagctaccagccatcttattagcattcaaaagacactcttatccctcttaatacaatgatttaaaaagctgtatgacaggaaatgaggacaaagaccaaatatatatatatatcttattatgaatcacaatatcacagtcacatattttagccttctgaaccataagtgtgaggcatagccacataaatcccattttttaaaaaccaaaactttttgtctgtaatttcccaataagactataagaatttttgagtgaattatccctaatttgttggtaagagtttttagattttagatttaacaggttaaggttgaatatatcttatctttaatggttatgagatcatagattaatgctttttttctttttaaaagataaacattatgaatgaggaaaaagttaacagagtaaataaagcttttgtaaatgtacaaaaggaacttgcacatttcgcaaaaagcatttcacttgaacctctgcagaaagaactggtaagcagaaatcatttgcttttttttatggctaacaaattgaggctaataaattaaactcccaagttttcaaagcctgtaagttgagtgtaatttttagtacttggctctctagtactaggctctatagtataaatagcatattcagactctaaaacattgtcagaatatacagattgttctacttccaaagatatgactagaaaaattaaattgaataacagcttatataagtcatttgtctgctattgttgtctgtgtttttaaatataatactttctcctttcagattcctcagcagcgtcatgaaagcaaaccagttaatgttgatgaagctacaagattaatggctctgttgtaatatactggtgatgcatctaattctccacaaagaccaataaattgaatgttttatacaattttatttttaaaaatcttgttaatgtacaggcattggcacattttaaaaacaaactacataaacagatctttcctataacctaggaaagtggaatgtcagaagtcaacaaaatgtgataaacttaaagtgctaaaacagaaggcacttcacaaaatctgttcactgaaacagttatatatcctcgtttacatccttcactttacaagtggcagtgaacgtctgtttggatagaaggacatacagaaatacaggcagtttagtggcagtaaaaatataagacaagtaatgagtccttggccaacttgtttttgatgacctgtagtgtcctttaactttcctccttaagaagaaaaaacagaaggattcacaattagaagaaaagttgaaatccagaatatagttacttttgggagtggggacgtttgtggatattaaatcacttatcccctaaagcaatcagagccctttgtttttatggttgaagttttgt

SEQ ID NO: 277372 - DNA, 587 bp, Homo sapiens
ccccggaacttcctagacgccgtacgtgccagatggtgttacctggagcttaaaaagctgcacgcaagtgttaaacttctgtaggaggaatactgttggcgttcaaaagcattgctgtttcagttaagtagttccttaattacttacaatgtagtaaggctacattgaaggaagatataaatttcagtcaagactacgactgagcaaaggaaaaaaaggaagaatgttcaagaacagacaaattaagagggccgaagtccaggaatgtatttcacatagccagccaaaaaaactttaaggctaaaaacaaagcaaaaccagttaccactaatcttaagaagataaacattatgaatgaggaaaaagttaacagagtaaataaagcttttgtaaatgtacaaaaggaacttgcacatttcgcaaaaagcatttcacttgaacctctgcagaaagaactgattcctcagcagcgtcatgaaagcaaaccagttaatgttgatgaagctacaagattaatggctctgttgtaatatactggtgatgcatctaattctccacaaagaccaataaattgaatgttttataca

SEQ ID NO: 277373 - DNA, 2106 bp, Homo sapiens
ccccggaacttcctagacgccgtacgtgccagatggtgttacctggagcttaaaaagctgcacgcaagtgttaaacttctgtaggaggaatactgttggcgttcaaaagcattgctgtttcagttaagtagttccttaattacttacaatgtagtaaggctacattgaaggaagatataaatttcagtcaagactacgactgagcaaaggaaaaaaaggaagaatgttcaaggtgtctgtgcaagagaacagttagaccaggctggctagagcagtgtttatagggacgtaacaggagatatgtgtggcagatttagggtagattcagagtgccagtaatatgccaagccaaggcacgttgccccttatacattgggaaaactgttgaaggtttttaacattgggaaggtcgatcgcatagcttggtgccagatagccactgtgcagatggcttaagccaggagttggcagactttctgttaaaggtcggacactaaatattttggactttgtgggtcatagttatagcaggaaagcagccatatcagcatatgattgaatggacataactgtattccaattaaactttattttttaattaattaatttttttgagacagagtcttgctctgtcactcaggctggagtgcactggtgcaatcttggctcactgcaaccttcgccttccggattcaagcgattctccttcctcagtctcccgagtagctgggatcacaggcatgtgccaccacgcccagctaatttttgtatttgtagtagagacagggtttcaccatggtgaggctggtctctgccttcgcctcccaaagtgctgggattataggtgtgagccaccgcgcctgcacttggcctccaattaaactttactacaaggacaggtgcttggcctgatttggtccatgggcatagtttgacaaacagtggtttgaacaaatggacctagggacttcagcagtaatccagtcctgaactaagcaatactataccatttttttgtatagcttttatatttatacatgaagtgtaatatcacataacgttagctctgatctagtctgcctggctgtaagtcctggcatctcctggttattgacagtgtgacattgggcaaattaacttctctttgcgtcagttttttaattttaatctttaaaatggggataatagtacttcttacaaagggttgtaaggagtaaatgagttaaagcacataagtgtagtgcttgtacatataataaaagctcaatatgtgttaacttaatattttaaaaattattcctcatatacattattaaaggcagatctgagagatgttttaaggtagaatttactggcttaatgcatctctagctacggaggaaagacagtatccaacacttcaaggcaagggccgttcacatagaggtaatatggaagtcataaaagtaaattaagggagagagggaggtaggaaatggaggattaaggactgattttgatgggatgcacaggagagaaagtggggagagtaaaaaggaataaaaaagaagtcaagaaggaggcagaatcagtctctaaagtatgataaggaaaaagttaacagagtaaataaagcttttgtaaatgtacaaaaggaacttgcacatttcgcaaaaagcatttcacttgaacctctgcagaaagaactggtaagcagaaatcatttgcttttttttatggctaacaaattgaggctaataaattaaactcccaagttttcaaagcctgtaagttgagtgtaatttttagtacttggctctctagtactaggctctatagtataaatagcatattcagactctaaaacattgtcagaatatacagattgttctacttccaaagatatgactagaaaaattaaattgaataacagcttatataagtcatttgtctgctattgttgtctgtgtttttaaatataatactttctcctttcagattcctcagcagcgtcatgaaagcaaaccagttaatgttgatgaagctacaagattaatggctctgttgtaatatactggtgatgcatctaattctccacaaagaccaataaattgaatgttttataca

SEQ ID NO: 277374 - DNA, 2628 bp, Homo sapiens
ccccggaacttcctagacgccgtacgtgccagatggtgttacctggagcttaaaaagctgcacgcaagtgttaaacttctgtaggaggaatactgttggcgttcaaaagcattgctgtttcagttaagtagttccttaattacttacaatgtagtaaggctacattgaaggaagatataaatttcagtcaagactacgactgagcaaaggaaaaaaaggaagaatgttcaaggtgtctgtgcaagagaacagttagaccaggctggctagagcagtgtttatagggacgtaacaggagatatgtgtggcagatttagggtagattcagagtgccagtaatatgccaagccaaggcacgttgccccttatacattgggaaaactgttgaaggtttttaacattgggaaggtcgatcgcatagcttggtgccagatagccactgtgcagatggcttaagccaggagttggcagactttctgttaaaggtcggacactaaatattttggactttgtgggtcatagttatagcaggaaagcagccatatcagcatatgattgaatggacataactgtattccaattaaactttattttttaattaattaatttttttgagacagagtcttgctctgtcactcaggctggagtgcactggtgcaatcttggctcactgcaaccttcgccttccggattcaagcgattctccttcctcagtctcccgagtagctgggatcacaggcatgtgccaccacgcccagctaatttttgtatttgtagtagagacagggtttcaccatggtgaggctggtctctgccttcgcctcccaaagtgctgggattataggtgtgagccaccgcgcctgcacttggcctccaattaaactttactacaaggacaggtgcttggcctgatttggtccatgggcatagtttgacaaacagtggtttgaacaaatggacctagggacttcagcagtaatccagtcctgaactaagcaatactataccatttttttgtatagcttttatatttatacatgaagtgtaatatcacataacgttagctctgatctagtctgcctggctgtaagtcctggcatctcctggttattgacagtgtgacattgggcaaattaacttctctttgcgtcagttttttaattttaatctttaaaatggggataatagtacttcttacaaagggttgtaaggagtaaatgagttaaagcacataagtgtagtgcttgtacatataataaaagctcaatatgtgttaacttaatattttaaaaattattcctcatatacattattaaaggcagatctgagagatgttttaaggtagaatttactggcttaatgcatctctagctacggaggaaagacagtatccaacacttcaaggcaagggccgttcacatagaggtaatatggaagtcataaaagtaaattaagggagagagggaggtaggaaatggaggattaaggactgattttgatgggatgcacaggagagaaagtggggagagtaaaaaggaataaaaaagaagtcaagaaggaggcagaatcagtctctaaagtatgataggaaccagaatagcatagtagtatatagactaacagaaggatgggtggtgaggtactgctgagaataacagttattgtgttgatgatattagtgaattcaaccagcagatattaattggatgcctcctatgggcccattactggggatacagggaagaattagatacatactctgtactcaaagagcagaaaatctactaggagtgaaagacttggaaataatatatgcaccaactttaaaaataatcaagagtaagatagaattttttagatttaattggtacctttaaaaacttaaaattgacttacggttcataaatgtgggcaatttaattgaatttattttcttttctagacaacagacaaattaagagggccgaagtccaggaatgtatttcacatagccagccaaaaaaactttaaggctaaaaacaaagcaaaaccagttaccactaatcttaagaaggtgagtattagttaagcactctgactttattgtttacaagcaaagtgtcattgtaagctactgaacagctgtatactattactttttaaaaaggttcttcatttttcctagaaaggtaaggatggtttcaagcatttgtctaaaaaaatataaaaaaaaaggaagaaaaataacctccctttcttgaaaacaaatgttgaaaagaaataaacattttaactacaaatgtgtgaagcttcaatttaatagttttactgaaccatagaactcatttaaaaaccatagtatgggaaacagttcttatctctaaactcaaatgtaagaatgtattaatagaggcaagacatgggatgtcagtgagcacccattctttttctcctcagtaattcttgtatctttgaagacatctgcaattcaaacaaaaacctgtaaaatgaagataaaaaatatttattgaaatgcacaatttgaaaggggtttcttttctttgtttatatttcaaaatacctgagaaatttctacaagatttaagaaaaatttttaagaaaatgttttcaagtttcagtagtagatgg

SEQ ID NO: 277375 - DNA, 1600 bp, Homo sapiens
ccccggaacttcctagacgccgtacgtgccagatggtgttacctggagcttaaaaagctgcacgcaagtgttaaacttctgtaggaggaatactgttggcgttcaaaagcattgctgtttcagttaagtagttccttaattacttacaatgtagtaaggctacattgaaggaagatataaatttcagtcaagactacgactgagcaaaggaaaaaaaggaagaatgttcaaggtgtctgtgcaagagaacagttagaccaggctggctagagcagtgtttatagggacgtaacaggagatatgtgtggcagatttagggtagattcagagtgccagtaatatgccaagccaaggcacgttgccccttatacattgggaaaactgttgaaggtttttaacattgggaaggtcgatcgcatagcttggtgccagatagccactgtgcagatggcttaagccaggagttggcagactttctgttaaaggtcggacactaaatattttggactttgtgggtcatagttatagcaggaaagcagccatatcagcatatgattgaatggacataactgtattccaattaaactttattttttaattaattaatttttttgagacagagtcttgctctgtcactcaggctggagtgcactggtgcaatcttggctcactgcaaccttcgccttccggattcaagcgattctccttcctcagtctcccgagtagctgggatcacaggcatgtgccaccacgcccagctaatttttgtatttgtagtagagacagggtttcaccatggtgaggctggtctctgccttcgcctcccaaagtgctgggattataggtgtgagccaccgcgcctgcacttggcctccaattaaactttactacaaggacaggtgcttggcctgatttggtccatgggcatagtttgacaaacagtggtttgaacaaatggacctagggacttcagcagtaatccagtcctgaactaagcaatactataccatttttttgtatagcttttatatttatacatgaagtgtaatatcacataacgttagctctgatctagtctgcctggctgtaagtcctggcatctcctggttattgacagtgtgacattgggcaaattaacttctctttgcgtcagttttttaattttaatctttaaaatggggataatagtacttcttacaaagggttgtaaggagtaaatgagttaaagcacataagtgtagtgcttgtacatataataaaagctcaatatgtgttaacttaatattttaaaaattattcctcatatacattattaaaggcagatctgagagatgttttaaggtagaatttactggcttaatgcatctctagctacggaggaaagacagtatccaacacttcaaggcaagggccgttcacatagaggtaatatggaagtcataaaagtaaattaagggagagagggaggtaggaaatggagattattttatttggacaggaggtactagaacttttatatatgccaccaggtaggatctaagagagagatctatgggtaggctgcataaggtgcaaaggaggtaagggttttgaaggagaa

SEQ ID NO: 277376 - DNA, 929 bp, Homo sapiens
ccccggaacttcctagacgccgtacgtgccagatggtgttacctggagcttaaaaagctgcacgcaagtgttaaacttctgaacagacaaattaagagggccgaagtccaggaatgtatttcacatagccagccaaaaaaactttaaggctaaaaacaaagcaaaaccagttaccactaatcttaagaagataaacattatgaatgaggaaaaagttaacagagtaaataaagcttttgtaaatgtacaaaaggaacttgcacatttcgcaaaaagcatttcacttgaacctctgcagaaagaactgattcctcagcagcgtcatgaaagcaaaccagttaatgttgatgaagctacaagattaatggctctgttgtaatatactggtgatgcatctaattctccacaaagaccaataaattgaatgttttatacaattttatttttaaaaatcttgttaatgtacaggcattggcacattttaaaaacaaactacataaacagatctttcctataacctaggaaagtggaatgtcagaagtcaacaaaatgtgataaacttaaagtgctaaaacagaaggcacttcacaaaatctgttcactgaaacagttatatatcctcgtttacatccttcactttacaagtggcagtgaacgtctgtttggatagaaggacatacagaaatacaggcagtttagtggcagtaaaaatataagacaagtaatgagtccttggccaacttgtttttgatgacctgtagtgtcctttaactttcctccttaagaagaaaaaacagaaggattcacaattagaagaaaagttgaaatccagaatatagttacttttgggagtggggacgtttgtggatattaaatcacttatcccctaaagcaatcagagccctttgtttttatggttgaagttttgt

SEQ ID NO: 277377 - DNA, 929 bp, Homo sapiens
ccccggaacttcctagacgccgtacgtgccagatggtgttacctggagcttaaaaagctgcacgcaagtgttaaacttctgtaggaggaatactgttggcgttcaaaagcattgctgtttcagttaagtagttccttaattacttacaatgtagtaaggctacattgaaggaagatataaatttcagtcaagactacgactgagcaaagaacagacaaattaagagggccgaagtccaggaatgtatttcacatagccagccaaaaaaactttaaggctaaaaacaaagcaaaaccagttaccactaatcttaagaagataaacattatgaatgaggaaaaagttaacagagtaaataaagcttttgtaaatgtacaaaaggaacttgcacatttcgcaaaaagcatttcacttgaacctctgcagaaagaactgattcctcagcagcgtcatgaaagcaaaccagttaatgttgatgaagctacaagattaatggctctgttgtaatatactggtgatgcatctaattctccacaaagaccaataaattgaatgttttatacaaagaacaaatgcgccccccgccccaacccgacaccccgagccccccgcaccccgacaccccacacgaccgacgcaaccaagcaacaaagaaaggacaactaacacgcaacaaaggcggcgcgcgccaccgcaagtcgccccctgaggcgaccgcacacaaacgcgccgccatgagcgcacaagaagccgcagatcaaccggcgactaatcatacgaccggccgccgccgcccataacagacacgcccgacacaaacgcaccgttctcgaacgaaggccacctcgtggggggagacaacgacacacaccacgacacgagccgagcgagcaataacacgagtcagggtgaaccacaccgctcgtcaa

SEQ ID NO: 277378 - DNA, 765 bp, Homo sapiens
ccccggaacttcctagacgccgtacgtgccagatggtgttacctggagcttaaaaagctgcacgcaagtgttaaacttctgaacagacaaattaagagggccgaagtccaggaatgtatttcacatagccagccaaaaaaactttaaggctaaaaacaaagcaaaaccagttaccactaatcttaagaaggtgagtattagttaagcactctgactttattgtttacaagcaaagtgtcattgtaagctactgaacagctgtatactattactttttaaaaaggttcttcatttttcctagaaaggtaaggatggtttcaagcatttgtctaaaaaaatataaaaaaaaaggaagaaaaataacctccctttcttgaaaacaaatgttgaaaagaaataaacattttaactacaaatgtgtgaagcttcaatttaatagttttactgaaccatagaactcatttaaaaaccatagtatgggaaacagttcttatctctaaactcaaatgtaagaatgtattaatagaggcaagacatgggatgtcagtgagcacccattctttttctcctcagtaattcttgtatctttgaagacatctgcaattcaaacaaaaacctgtaaaatgaagataaaaaatatttattgaaatgcacaatttgaaaggggtttcttttctttgtttatatttcaaaatacctgagaaatttctacaagatttaagaaaaatttttaagaaaatgttttcaagtttcagtagtagatgg

SEQ ID NO: 277379 - DNA, 2193 bp, Homo sapiens
tggggccgaggcggcgcgcggcgctgacagctgagtcggctcgcggcctcccggccccctcggcgcccggcccgaccctggcctggcctgccctgccccggagccatgagccccgggctgctgctgctcggcagcgccgtcctgctcgccttcggcctctgctgcaccttcgtgcaccgcgctcgcagccgctacgagcacatccccgggccgccgcggcccagtttccttctaggacacctcccctgcttttggaaaaaggatgaggttggtggccgtgtgctccaagatgtgtttttggattgggctaagaagtatggacctgttgtgcgggtcaacgtcttccacaaaacctcagtcatcgtcacgagtcctgagtcggttaagaagttcctgatgtcaaccaagtacaacaaggactccaagatgtaccgtgcgctccagactgtgtttggtgagagactcttcggccaaggcttggtgtccgaatgcaactatgagcgctggcacaagcagcggagagtcatagacctggccttcagccggagctccttggttagcttaatggaaacattcaacgagaaggctgagcagctggtggagattctagaagccaaggcagatgggcagaccccagtgtccatgcaggacatgctgacctacaccgccatggacatcctggccaaggcagcttttgggatggagaccagtatgctgctgggtgcccagaagcctctgtcccaggcagtgaaacttatgttggagggaatcactgcgtcccgcaacactctggcaaagttcctgccagggaagaggaagcagctccgggaggtccgggagagcattcgcttcctgcgccaggtgggcagggactgggtccagcgccgccgggaagccctgaagaggggcgaggaggttcctgccgacatcctcacacagattctgaaagctgaagagggagcccaggacgacgagggtctgctggacaacttcgtcaccttcttcattgctggtcacgagacctctgccaaccacttggcgttcacagtgatggagctgtctcgccagccagagatcgtggcaaggctgcaggccgaggtggatgaggtcattggttctaagaggtacctggatttcgaggacctggggagactgcagtacctgtcccaggtcctcaaagagtcgctgaggctgtacccaccagcatggggcacctttcgcctgctggaagaggagaccttgattgatggggtcagagtccccggcaacaccccgctcttgttcagcacctatgtcatggggcggatggacacatactttgaggacccgctgactttcaaccccgatcgcttcggccctggagcacccaagccacggttcacctacttccccttctccctgggccaccgctcctgcatcgggcagcagtttgctcagatggaggtgaaggtggtcatggcaaagctgctgcagaggctggagttccggctggtgcccgggcagcgcttcgggctgcaggagcaggccacactcaagccactggaccccgtgctgtgcaccctgcggccccgcggctggcagcccgcacccccaccacccccctgctgagggggcctccaggcaggacgagactcctcgggcaagggccgtgcccgcccacctctgctgcccacggccacccacccttctcccctgccccgtcccctgggccacccttcacgctggcttccagcgggccctctgccgaccgcctgcttcacacccctcagcgctccctgtcgcctgcggactccatggcccttcctggactggcccttgcccaactcccagccaccaccactgtccctaccactgagcccttgcacaggccacttgctcagacgagacaccctaactcttgctcactccctaaagccctcttcaggggtcacctcctccaagaagccctccttgccaccccccgccggcaggggcccctcctctgtgctccctcggtcacctgtgctacctctaacaccacactgaccacactgtatcgtgagtgtccgttgacgtgaccaattgccctgccaggctgtcagcgcctcaagggtagggtctgcgtgtgatttgtctctgagccccctgtgcccacccagggcccggcacagagtcgatgctcaataaatgtgtgttgactgcatgaatgacctg

SEQ ID NO: 277380 - DNA, 1125 bp, Homo sapiens
cactggggcacgaggcgctccctgggatcacatggtacctgctccagtgccgcgtgcggcccgggaaccctgggctgctggcgcctgcgcagagccctctgtcccagggaaaggctcgggcaaaaggcggctgagattggcagagtgaaatattactgccgagggaacgtagcagggcacacgtctcgcctctttgcgactcggtgccccgtttctccccatcacctacttacttcctggttgcaacctctcttcctctgggacttttgcaccgggagctccagattcgccaccccgcagcgctgcggagccggcaggcagaggcaccccgtacactgcagagacccgaccctccttgctaccttctagccagaactactgcaggctgattccccctacacactctctctgctcttcccatgcaaagcagaactccgttgcctcaacgtccaacccttctgcagggctgcagtccggccaccccaagaccttgctgcagggtgcttcggatcctgatcgtgagtcgcggggtccactccccgcccttagccagtgcccagggggcaacagcggcgatcgcaacctctagtttgagtcaaggtccagtttgaatgaccgctctcagctggtgaagacatgacgaccctggactccaacaacaacacaggtggcgtcatcacctacattggctccagtggctcctccccaagccgcaccagccctgaatccctctatagtgacaactccaatggcagcttccagtccctgacccaaggctgtcccacctacttcccaccatcccccactggctccctcacccaagacccggctcgctcctttgggagcattccacccagcctgagtgatgacggctccccttcttcctcatcttcctcgtcgtcatcctcctcctccttctataatgggagcccccctgggagtctacaagtggccatggaggacagcagccgagtgtcccccagcaagagcaccagcaacatcaccaagctgaatggcatggtgttactgtgtaaagtgtgtggggacgttgcctcgggcttccactacggtgtgcacgcctgcgagggctgcaaggtgaggcggactgggggtaagggcaggggc

SEQ ID NO: 277381 - DNA, 641 bp, Homo sapiens
aggatccaacagaaagccctgctgtctggggtgggcaggacctctgaaaggttttggaacccagtatctttgtccttatagcctgattggtgaaaggggctgagcggctcctgctgcttcctcttgatggctgggacttctgtcatctcagctggaatttaatcacaacccattacactgaaataatgccttgggtgcactgctgcccccattctagacaagagcagattaactttggtgaatgccttgcccaaggtcacaggtagtgacaaagctgacactcagattcaggcttattggatcccaaagccatccttccacctgggctccctcattggccattcagaaacaacccccactctactgagaaatcgaaggcagcaccgctaaaccctctggcaaactacaggggcgatttggtcagtgctcctcccaccacacccaggatgactgttccccttccctcctaggtgctgatggtgcgctttgcttcgttgttcaacgtgaaggaccagacagtgatgttcctaagccgcaccacctacagcctgcaggagcttggtgccatgggcatgggagacctgctcagtgccatgttcgacttcagcgagaagcgcgaaggggatcctctataacagcgc

SEQ ID NO: 277382 - DNA, 4279 bp, Homo sapiens
cactggggcacgaggcgctccctgggatcacatggtacctgctccagtgccgcgtgcggcccgggaaccctgggctgctggcgcctgcgcagagccctctgtcccagggaaaggctcgggcaaaaggcggctgagattggcagagtgaaatattactgccgagggaacgtagcagggcacacgtctcgcctctttgcgactcggtgccccgtttctccccatcacctacttacttcctggttgcaacctctcttcctctgggacttttgcaccgggagctccagattcgccaccccgcagcgctgcggagccggcaggcagaggcaccccgtacactgcagagacccgaccctccttgctaccttctagccagaactactgcaggctgattccccctacacactctctctgctcttcccatgcaaagcagaactccgttgcctcaacgtccaacccttctgcagggctgcagtccggccaccccaagaccttgctgcagggtgcttcggatcctgatcgtgagtcgcggggtccactccccgcccttagccagtgcccagggggcaacagcggcgatcgcaacctctagtttgagtcaaggtccagtttgaatgaccgctctcagctggtgaagacatgacgaccctggactccaacaacaacacaggtggcgtcatcacctacattggctccagtggctcctccccaagccgcaccagccctgaatccctctatagtgacaactccaatggcagcttccagtccctgacccaaggctgtcccacctacttcccaccatcccccactggctccctcacccaagacccggctcgctcctttgggagcattccacccagcctgagtgatgacggctccccttcttcctcatcttcctcgtcgtcatcctcctcctccttctataatgggagcccccctgggagtctacaagtggccatggaggacagcagccgagtgtcccccagcaagagcaccagcaacatcaccaagctgaatggcatggtgttactgtgtaaagtgtgtggggacgttgcctcgggcttccactacggtgtgcacgcctgcgagggctgcaagggctttttccgtcggagcatccagcagaacatccagtacaaaaggtgtctgaagaatgagaattgctccatcgtccgcatcaatcgcaaccgctgccagcaatgtcgcttcaagaagtgtctctctgtgggcatgtctcgagacgctgtgcgttttgggcgcatccccaaacgagagaagcagcggatgcttgctgagatgcagagtgccatgaacctggccaacaaccagttgagcagccagtgcccgctggagacttcacccacccagcaccccaccccaggccccatgggcccctcgccaccccctgctccggtcccctcacccctggtgggcttctcccagtttccacaacagctgacgcctcccagatccccaagccctgagcccacagtggaggatgtgatatcccaggtggcccgggcccatcgagagatcttcacctacgcccatgacaagctgggcagctcacctggcaacttcaatgccaaccatgcatcaggtagccctccagccaccaccccacatcgctgggaaaatcagggctgcccacctgcccccaatgacaacaacaccttggctgcccagcgtcataacgaggccctaaatggtctgcgccaggctccctcctcctaccctcccacctggcctcctggccctgcacaccacagctgccaccagtccaacagcaacgggcaccgtctatgccccacccacgtgtatgcagccccagaaggcaaggcacctgccaacagtccccggcagggcaactcaaagaatgttctgctggcatgtcctatgaacatgtacccgcatggacgcagtgggcgaacggtgcaggagatctgggaggatttctccatgagcttcacgcccgctgtgcgggaggtggtagagtttgccaaacacatcccgggcttccgtgacctttctcagcatgaccaagtcaccctgcttaaggctggcacctttgaggtgctgatggtgcgctttgcttcgttgttcaacgtgaaggaccagacagtgatgttcctaagccgcaccacctacagcctgcaggagcttggtgccatgggcatgggagacctgctcagtgccatgttcgacttcagcgagaagctcaactccctggcgcttaccgaggaggagctgggcctcttcaccgcggtggtgcttgtctctgcagaccgctcgggcatggagaattccgcttcggtggagcagctccaggagacgctgctgcgggctcttcgggctctggtgctgaagaaccggcccttggagacttcccgcttcaccaagctgctgctcaagctgccggacctgcggaccctgaacaacatgcattccgagaagctgctgtccttccgggtggacgcccagtgacccgcccggccggccttctgccgctgcccccttgtacagaatcgaactctgcacttctctctcctttacgagacgaaaaggaaaagcaaaccagaatcttatttatattgttataaaatattccaagatgagcctctggccccctgagccttcttgtaaatacctgcctccctcccccatcaccgaacttcccctcctcccctatttaaaccactctgtctcccccacaaccctcccctggccctctgatttgttctgttcctgtctcaaatccaatagttcacagctgagctggcttctgtggtgtgtgctcgtttggggggtggggtggaaatactgccaaggctggggggggccacctctccatctggtcagtttgtggggtgggtactctgccagcagatgggaggatatagggaaacagcacacaagtctaaggggggtgcccaagggggttattttcatcatatatttattacataaatatatagtaaaatagacgagcaacaattaccataaaaatatctttctttaaaatcctgacccaaaacacaacggggtgaaaaatcgcacataacagacatactgattgtcaacgtggggcaggagtaggagcccctcaagtcacccctgccggtcccacccctccctggggaagagacctacctccttccctgtttctggccacaacccccctccccccagcccagcaccagcttctcatacattcagtagcgcctctgggcagtgtccccctcccccccgcccaggagttcccagggcaggagttactgtcctccttatggacggtctctctctcacaacgccctgccctctcccagccctgcagacccgccaccaggagaaggggtaggggctcctcccccaccctccccaagtctgagcagggaggaggctggatgaggtatgtgtgttatgagtgatgggaggggcaatactgagatggagaggcgggtggtgggggcggggtagtggtcatggctctggcaaccccttgtcctggcctggccccctcgtcctattcccagcaacccgtcctcccaccgatactgcacctgctgctccaccctgcctgccctagtgccccgggccaatactgggggaggcatgctgagcacccacatcaaggccatccccctcattagcaccaatggcccccaggagagggccctgtcccccacttccacagcagggactgggacagctgccgctctagagcaggtgcgtggcactcctgagtcgccctggctcctcccctaccatgtgtactcactcacacattcacgcagaggaacgcacacatacaccccacatcaccgagggggaagggaggggtccggggaggatgggatcacagctcatatgattggggagggtgggggagtcccaagtgcctataagaggctaaggctcttcaaggccttttctctgccgtgtccatggctgagaatggggatggaggggttggggtggggatggagggatggggaagacagcagacaggtcaggaattccactgggcccccaggcgtggtaggaaggtacaagagggcctacccatgggactggagtaatacaggattcagtactccaggagagagagagaggatagagacaaagacagcgcgggcagcccgaggccccagcagggtgggacaggcacatgcacaggtgacagcgggtgctcctccaggccctccacccctgttggaacacctgaacgattggggaaggacagtgccctgacggcacctcctaatgaaaacggacgagctga

SEQ ID NO: 277383 - DNA, 3481 bp, Homo sapiens
cactggggcacgaggcgctccctgggatcacatggtacctgctccagtgccgcgtgcggcccgggaaccctgggctgctggcgcctgcgcagagccctctgtcccagggaaaggctcgggcaaaaggcggctgagattggcagagtgaaatattactgccgagggaacgtagcagggcacacgtctcgcctctttgcgactcggtgccccgtttctccccatcacctacttacttcctggttgcaacctctcttcctctgggacttttgcaccgggagctccagattcgccaccccgcagcgctgcggagccggcaggcagaggcaccccgtacactgcagagacccgaccctccttgctaccttctagccagaactactgcaggctgattccccctacacactctctctgctcttcccatgcaaagcagaactccgttgcctcaacgtccaacccttctgcagggctgcagtccggccaccccaagaccttgctgcagggtgcttcggatcctgatcgtgagtcgcggggtccactccccgcccttagccagtgcccagggggcaacagcggcgatcgcaacctctagtttgagtcaaggtccagtttgaatgaccgctctcagctggtgaagacatgacgaccctggactccaacaacaacacaggtggcgtcatcacctacattggctccagtggctcctccccaagccgcaccagccctgaatccctctatagtgacaactccaatggcagcttccagtccctgacccaaggctgtcccacctacttcccaccatcccccactggctccctcacccaagacccggctcgctcctttgggagcattccacccagcctgagtgatgacggctccccttcttcctcatcttcctcgtcgtcatcctcctcctccttctataatgggagcccccctgggagtctacaagtggccatggaggacagcagccgagtgtcccccagcaagagcaccagcaacatcaccaagctgaatggcatggtgttactgtgtaaagtgtgtggggacgttgcctcgggcttccactacggtgtgcacgcctgcgagggctgcaagggctttttccgtcggagcatccagcagaacatccagtacaaaaggtgtctgaagaatgagaattgctccatcgtccgcatcaatcgcaaccgctgccagcaatgtcgcttcaagaagtgtctctctgtgggcatgtctcgagacgctgtgcgttttgggcgcatccccaaacgagagaagcagcggatgcttgctgagatgcagagtgccatgaacctggccaacaaccagttgagcagccagtgcccgctggagacttcacccacccagcaccccaccccaggccccatgggcccctcgccaccccctgctccggtcccctcacccctggtgggcttctcccagtttccacaacagctgacgcctcccagatccccaagccctgagcccacagtggaggatgtgatatcccaggtggcccgggcccatcgagagatcttcacctacgcccatgacaagctgggcagctcacctggcaacttcaatgccaaccatgcatcaggtagccctccagccaccaccccacatcgctgggaaaatcagggctgcccacctgcccccaatgacaacaacaccttggctgcccagcgtcataacgaggccctaaatggtctgcgccaggctccctcctcctaccctcccacctggcctcctggccctgcacaccacagctgccaccagtccaacagcaacgggcaccgtctatgccccacccacgtgtatgcagccccagaaggcaaggcacctgccaacagtccccggcagggcaactcaaagaatgttctgctggcatgtcctatgaacatgtacccgcatggacgcagtgggcgaacggtgcaggagatctgggaggatttctccatgagcttcacgcccgctgtgcgggaggtggtagagtttgccaaacacatcccgggcttccgtgacctttctcagcatgaccaagtcaccctgcttaaggctggcacctttgaggtgctgatggtgcgctttgcttcgttgttcaacgtgaaggaccagacagtgatgttcctaagccgcaccacctacagcctgcaggagcttggtgccatgggcatgggagacctgctcagtgccatgttcgacttcagcgagaagctcaactccctggcgcttaccgaggaggagctgggcctcttcaccgcggtggtgcttgtctctgcagaccgctcgggcatggagaattccgcttcggtggagcagctccaggagacgctgctgcgggctcttcgggctctggtgctgaagaaccggcccttggagacttcccgcttcaccaagctgctgctcaagctgccggacctgcggaccctgaacaacatgcattccgagaagctgctgtccttccgggtggacgcccagtgacccgcccggccggccttctgccgctgcccccttgtacagaatcgaactctgcacttctctctcctttacgagacgaaaaggaaaagcaaaccagaatcttatttatattgttataaaatattccaagatgagcctctggccccctgagccttcttgtaaatacctgcctccctcccccatcaccgaacttcccctcctcccctatttaaaccactctgtctcccccacaaccctcccctggccctctgatttgttctgttcctgtctcaaatccaatagttcacagctgagctggcttctgtggtgtgtgctcgtttggggggtggggtggaaatactgccaaggctggggggggccacctctccatctggtcagtttgtggggtgggtactctgccagcagatgggaggatatagggaaacagcacacaagtctaaggggggtgcccaagggggttattttcatcatatatttattacataaatatatagtaaaatagacgagcaacaattaccataaaaatatctttctttaaaatcctgacccaaaacacaacggggtgaaaaatcgcacataacagacatactgattgtcaacgtggggcaggagtaggagcccctcaagtcacccctgccggtcccacccctccctggggaagagacctacctccttccctgtttctggccacaacccccctccccccagcccagcaccagcttctcatacattcagtagcgcctctgggcagtgtccccctcccccccgcccaggagttcccagggcaggagttactgtcctccttatggacggtctctctctcacaacgccctgccctctcccagccctgcagacccgccaccaggagaaaaggccttgaagagccttagcctcttataggcacttgggactcccccaccctccccaatcataggagcccctaccccttctcctgcagacccgccgccaggagcctcggccgataaccccggcctctacctgg

SEQ ID NO: 277384 - DNA, 4247 bp, Homo sapiens
cactggggcacgaggcgctccctgggatcacatggtacctgctccagtgccgcgtgcggcccgggaaccctgggctgctggcgcctgcgcagagccctctgtcccagggaaaggctcgggcaaaaggcggctgagattggcagagtgaaatattactgccgagggaacgtagcagggcacacgtctcgcctctttgcgactcggtgccccgtttctccccatcacctacttacttcctggttgcaacctctcttcctctgggacttttgcaccgggagctccagattcgccaccccgcagcgctgcggagccggcaggcagaggcaccccgtacactgcagagacccgaccctccttgctaccttctagccagaactactgcaggctgattccccctacacactctctctgctcttcccatgcaaagcagaactccgttgcctcaacgtccaacccttctgcagggctgcagtccggccaccccaagaccttgctgcagggtgcttcggatcctgatcgtgagtcgcggggtccactccccgcccttagccagtgcccagggggcaacagcggcgatcgcaacctctagtttgagtcaaggtccagtttgaatgaccgctctcagctggtgaagacatgacgaccctggactccaacaacaacacaggtggcgtcatcacctacattggctccagtggctcctccccaagccgcaccagccctgaatccctctatagtgacaactccaatggcagcttccagtccctgacccaaggctgtcccacctacttcccaccatcccccctgggagtctacaagtggccatggaggacagcagccgagtgtcccccagcaagagcaccagcaacatcaccaagctgaatggcatggtgttactgtgtaaagtgtgtggggacgttgcctcgggcttccactacggtgtgcacgcctgcgagggctgcaagggctttttccgtcggagcatccagcagaacatccagtacaaaaggtgtctgaagaatgagaattgctccatcgtccgcatcaatcgcaaccgctgccagcaatgtcgcttcaagaagtgtctctctgtgggcatgtctcgagacgctgtgcgttttgggcgcatccccaaacgagagaagcagcggatgcttgctgagatgcagagtgccatgaacctggccaacaaccagttgagcagccagtgcccgctggagacttcacccacccagcaccccaccccaggccccatgggcccctcgccaccccctgctccggtcccctcacccctggtgggcttctcccagtttccacaacagctgacgcctcccagatccccaagccctgagcccacagtggaggatgtgatatcccaggtggcccgggcccatcgagagatcttcacctacgcccatgacaagctgggcagctcacctggcaacttcaatgccaaccatgcatcaggtagccctccagccaccaccccacatcgctgggaaaatcagggctgcccacctgcccccaatgacaacaacaccttggctgcccagcgtcataacgaggccctaaatggtctgcgccaggctccctcctcctaccctcccacctggcctcctggccctgcacaccacagctgccaccagtccaacagcaacgggcaccgtctatgccccacccacgtgtatgcagccccagaaggcaaggcacctgccaacagtccccggcagggcaactcaaagaatgttctgctggcatgtcctatgaacatgtacccgcatggacgcagtgggcgaacggtgcaggagatctgggaggatttctccatgagcttcacgcccgctgtgcgggaggtggtagagtttgccaaacacatcccgggcttccgtgacctttctcagcatgaccaagtcaccctgcttaaggctggcacctttgaggtgctgatggtgcgctttgcttcgttgttcaacgtgaaggaccagacagtgatgttcctaagccgcaccacctacagcctgcaggagcttggtgccatgggcatgggagacctgctcagtgccatgttcgacttcagcgagaagctcaactccctggcgcttaccgaggaggagctgggcctcttcaccgcggtggtgcttgtctctgcagaccgctcgggcatggagaattccgcttcggtggagcagctccaggagacgctgctgcgggctcttcgggctctggtgctgaagaaccggcccttggagacttcccgcttcaccaagctgctgctcaagctgccggacctgcggaccctgaacaacatgcattccgagaagctgctgtccttccgggtggacgcccagtgacccgcccggccggccttctgccgctgcccccttgtacagaatcgaactctgcacttctctctcctttacgagacgaaaaggaaaagcaaaccagaatcttatttatattgttataaaatattccaagatgagcctctggccccctgagccttcttgtaaatacctgcctccctcccccatcaccgaacttcccctcctcccctatttaaaccactctgtctcccccacaaccctcccctggccctctgatttgttctgttcctgtctcaaatccaatagttcacagctgagctggcttctgtggtgtgtgctcgtttggggggtggggtggaaatactgccaaggctggggggggccacctctccatctggtcagtttgtggggtgggtactctgccagcagatgggaggatatagggaaacagcacacaagtctaaggggggtgcccaagggggttattttcatcatatatttattacataaatatatagtaaaatagacgagcaacaattaccataaaaatatctttctttaaaatcctgacccaaaacacaacggggtgaaaaatcgcacataacagacatactgattgtcaacgtggggcaggagtaggagcccctcaagtcacccctgccggtcccacccctccctggggaagagacctacctccttccctgtttctggccacaacccccctccccccagcccagcaccagcttctcatacattcagtagcgcctctgggcagtgtccccctcccccccgcccaggagttcccagggcaggagttactgtcctccttatggacggtctctctctcacaacgccctgccctctcccagccctgcagacccgccaccaggagaaggggtaggggctcctcccccaccctccccaagtctgagcagggaggaggctggatgaggtatgtgtgttatgagtgatgggaggggcaatactgagatggagaggcgggtggtgggggcggggtagtggtcatggctctggcaaccccttgtcctggcctggccccctcgtcctattcccagcaacccgtcctcccaccgatactgcacctgctgctccaccctgcctgccctagtgccccgggccaatactgggggaggcatgctgagcacccacatcaaggccatccccctcattagcaccaatggcccccaggagagggccctgtcccccacttccacagcagggactgggacagctgccgctctagagcaggtgcgtggcactcctgagtcgccctggctcctcccctaccatgtgtactcactcacacattcacgcagaggaacgcacacatacaccccacatcaccgagggggaagggaggggtccggggaggatgggatcacagctcatatgattggggagggtgggggagtcccaagtgcctataagaggctaaggctcttcaaggccttttctctgccgtgtccatggctgagaatggggatggaggggttggggtggggatggagggatggggaagacagcagacaggtcaggaattccactgggcccccaggcgtggtaggaaggtacaagagggcctacccatgggactggagtaatacaggattcagtactccaggagagagagagaggatagagacaaagacagcgcgggcagcccgaggccccagcagggtgggacaggcacatgcacaggtgacagcgggtgctcctccaggccctccacccctgttggaacacctgaacgattggggaaggacagtgccctgacgggcagcatagcattgccttcccatgtccgtgtgtgcatgtccgtgtgtgtgtgtgtgtgtgtgtgttacttttacaatcaggaaaacatatttaataacatatagtcaagaaaacagacttaaaaat

SEQ ID NO: 277385 - DNA, 3522 bp, Homo sapiens
cactggggcacgaggcgctccctgggatcacatggtacctgctccagtgccgcgtgcggcccgggaaccctgggctgctggcgcctgcgcagagccctctgtcccagggaaaggctcgggcaaaaggcggctgagattggcagagtgaaatattactgccgagggaacgtagcagggcacacgtctcgcctctttgcgactcggtgccccgtttctccccatcacctacttacttcctggttgcaacctctcttcctctgggacttttgcaccgggagctccagattcgccaccccgcagcgctgcggagccggcaggcagaggcaccccgtacactgcagagacccgaccctccttgctaccttctagccagaactactgcaggctgattccccctacacactctctctgctcttcccatgcaaagcagaactccgttgcctcaacgtccaacccttctgcagggctgcagtccggccaccccaagaccttgctgcagggtgcttcggatcctgatcgtgagtcgcggggtccactccccgcccttagccagtgcccagggggcaacagcggcgatcgcaacctctagtttgagtcaaggtccagtttgaatgaccgctctcagctggtgaagacatgacgaccctggactccaacaacaacacaggtggcgtcatcacctacattggctccagtggctcctccccaagccgcaccagccctgaatccctctatagtgacaactccaatggcagcttccagtccctgacccaaggctgtcccacctacttcccaccatcccccactggctccctcacccaagacccggctcgctcctttgggagcattccacccagcctgagtgatgacggctccccttcttcctcatcttcctcgtcgtcatcctcctcctccttctataatgggagcccccctgggagtctacaagtggccatggaggacagcagccgagtgtcccccagcaagagcaccagcaacatcaccaagctgaatggcatggtgttactgtgtaaagtgtgtggggacgttgcctcgggcttccactacggtgtgcacgcctgcgagggctgcaagggctttttccgtcggagcatccagcagaacatccagtacaaaaggtgtctgaagaatgagaattgctccatcgtccgcatcaatcgcaaccgctgccagcaatgtcgcttcaagaagtgtctctctgtgggcatgtctcgagacgctgtgcgttttgggcgcatccccaaacgagagaagcagcggatgcttgctgagatgcagagtgccatgaacctggccaacaaccagttgagcagccagtgcccgctggagacttcacccacccagcaccccaccccaggccccatgggcccctcgccaccccctgctccggtcccctcacccctggtgggcttctcccagtttccacaacagctgacgcctcccagatccccaagccctgagcccacagtggaggatgtgatatcccaggtggcccgggcccatcgagagatcttcaccaagctgctgctcaagctgccggacctgcggaccctgaacaacatgcattccgagaagctgctgtccttccgggtggacgcccagtgacccgcccggccggccttctgccgctgcccccttgtacagaatcgaactctgcacttctctctcctttacgagacgaaaaggaaaagcaaaccagaatcttatttatattgttataaaatattccaagatgagcctctggccccctgagccttcttgtaaatacctgcctccctcccccatcaccgaacttcccctcctcccctatttaaaccactctgtctcccccacaaccctcccctggccctctgatttgttctgttcctgtctcaaatccaatagttcacagctgagctggcttctgtggtgtgtgctcgtttggggggtggggtggaaatactgccaaggctggggggggccacctctccatctggtcagtttgtggggtgggtactctgccagcagatgggaggatatagggaaacagcacacaagtctaaggggggtgcccaagggggttattttcatcatatatttattacataaatatatagtaaaatagacgagcaacaattaccataaaaatatctttctttaaaatcctgacccaaaacacaacggggtgaaaaatcgcacataacagacatactgattgtcaacgtggggcaggagtaggagcccctcaagtcacccctgccggtcccacccctccctggggaagagacctacctccttccctgtttctggccacaacccccctccccccagcccagcaccagcttctcatacattcagtagcgcctctgggcagtgtccccctcccccccgcccaggagttcccagggcaggagttactgtcctccttatggacggtctctctctcacaacgccctgccctctcccagccctgcagacccgccaccaggagaaggggtaggggctcctcccccaccctccccaagtctgagcagggaggaggctggatgaggtatgtgtgttatgagtgatgggaggggcaatactgagatggagaggcgggtggtgggggcggggtagtggtcatggctctggcaaccccttgtcctggcctggccccctcgtcctattcccagcaacccgtcctcccaccgatactgcacctgctgctccaccctgcctgccctagtgccccgggccaatactgggggaggcatgctgagcacccacatcaaggccatccccctcattagcaccaatggcccccaggagagggccctgtcccccacttccacagcagggactgggacagctgccgctctagagcaggtgcgtggcactcctgagtcgccctggctcctcccctaccatgtgtactcactcacacattcacgcagaggaacgcacacatacaccccacatcaccgagggggaagggaggggtccggggaggatgggatcacagctcatatgattggggagggtgggggagtcccaagtgcctataagaggctaaggctcttcaaggccttttctctgccgtgtccatggctgagaatggggatggaggggttggggtggggatggagggatggggaagacagcagacaggtcaggaattccactgggcccccaggcgtggtaggaaggtacaagagggcctacccatgggactggagtaatacaggattcagtactccaggagagagagagaggatagagacaaagacagcgcgggcagcccgaggccccagcagggtgggacaggcacatgcacaggtgacagcgggtgctcctccaggccctccacccctgttggaacacctgaacgattggggaaggacagtgccctgacgggcagcatagcattgccttcccatgtccgtgtgtgcatgtccgtgtgtgtgtgtgtgtgtgtgtgttacttttacaatcaggaaaacatatttaataacatatagtcaagaaaacagacttaaaaat

SEQ ID NO: 277386 - DNA, 2612 bp, Homo sapiens
cactggggcacgaggcgctccctgggatcacatggtacctgctccagtgccgcgtgcggcccgggaaccctgggctgctggcgcctgcgcagagccctctgtcccagggaaaggctcgggcaaaaggcggctgagattggcagagtgaaatattactgccgagggaacgtagcagggcacacgtctcgcctctttgcgactcggtgccccgtttctccccatcacctacttacttcctggttgcaacctctcttcctctgggacttttgcaccgggagctccagattcgccaccccgcagcgctgcggagccggcaggcagaggcaccccgtacactgcagagacccgaccctccttgctaccttctagccagaactactgcaggctgattccccctacacactctctctgctcttcccatgcaaagcagaactccgttgcctcaacgtccaacccttctgcagggctgcagtccggccaccccaagaccttgctgcagggtgcttcggatcctgatcgtgagtcgcggggtccactccccgcccttagccagtgcccagggggcaacagcggcgatcgcaacctctagtttgagtcaaggtccagtttgaatgaccgctctcagctggtgaagacatgacgaccctggactccaacaacaacacaggtggcgtcatcacctacattggctccagtggctcctccccaagccgcaccagccctgaatccctctatagtgacaactccaatggcagcttccagtccctgacccaaggctgtcccacctacttcccaccatcccccactggctccctcacccaagacccggctcgctcctttgggagcattccacccagcctgagtgatgacggctccccttcttcctcatcttcctcgtcgtcatcctcctcctccttctataatgggagcccccctgggagtctacaagtggccatggaggacagcagccgagtgtcccccagcaagagcaccagcaacatcaccaagctgaatggcatggtgttactgtgtaaagtgtgtggggacgttgcctcgggcttccactacggtgtgcacgcctgcgagggctgcaagggctttttccgtcggagcatccagcagaacatccagtacaaaaggtgtctgaagaatgagaattgctccatcgtccgcatcaatcgcaaccgctgccagcaatgtcgcttcaagaagtgtctctctgtgggcatgtctcgagacgctgtgcgttttgggcgcatccccaaacgagagaagcagcggatgcttgctgagatgcagagtgccatgaacctggccaacaaccagttgagcagccagtgcccgctggagacttcacccacccagcaccccaccccaggccccatgggcccctcgccaccccctgctccggtcccctcacccctggtgggcttctcccagtttccacaacagctgacgcctcccagatccccaagccctgagcccacagtggaggatgtgatatcccaggtggcccgggcccatcgagagatcttcacctacgcccatgacaagctgggcagctcacctggcaacttcaatgccaaccatgcatcaggtagccctccagccaccaccccacatcgctgggaaaatcagggctgcccacctgcccccaatgacaacaacaccttggctgcccagcgtcataacgaggccctaaatggtctgcgccaggctccctcctcctaccctcccacctggcctcctggccctgcacaccacagctgccaccagtccaacagcaacgggcaccgtctatgccccacccacgtgtatgcagccccagaaggcaaggcacctgccaacagtccccggcagggcaactcaaagaatgttctgctggcatgtcctatgaacatgtacccgcatggacgcagtgggcgaacggtgcaggagatctgggaggatttctccatgagcttcacgcccgctgtgcgggaggtggtagagtttgccaaacacatcccgggcttccgtgacctttctcagcatgaccaagtcaccctgcttaaggctggcacctttgaggtgctgatggtgcgctttgcttcgttgttcaacgtgaaggaccagacagtgatgttcctaagccgcaccacctacagcctgcaggagcttggtgccatgggcatgggagacctgctcagtgccatgttcgacttcagcgagaagctcaactccctggcgcttaccgaggaggagctgggcctcttcaccgcggtggtgcttgtctctgcagaccgctcgggcatggagaattccgcttcggtggagcagctccaggagacgctgctgcgggctcttcgggctctggtgctgaagaaccggcccttggagacttcccgcttcaccaagctgctgctcaagctgccggacctgcggaccctgaacaacatgcattccgagaagctgctgtccttccgggtggacgcccagtgacccgcccggccggccttctgccgctgcccccttgtacagaatcgaactctgcacttctctctcctttacgagacgaaaaggaaaagcaaaccagaatcttatttatattgttataaaatattccaagatga

SEQ ID NO: 277387 - DNA, 1847 bp, Homo sapiens
tgcaggcctcgcccccagtagagcctcaaagtcaaagctcagcatgttcagggttgtaggtctagaggaaagcaccagtagggtcttcatcctcagcaaccatgaggtccacacctgcctccctcccccatcaccgaacttcccctcctcccctatttaaaccactctgtctcccccacaaccctcccctggccctctgatttgttctgttcctgtctcaaatccaatagttcacagctgagctggcttctgtggtgtgtgctcgtttggggggtggggtggaaatactgccaaggctggggggggccacctctccatctggtcagtttgtggggtgggtactctgccagcagatgggaggatatagggaaacagcacacaagtctaaggggggtgcccaagggggttattttcatcatatatttattacataaatatatagtaaaatagacgagcaacaattaccataaaaatatctttctttaaaatcctgacccaaaacacaacggggtgaaaaatcgcacataacagacatactgattgtcaacgtggggcaggagtaggagcccctcaagtcacccctgccggtcccacccctccctggggaagagacctacctccttccctgtttctggccacaacccccctccccccagcccagcaccagcttctcatacattcagtagcgcctctgggcagtgtccccctcccccccgcccaggagttcccagggcaggagttactgtcctccttatggacggtctctctctcacaacgccctgccctctcccagccctgcagacccgccaccaggagaaggggtaggggctcctcccccaccctccccaagtctgagcagggaggaggctggatgaggtatgtgtgttatgagtgatgggaggggcaatactgagatggagaggcgggtggtgggggcggggtagtggtcatggctctggcaaccccttgtcctggcctggccccctcgtcctattcccagcaacccgtcctcccaccgatactgcacctgctgctccaccctgcctgccctagtgccccgggccaatactgggggaggcatgctgagcacccacatcaaggccatccccctcattagcaccaatggcccccaggagagggccctgtcccccacttccacagcagggactgggacagctgccgctctagagcaggtgcgtggcactcctgagtcgccctggctcctcccctaccatgtgtactcactcacacattcacgcagaggaacgcacacatacaccccacatcaccgagggggaagggaggggtccggggaggatgggatcacagctcatatgattggggagggtgggggagtcccaagtgcctataagaggctaaggctcttcaaggccttttctctgccgtgtccatggctgagaatggggatggaggggttggggtggggatggagggatggggaagacagcagacaggtcaggaattccactgggcccccaggcgtggtaggaaggtacaagagggcctacccatgggactggagtaatacaggattcagtactccaggagagagagagaggatagagacaaagacagcgcgggcagcccgaggccccagcagggtgggacaggcacatgcacaggtgacagcgggtgctcctccaggccctccacccctgttggaacacctgaacgattggggaaggacagtgccctgacgggcagcatagcattgccttcccatgtccgtgtgtgcatgtccgtgtgtgtgtgtgtgtgtgtgtgttacttttacaatcaggaaaacatatttaataacatatagtcaagaaaacagacttaaaaat

SEQ ID NO: 277388 - DNA, 2352 bp, Homo sapiens
aggatccaacagaaagccctgctgtctggggtgggcaggacctctgaaaggttttggaacccagtatctttgtccttatagcctgattggtgaaaggggctgagcggctcctgctgcttcctcttgatggctgggacttctgtcatctcagctggaatttaatcacaacccattacactgaaataatgccttgggtgcactgctgcccccattctagacaagagcagattaactttggtgaatgccttgcccaaggtcacaggtagtgacaaagctgacactcagattcaggcttattggatcccaaagccatccttccacctgggctccctcattggccattcagaaacaacccccactctactgagaaatcgaaggcagcaccgctaaaccctctggcaaactacaggggcgatttggtcagtgctcctcccaccacacccaggatgactgttccccttccctcctaggtgctgatggtgcgctttgcttcgttgttcaacgtgaaggaccagacagtgatgttcctaagccgcaccacctacagcctgcaggagcttggtgccatgggcatgggagacctgctcagtgccatgttcgacttcagcgagaagctcaactccctggcgcttaccgaggaggagctgggcctcttcaccgcggtggtgcttgtctctgcaggtaggtcaggctctcgcctgaccgggggaggaggcagacgcagttcaattcaacacaccttttatggagtacctactctatgccaggccctgcaccgggcactggggatacagacatgattcagacacagtctagcttgggaaacagactcatgcccgactaattataaaacagtgagataagtgtcacagtagaagcatgaaccaaggaagcacagacaactatttctgcctgggggagctggggaaggaggtgacacttgagttggggcctcaaaggacaagtaagatgttgccaggcagagaaagggggaagggcatcccaggcagagggaactacacagcaaaaagcaagggagtctggccatgtttggcctgctgaggaagggaaggtggtcttacgggatgggaggtgaccagccctgctgagcccacgctcccagctttcaggcacctcctgctcttggggcagaggcctgggagaaggtatggcactccttctccttccccatcggccttctggggggcttcagggagaggctgcattgcctgccaggtcctcgcagacctccggttcctcctcagaggagctcggggagtccgcctcactgctgtcgtcttccccacagaccgctcgggcatggagaattccgcttcggtggagcagctccaggagacgctgctgcgggctcttcgggctctggtgctgaagaaccggcccttggagacttcccgcttcaccaagctgctgctcaagctgccggacctgcggaccctgaacaacatgcattccgagaagctgctgtccttccgggtggacgcccagtgacccgcccggccggccttctgccgctgcccccttgtacagaatcgaactctgcacttctctctcctttacgagacgaaaaggaaaagcaaaccagaatcttatttatattgttataaaatattccaagatgagcctctggccccctgagccttcttgtaaatacctgcctccctcccccatcaccgaacttcccctcctcccctatttaaaccactctgtctcccccacaaccctcccctggccctctgatttgttctgttcctgtctcaaatccaatagttcacagctgagctggcttctgtggtgtgtgctcgtttggggggtggggtggaaatactgccaaggctggggggggccacctctccatctggtcagtttgtggggtgggtactctgccagcagatgggaggatatagggaaacagcacacaagtctaaggggggtgcccaagggggttattttcatcatatatttattacataaatatatagtaaaatagacgagcaacaattaccataaaaatatctttctttaaaatcctgacccaaaacacaacggggtgttctctccaggctcctccccacactccgcacaccctctggccgcctgaggctttagacttcctgatcctcaaagacctcgaggaagagtggggggaagagttcggtggggcactcgactttcatgtggaggaagcggctggcgtggcaggccccgatcatgcggaggtcagtcaccttcatcagcagcttgggccagaagtgcggaatgttgtgtttgcggtggttgacgtagtgctcgaacgccagcaggtacgcctcctgactcttctcgatcttgtcc

SEQ ID NO: 277389 - DNA, 4377 bp, Homo sapiens
cactggggcacgaggcgctccctgggatcacatggtacctgctccagtgccgcgtgcggcccgggaaccctgggctgctggcgcctgcgcagagccctctgtcccagggaaaggctcgggcaaaaggcggctgagattggcagagtgaaatattactgccgagggaacgtagcagggcacacgtctcgcctctttgcgactcggtgccccgtttctccccatcacctacttacttcctggttgcaacctctcttcctctgggacttttgcaccgggagctccagattcgccaccccgcagcgctgcggagccggcaggcagaggcaccccgtacactgcagagacccgaccctccttgctaccttctagccagaactactgcaggctgattccccctacacactctctctgctcttcccatgcaaagcagaactccgttgcctcaacgtccaacccttctgcagggctgcagtccggccaccccaagaccttgctgcagggtgcttcggatcctgatcgtgagtcgcggggtccactccccgcccttagccagtgcccagggggcaacagcggcgatcgcaacctctagtttgagtcaaggtccagtttgaatgaccgctctcagctggtgaagacatgacgaccctggactccaacaacaacacaggtggcgtcatcacctacattggctccagtggctcctccccaagccgcaccagccctgaatccctctatagtgacaactccaatggcagcttccagtccctgacccaaggctgtcccacctacttcccaccatcccccactggctccctcacccaagacccggctcgctcctttgggagcattccacccagcctgagtgatgacggctccccttcttcctcatcttcctcgtcgtcatcctcctcctccttctataatgggagcccccctgggagtctacaagtggccatggaggacagcagccgagtgtcccccagcaagagcaccagcaacatcaccaagctgaatggcatggtgttactgtgtaaagtgtgtggggacgttgcctcgggcttccactacggtgtgcacgcctgcgagggctgcaagggctttttccgtcggagcatccagcagaacatccagtacaaaaggtgtctgaagaatgagaattgctccatcgtccgcatcaatcgcaaccgctgccagcaatgtcgcttcaagaagtgtctctctgtgggcatgtctcgagacgctgtgcgttttgggcgcatccccaaacgagagaagcagcggatgcttgctgagatgcagagtgccatgaacctggccaacaaccagttgagcagccagtgcccgctggagacttcacccacccagcaccccaccccaggccccatgggcccctcgccaccccctgctccggtcccctcacccctggtgggcttctcccagtttccacaacagctgacgcctcccagatccccaagccctgagcccacagtggaggatgtgatatcccaggtggcccgggcccatcgagagatcttcacctacgcccatgacaagctgggcagctcacctggcaacttcaatgccaaccatgcatcaggtagccctccagccaccaccccacatcgctgggaaaatcagggctgcccacctgcccccaatgacaacaacaccttggctgcccagcgtcataacgaggccctaaatggtctgcgccaggctccctcctcctaccctcccacctggcctcctggccctgcacaccacagctgccaccagtccaacagcaacgggcaccgtctatgccccacccacgtgtatgcagccccagaaggcaaggcacctgccaacagtccccggcagggcaactcaaagaatgttctgctggcatgtcctatgaacatgtacccgcatggacgcagtgggcgaacggtgcaggagatctgggaggatttctccatgagcttcacgcccgctgtgcgggaggtggtagagtttgccaaacacatcccgggcttccgtgacctttctcagcatgaccaagtcaccctgcttaaggctggcacctttgaggtgctgatggtgcgctttgcttcgttgttcaacgtgaaggaccagacagtgatgttcctaagccgcaccacctacagcctgcaggagcttggtgccatgggcatgggagacctgctcagtgccatgttcgacttcagcgagaagctcaactccctggcgcttaccgaggaggagctgggcctcttcaccgcggtggtgcttgtctctgcagaccgctcgggcatggagaattccgcttcggtggagcagctccaggagacgctgctgcgggctcttcgggctctggtgctgaagaaccggcccttggagacttcccgcttcaccaagctgctgctcaagctgccggacctgcggaccctgaacaacatgcattccgagaagctgctgtccttccgggtggacgcccagtgacccgcccggccggccttctgccgctgcccccttgtacagaatcgaactctgcacttctctctcctttacgagacgaaaaggaaaagcaaaccagaatcttatttatattgttataaaatattccaagatgagcctctggccccctgagccttcttgtaaatacctgcctccctcccccatcaccgaacttcccctcctcccctatttaaaccactctgtctcccccacaaccctcccctggccctctgatttgttctgttcctgtctcaaatccaatagttcacagctgagctggcttctgtggtgtgtgctcgtttggggggtggggtggaaatactgccaaggctggggggggccacctctccatctggtcagtttgtggggtgggtactctgccagcagatgggaggatatagggaaacagcacacaagtctaaggggggtgcccaagggggttattttcatcatatatttattacataaatatatagtaaaatagacgagcaacaattaccataaaaatatctttctttaaaatcctgacccaaaacacaacggggtgaaaaatcgcacataacagacatactgattgtcaacgtggggcaggagtaggagcccctcaagtcacccctgccggtcccacccctccctggggaagagacctacctccttccctgtttctggccacaacccccctccccccagcccagcaccagcttctcatacattcagtagcgcctctgggcagtgtccccctcccccccgcccaggagttcccagggcaggagttactgtcctccttatggacggtctctctctcacaacgccctgccctctcccagccctgcagacccgccaccaggagaaggggtaggggctcctcccccaccctccccaagtctgagcagggaggaggctggatgaggtatgtgtgttatgagtgatgggaggggcaatactgagatggagaggcgggtggtgggggcggggtagtggtcatggctctggcaaccccttgtcctggcctggccccctcgtcctattcccagcaacccgtcctcccaccgatactgcacctgctgctccaccctgcctgccctagtgccccgggccaatactgggggaggcatgctgagcacccacatcaaggccatccccctcattagcaccaatggcccccaggagagggccctgtcccccacttccacagcagggactgggacagctgccgctctagagcaggtgcgtggcactcctgagtcgccctggctcctcccctaccatgtgtactcactcacacattcacgcagaggaacgcacacatacaccccacatcaccgagggggaagggaggggtccggggaggatgggatcacagctcatatgattggggagggtgggggagtcccaagtgcctataagaggctaaggctcttcaaggccttttctctgccgtgtccatggctgagaatggggatggaggggttggggtggggatggagggatggggaagacagcagacaggtcaggaattccactgggcccccaggcgtggtaggaaggtacaagagggcctacccatgggactggagtaatacaggattcagtactccaggagagagagagaggatagagacaaagacagcgcgggcagcccgaggccccagcagggtgggacaggcacatgcacaggtgacagcgggtgctcctccaggccctccacccctgttggaacacctgaacgattggggaaggacagtgccctgacgggcagcatagcattgccttcccatgtccgtgtgtgcatgtccgtgtgtgtgtgtgtgtgtgtgtgttacttttacaatcaggaaaacatatttaataacatatagtcaagaaaacagacttaaaaat

SEQ ID NO: 277390 - DNA, 5005 bp, Homo sapiens
cactggggcacgaggcgctccctgggatcacatggtacctgctccagtgccgcgtgcggcccgggaaccctgggctgctggcgcctgcgcagagccctctgtcccagggaaaggctcgggcaaaaggcggctgagattggcagagtgaaatattactgccgagggaacgtagcagggcacacgtctcgcctctttgcgactcggtgccccgtttctccccatcacctacttacttcctggttgcaacctctcttcctctgggacttttgcaccgggagctccagattcgccaccccgcagcgctgcggagccggcaggcagaggcaccccgtacactgcagagacccgaccctccttgctaccttctagccagaactactgcaggctgattccccctacacactctctctgctcttcccatgcaaagcagaactccgttgcctcaacgtccaacccttctgcagggctgcagtccggccaccccaagaccttgctgcagggtgcttcggatcctgatcgtgagtcgcggggtccactccccgcccttagccagtgcccagggggcaacagcggcgatcgcaacctctagtttgagtcaaggtccagtttgaatgaccgctctcagctggtgaagacatgacgaccctggactccaacaacaacacaggtggcgtcatcacctacattggctccagtggctcctccccaagccgcaccagccctgaatccctctatagtgacaactccaatggcagcttccagtccctgacccaaggctgtcccacctacttcccaccatcccccactggctccctcacccaagacccggctcgctcctttgggagcattccacccagcctgagtgatgacggctccccttcttcctcatcttcctcgtcgtcatcctcctcctccttctataatgggagcccccctgggagtctacaagtggccatggaggacagcagccgagtgtcccccagcaagagcaccagcaacatcaccaagctgaatggcatggtgttactgtgtaaagtgtgtggggacgttgcctcgggcttccactacggtgtgcacgcctgcgagggctgcaagggctttttccgtcggagcatccagcagaacatccagtacaaaaggtgtctgaagaatgagaattgctccatcgtccgcatcaatcgcaaccgctgccagcaatgtcgcttcaagaagtgtctctctgtgggcatgtctcgagacgctgtgcgttttgggcgcatccccaaacgagagaagcagcggatgcttgctgagatgcagagtgccatgaacctggccaacaaccagttgagcagccagtgcccgctggagacttcacccacccagcaccccaccccaggccccatgggcccctcgccaccccctgctccggtcccctcacccctggtgggcttctcccagtttccacaacagctgacgcctcccagatccccaagccctgagcccacagtggaggatgtgatatcccaggtggcccgggcccatcgagagatcttcacctacgcccatgacaagctgggcagctcacctggcaacttcaatgccaaccatgcatcaggtagccctccagccaccaccccacatcgctgggaaaatcagggctgcccacctgcccccaatgacaacaacaccttggctgcccagcgtcataacgaggccctaaatggtctgcgccaggctccctcctcctaccctcccacctggcctcctggccctgcacaccacagctgccaccagtccaacagcaacgggcaccgtctatgccccacccacgtgtatgcagccccagaaggcaaggcacctgccaacagtccccggcagggcaactcaaagaatgttctgctggcatgtcctatgaacatgtacccgcatggacgcagtgggcgaacggtgcaggagatctgggaggatttctccatgagcttcacgcccgctgtgcgggaggtggtagagtttgccaaacacatcccgggcttccgtgacctttctcagcatgaccaagtcaccctgcttaaggctggcacctttgaggtgctgatggtgcgctttgcttcgttgttcaacgtgaaggaccagacagtgatgttcctaagccgcaccacctacagcctgcaggagcttggtgccatgggcatgggagacctgctcagtgccatgttcgacttcagcgagaagctcaactccctggcgcttaccgaggaggagctgggcctcttcaccgcggtggtgcttgtctctgcaggtaggtcaggctctcgcctgaccgggggaggaggcagacgcagttcaattcaacacaccttttatggagtacctactctatgccaggccctgcaccgggcactggggatacagacatgattcagacacagtctagcttgggaaacagactcatgcccgactaattataaaacagtgagataagtgtcacagtagaagcatgaaccaaggaagcacagacaactatttctgcctgggggagctggggaaggaggtgacacttgagttggggcctcaaaggacaagtaagatgttgccaggcagagaaagggggaagggcatcccaggcagagggaactacacagcaaaaagcaagggagtctggccatgtttggcctgctgaggaagggaaggtggtcttacgggatgggaggtgaccagccctgctgagcccacgctcccagctttcaggcacctcctgctcttggggcagaggcctgggagaaggtatggcactccttctccttccccatcggccttctggggggcttcagggagaggctgcattgcctgccaggtcctcgcagacctccggttcctcctcagaggagctcggggagtccgcctcactgctgtcgtcttccccacagaccgctcgggcatggagaattccgcttcggtggagcagctccaggagacgctgctgcgggctcttcgggctctggtgctgaagaaccggcccttggagacttcccgcttcaccaagctgctgctcaagctgccggacctgcggaccctgaacaacatgcattccgagaagctgctgtccttccgggtggacgcccagtgacccgcccggccggccttctgccgctgcccccttgtacagaatcgaactctgcacttctctctcctttacgagacgaaaaggaaaagcaaaccagaatcttatttatattgttataaaatattccaagatgagcctctggccccctgagccttcttgtaaatacctgcctccctcccccatcaccgaacttcccctcctcccctatttaaaccactctgtctcccccacaaccctcccctggccctctgatttgttctgttcctgtctcaaatccaatagttcacagctgagctggcttctgtggtgtgtgctcgtttggggggtggggtggaaatactgccaaggctggggggggccacctctccatctggtcagtttgtggggtgggtactctgccagcagatgggaggatatagggaaacagcacacaagtctaaggggggtgcccaagggggttattttcatcatatatttattacataaatatatagtaaaatagacgagcaacaattaccataaaaatatctttctttaaaatcctgacccaaaacacaacggggtgaaaaatcgcacataacagacatactgattgtcaacgtggggcaggagtaggagcccctcaagtcacccctgccggtcccacccctccctggggaagagacctacctccttccctgtttctggccacaacccccctccccccagcccagcaccagcttctcatacattcagtagcgcctctgggcagtgtccccctcccccccgcccaggagttcccagggcaggagttactgtcctccttatggacggtctctctctcacaacgccctgccctctcccagccctgcagacccgccaccaggagaaggggtaggggctcctcccccaccctccccaagtctgagcagggaggaggctggatgaggtatgtgtgttatgagtgatgggaggggcaatactgagatggagaggcgggtggtgggggcggggtagtggtcatggctctggcaaccccttgtcctggcctggccccctcgtcctattcccagcaacccgtcctcccaccgatactgcacctgctgctccaccctgcctgccctagtgccccgggccaatactgggggaggcatgctgagcacccacatcaaggccatccccctcattagcaccaatggcccccaggagagggccctgtcccccacttccacagcagggactgggacagctgccgctctagagcaggtgcgtggcactcctgagtcgccctggctcctcccctaccatgtgtactcactcacacattcacgcagaggaacgcacacatacaccccacatcaccgagggggaagggaggggtccggggaggatgggatcacagctcatatgattggggagggtgggggagtcccaagtgcctataagaggctaaggctcttcaaggccttttctctgccgtgtccatggctgagaatggggatggaggggttggggtggggatggagggatggggaagacagcagacaggtcaggaattccactgggcccccaggcgtggtaggaaggtacaagagggcctacccatgggactggagtaatacaggattcagtactccaggagagagagagaggatagagacaaagacagcgcgggcagcccgaggccccagcagggtgggacaggcacatgcacaggtgacagcgggtgctcctccaggccctccacccctgttggaacacctgaacgattggggaaggacagtgccctgacgggcagcatagcattgccttcccatgtccgtgtgtgcatgtccgtgtgtgtgtgtgtgtgtgtgtgttacttttacaatcaggaaaacatatttaataacatatagtcaagaaaacagacttaaaaat

SEQ ID NO: 277391 - DNA, 3240 bp, Homo sapiens
cactggggcacgaggcgctccctgggatcacatggtacctgctccagtgccgcgtgcggcccgggaaccctgggctgctggcgcctgcgcagagccctctgtcccagggaaaggctcgggcaaaaggcggctgagattggcagagtgaaatattactgccgagggaacgtagcagggcacacgtctcgcctctttgcgactcggtgccccgtttctccccatcacctacttacttcctggttgcaacctctcttcctctgggacttttgcaccgggagctccagattcgccaccccgcagcgctgcggagccggcaggcagaggcaccccgtacactgcagagacccgaccctccttgctaccttctagccagaactactgcaggctgattccccctacacactctctctgctcttcccatgcaaagcagaactccgttgcctcaacgtccaacccttctgcagggctgcagtccggccaccccaagaccttgctgcagggtgcttcggatcctgatcgtgagtcgcggggtccactccccgcccttagccagtgcccagggggcaacagcggcgatcgcaacctctagtttgagtcaaggtccagtttgaatgaccgctctcagctggtgaagacatgacgaccctggactccaacaacaacacaggtggcgtcatcacctacattggctccagtggctcctccccaagccgcaccagccctgaatccctctatagtgacaactccaatggcagcttccagtccctgacccaaggctgtcccacctacttcccaccatcccccactggctccctcacccaagacccggctcgctcctttgggagcattccacccagcctgagtgatgacggctccccttcttcctcatcttcctcgtcgtcatcctcctcctccttctataatgggagcccccctgggagtctacaagtggccatggaggacagcagccgagtgtcccccagcaagagcaccagcaacatcaccaagctgaatggcatggtgttactgtgtaaagtgtgtggggacgttgcctcgggcttccactacggtgtgcacgcctgcgagggctgcaagggctttttccgtcggagcatccagcagaacatccagtacaaaaggtgtctgaagaatgagaattgctccatcgtccgcatcaatcgcaaccgctgccagcaatgtcgcttcaagaagtgtctctctgtgggcatgtctcgagacgctgtgcgttttgggcgcatccccaaacgagagaagcagcggatgcttgctgagatgcagagtgccatgaacctggccaacaaccagttgagcagccagtgcccgctggagacttcacccacccagcaccccaccccaggccccatgggcccctcgccaccccctgctccggtcccctcacccctggtgggcttctcccagtttccacaacagctgacgcctcccagatccccaagccctgagcccacagtggaggatgtgatatcccaggtggcccgggcccatcgagagatcttcacctacgcccatgacaagctgggcagctcacctggcaacttcaatgccaaccatgcatcaggtagccctccagccaccaccccacatcgctgggaaaatcagggctgcccacctgcccccaatgacaacaacaccttggctgcccagcgtcataacgaggccctaaatggtctgcgccaggctccctcctcctaccctcccacctggcctcctggccctgcacaccacagctgccaccagtccaacagcaacgggcaccgtctatgccccacccacgtgtatgcagccccagaaggcaaggcacctgccaacagtccccggcagggcaactcaaagaatgttctgctggcatgtcctatgaacatgtacccgcatggacgcagtgggcgaacggtgcaggagatctgggaggatttctccatgagcttcacgcccgctgtgcgggaggtggtagagtttgccaaacacatcccgggcttccgtgacctttctcagcatgaccaagtcaccctgcttaaggctggcacctttgaggtgctgatggtgcgctttgcttcgttgttcaacgtgaaggaccagacagtgatgttcctaagccgcaccacctacagcctgcaggagcttggtgccatgggcatgggagacctgctcagtgccatgttcgacttcagcgagaagctcaactccctggcgcttaccgaggaggagctgggcctcttcaccgcggtggtgcttgtctctgcaggtaggtcaggctctcgcctgaccgggggaggaggcagacgcagttcaattcaacacaccttttatggagtacctactctatgccaggccctgcaccgggcactggggatacagacatgattcagacacagtctagcttgggaaacagactcatgcccgactaattataaaacagtgagataagtgtcacagtagaagcatgaaccaaggaagcacagacaactatttctgcctgggggagctggggaaggaggtgacacttgagttggggcctcaaaggacaagtaagatgttgccaggcagagaaagggggaagggcatcccaggcagagggaactacacagcaaaaagcaagggagtctggccatgtttggcctgctgaggaagggaaggtggtcttacgggatgggaggtgaccagccctgctgagcccacgctcccagctttcaggcacctcctgctcttggggcagaggcctgggagaaggtatggcactccttctccttccccatcggccttctggggggcttcagggagaggctgcattgcctgccaggtcctcgcagacctccggttcctcctcagaggagctcggggagtccgcctcactgctgtcgtcttccccacagaccgctcgggcatggagaattccgcttcggtggagcagctccaggagacgctgctgcgggctcttcgggctctggtgctgaagaaccggcccttggagacttcccgcttcaccaagctgctgctcaagctgccggacctgcggaccctgaacaacatgcattccgagaagctgctgtccttccgggtggacgcccagtgacccgcccggccggccttctgccgctgcccccttgtacagaatcgaactctgcacttctctctcctttacgagacgaaaaggaaaagcaaaccagaatcttatttatattgttataaaatattccaagatga

SEQ ID NO: 277392 - DNA, 3116 bp, Homo sapiens
  misc_feature (1520)..(1520): n is a, c, g, or t
ggccccgtttgatccccacacagctgggagggtggaggggctcttcccatgttacggacggggaagcgaagcctcttggaaagggcggggctcgcagttgcatcacagagacagaaggagctacaaagatgatgcagtcctttgaatcccagtcacccaggagagcttttcacaaacacagaccctttccttggaccccaggattttgatttgggatctggggaagggacctcacatctcttcccatcagctccccacacagccagctcataggccagtgatgaagccctcatcactcaggtgtggggaggaggacttgagctgcagatgtgacgctcctgacacgtcgcaggcacacggcaggtgtcggcctcctcgccagccctgggcaagatgggtcatcaggatgggaccgtgtggcacagcctgcgggctttggagccaggcaaacctgggctgggaatcctggctctgcctcggcctccgtgatcttagacaggcagccccagctccttgagacaccatttctctacaacgggatcacgctgcctgcctcgtgggatttccgtgggcactcagggtgcactggagctgggagcaaaggaggctctgtgagaggagggccagttcagccgcagcaggaggactgacaggggcctgatggaggagtttgtggggctgcgtgaaggctcctcagggaaccctgtgactctgcaggagctgtggggcccctgtcccctcatccgccgaggcatccgaggtggcctggagtggctgaagcagaagctcttccgcctgggcgaggactggtacttcctgatgaccctcggggtgctcatggccctggtcagctgtgccatggacttggctgttgagagtgtggtccgagcgcaccagtggctgtacagggagattggggacagccacctgctccggtatctctcctggactgtgtaccctgtggccctcgtctctttctcttcgggcttctctcagagcatcacaccctcctctggaggttctggaatcccggaggtgaagaccatgttggcgggtgtggtcttggaggactacctggatatcaagaactttggggccaaagtggtgggcctctcctgcaccctggcctgtggcagcaccctcttcctcggcaaagtgggccctttcgtgcacctgtctgtgatgatggctgcctacctgggccgtgtgcgcaccacgaccatcggggagcctgagaacaagagcaagcaaaacgaaatgctggtggcagcggcggcagtgggcgtggccacagtctttggcgctcccttcagcggcgtcctgttcagcatcgaggtcatgtcttcccacttctctgtctgggattactggaggggcttctttgcggccacctgcggggccttcatgttccggctcctggcggtcttcaacagcgagcaggagaccatcacctccctctacaagaccagtttccgggtggacgttcccttcgacctgcctgagatcttcttttttgtggngctggggggtctctgcggcatcctgggcagcgcttacctcttctgtcagcgaatcttctttggcttcatcaggaacaataggttcagctccaaactgctggccaccagcaagcctgtgtactccgctctggccaccttggttctcgcctccatcacctacccacccagcgccggccgcttcctagcttctcggctgtccatgaagcagcatctggactcgctgttcgacaaccactcctgggcgctgatgacccagaactccagcccaccctggcccgaggagctcgacccccagcacctgtggtgggaatggtaccacccgcggttcaccatctttgggacccttgccttcttcctggttatgaagttctggatgctgattctggccaccaccatccccatgcctgccgggtacttcatgcccatctttgtctatggagctgctatcgggcgcctctttggggagactctctcttttatcttccctgagggcatcgtggctggagggatcaccaatcccatcatgccaggggggtatgctctggcaggggctgcagccttctcaggggctgtgacccacaccatctccacggcgctgctggccttcgaggtgaccggccagatagtgcatgcactgcccgtgctgatggcggtgctggcagccaacgccattgcacagagctgccagccctccttctatgatggcaccgtcattgtcaagaagctgccatacctgccacggattctgggccgcaacatcggttcccaccgcgtgagggtggagcacttcatgaaccacagcatcaccacactggccaaggacacgccactggaggaggtggtcaaggttgtgacctccacagacgtggccgagtatcccttggtggagagcacagagtcccagatcctggtgggcatagtgcgaagggcccagctggtgcaggccctgaaggctgagcctccttcctgggctcctggacaccagcagtgtctccaggacatcttggctgcaggctgccccacagaaccagtgaccctgaagctgtccccagagacttccctgcatgaggcacacaacctctttgagctgttgaaccttcattccctctttgtgacgtcgcggggcagagctgtgggctgcgtgtcctgggtggagatgaagaaagcaatttccaacctgacaaatccgccagccccaaagtgagccggcccagcaagatgaaacagggcaccccagctgacctggtactgaggttgggctgagaccctgcttctcttcccccatcaccacctgcccctccctccagcccagctccattctttggcataacaggcaactttaacctagcccagaagaggatggctcatcctgggtgggacgatggctcctgccttgaaagacaaaaatcccaccttgggcagagctgagtgtgagaagatggaaaaccagtatctgccaggtgctcagtgactggccatcacattaatgaatgatgagattggagtacactgtcaccaagggcaggcacagatggcttctggggttgtctggttcccagtgagaggctcctgagaaaaataaagctggttcccaga

SEQ ID NO: 277393 - DNA, 2989 bp, Homo sapiens
  misc_feature (1393)..(1393): n is a, c, g, or t
ctctctacctgacacacagggaggctgtggtcatgctggccccactcaccattgcccccctgccttctccttcccttcccagcctcctcccctctccctctgtgctttttcaaaccttccatgtccagctctgagacccctggaccctgagtctcagccttggcagatgacccctctctgtcctgctgtgtgcatgagctcccccttcccagccctcgtccagcagcacccaggagcctgagtacagctgggcaccaccctctgtgcagctgtgatgggtggggaggctcctgctccccttctctcttggcagttctgccctgcacagctctggcctccacagttctggttggtttgtcaaggacgtttttaatctccatggtaaaccccggccggcggggaaggggggtggcagggagagagtgatgattggtagagcatatacctgtccaggtgcactggagctgggagcaaaggaggctctgtgagaggagggccagttcagccgcagcaggaggactgacaggggcctgatggaggagtttgtggggctgcgtgaaggctcctcagggaaccctgtgactctgcaggagctgtggggcccctgtcccctcatccgccgaggcatccgaggtggcctggagtggctgaagcagaagctcttccgcctgggcgaggactggtacttcctgatgaccctcggggtgctcatggccctggtcagctgtgccatggacttggctgttgagagtgtggtccgagcgcaccagtggctgtacagggagattggggacagccacctgctccggtatctctcctggactgtgtaccctgtggccctcgtctctttctcttcgggcttctctcagagcatcacaccctcctctggaggttctggaatcccggaggtgaagaccatgttggcgggtgtggtcttggaggactacctggatatcaagaactttggggccaaagtggtgggcctctcctgcaccctggcctgtggcagcaccctcttcctcggcaaagtgggccctttcgtgcacctgtctgtgatgatggctgcctacctgggccgtgtgcgcaccacgaccatcggggagcctgagaacaagagcaagcaaaacgaaatgctggtggcagcggcggcagtgggcgtggccacagtctttggcgctcccttcagcggcgtcctgttcagcatcgaggtcatgtcttcccacttctctgtctgggattactggaggggcttctttgcggccacctgcggggccttcatgttccggctcctggcggtcttcaacagcgagcaggagaccatcacctccctctacaagaccagtttccgggtggacgttcccttcgacctgcctgagatcttcttttttgtggngctggggggtctctgcggcatcctgggcagcgcttacctcttctgtcagcgaatcttctttggcttcatcaggaacaataggttcagctccaaactgctggccaccagcaagcctgtgtactccgctctggccaccttggttctcgcctccatcacctacccacccagcgccggccgcttcctagcttctcggctgtccatgaagcagcatctggactcgctgttcgacaaccactcctgggcgctgatgacccagaactccagcccaccctggcccgaggagctcgacccccagcacctgtggtgggaatggtaccacccgcggttcaccatctttgggacccttgccttcttcctggttatgaagttctggatgctgattctggccaccaccatccccatgcctgccgggtacttcatgcccatctttgtctatggagctgctatcgggcgcctctttggggagactctctcttttatcttccctgagggcatcgtggctggagggatcaccaatcccatcatgccaggggggtatgctctggcaggggctgcagccttctcaggggctgtgacccacaccatctccacggcgctgctggccttcgaggtgaccggccagatagtgcatgcactgcccgtgctgatggcggtgctggcagccaacgccattgcacagagctgccagccctccttctatgatggcaccgtcattgtcaagaagctgccatacctgccacggattctgggccgcaacatcggttcccaccgcgtgagggtggagcacttcatgaaccacagcatcaccacactggccaaggacacgccactggaggaggtggtcaaggttgtgacctccacagacgtggccgagtatcccttggtggagagcacagagtcccagatcctggtgggcatagtgcgaagggcccagctggtgcaggccctgaaggctgagcctccttcctgggctcctggacaccagcagtgtctccaggacatcttggctgcaggctgccccacagaaccagtgaccctgaagctgtccccagagacttccctgcatgaggcacacaacctctttgagctgttgaaccttcattccctctttgtgacgtcgcggggcagagctgtgggctgcgtgtcctgggtggagatgaagaaagcaatttccaacctgacaaatccgccagccccaaagtgagccggcccagcaagatgaaacagggcaccccagctgacctggtactgaggttgggctgagaccctgcttctcttcccccatcaccacctgcccctccctccagcccagctccattctttggcataacaggcaactttaacctagcccagaagaggatggctcatcctgggtgggacgatggctcctgccttgaaagacaaaaatcccaccttgggcagagctgagtgtgagaagatggaaaaccagtatctgccaggtgctcagtgactggccatcacattaatgaatgatgagattggagtacactgtcaccaagggcaggcacagatggcttctggggttgtctggttcccagtgagaggctcctgagaaaaataaagctggttcccaga

SEQ ID NO: 277394 - DNA, 2594 bp, Homo sapiens
  misc_feature (998)..(998): n is a, c, g, or t
ccataaaccctgggcccaggcgggaaaggggggaggatgttgattgttggaacacacacctgtccaggtgcaggggagctggaggctctgtgagaggagggccagctcagccacagcaggaggactgacaggggcctgatggaggagtttgtggggctgcgtgaaggctcctcagggaaccctgtgactctgcaggagctgtggggcccctgtcccctcatccgccgaggcatccgaggtggcctggagtggctgaagcagaagctcttccgcctgggcgaggactggtacttcctgatgaccctcggggtgctcatggccctggtcagctgtgccatggacttggctgttgagagtgtggtccgagcgcaccagtggctgtacagggagattggggacagccacctgctccggtatctctcctggactgtgtaccctgtggccctcgtctctttctcttcgggcttctctcagagcatcacaccctcctctggaggttctggaatcccggaggtgaagaccatgttggcgggtgtggtcttggaggactacctggatatcaagaactttggggccaaagtggtgggcctctcctgcaccctggcctgtggcagcaccctcttcctcggcaaagtgggccctttcgtgcacctgtctgtgatgatggctgcctacctgggccgtgtgcgcaccacgaccatcggggagcctgagaacaagagcaagcaaaacgaaatgctggtggcagcggcggcagtgggcgtggccacagtctttggcgctcccttcagcggcgtcctgttcagcatcgaggtcatgtcttcccacttctctgtctgggattactggaggggcttctttgcggccacctgcggggccttcatgttccggctcctggcggtcttcaacagcgagcaggagaccatcacctccctctacaagaccagtttccgggtggacgttcccttcgacctgcctgagatcttcttttttgtggngctggggggtctctgcggcatcctgggcagcgcttacctcttctgtcagcgaatcttctttggcttcatcaggaacaataggttcagctccaaactgctggccaccagcaagcctgtgtactccgctctggccaccttggttctcgcctccatcacctacccacccagcgccggccgcttcctagcttctcggctgtccatgaagcagcatctggactcgctgttcgacaaccactcctgggcgctgatgacccagaactccagcccaccctggcccgaggagctcgacccccagcacctgtggtgggaatggtaccacccgcggttcaccatctttgggacccttgccttcttcctggttatgaagttctggatgctgattctggccaccaccatccccatgcctgccgggtacttcatgcccatctttgtctatggagctgctatcgggcgcctctttggggagactctctcttttatcttccctgagggcatcgtggctggagggatcaccaatcccatcatgccaggggggtatgctctggcaggggctgcagccttctcaggggctgtgacccacaccatctccacggcgctgctggccttcgaggtgaccggccagatagtgcatgcactgcccgtgctgatggcggtgctggcagccaacgccattgcacagagctgccagccctccttctatgatggcaccgtcattgtcaagaagctgccatacctgccacggattctgggccgcaacatcggttcccaccgcgtgagggtggagcacttcatgaaccacagcatcaccacactggccaaggacacgccactggaggaggtggtcaaggttgtgacctccacagacgtggccgagtatcccttggtggagagcacagagtcccagatcctggtgggcatagtgcgaagggcccagctggtgcaggccctgaaggctgagcctccttcctgggctcctggacaccagcagtgtctccaggacatcttggctgcaggctgccccacagaaccagtgaccctgaagctgtccccagagacttccctgcatgaggcacacaacctctttgagctgttgaaccttcattccctctttgtgacgtcgcggggcagagctgtgggctgcgtgtcctgggtggagatgaagaaagcaatttccaacctgacaaatccgccagccccaaagtgagccggcccagcaagatgaaacagggcaccccagctgacctggtactgaggttgggctgagaccctgcttctcttcccccatcaccacctgcccctccctccagcccagctccattctttggcataacaggcaactttaacctagcccagaagaggatggctcatcctgggtgggacgatggctcctgccttgaaagacaaaaatcccaccttgggcagagctgagtgtgagaagatggaaaaccagtatctgccaggtgctcagtgactggccatcacattaatgaatgatgagattggagtacactgtcaccaagggcaggcacagatggcttctggggttgtctggttcccagtgagaggctcctgagaaaaataaagctggttcccaga

SEQ ID NO: 277395 - DNA, 1693 bp, Homo sapiens
cagaaagccttaacttgcctctagagaatgcctggtattacaacgatattgcggcattagaattccaactcttctgctgtggaagtttgaagcgaagctgcagcaaaaccagagaatttcctcaagtggcctgtaggctccttgttatcttatgcccccacccctccctcaacaataggttcagctccaaactgctggccaccagcaagcctgtgtactccgctctggccaccttggttctcgcctccatcacctacccacccagcgccggccgcttcctagcttctcggctgtccatgaagcagcatctggactcgctgttcgacaaccactcctgggcgctgatgacccagaactccagcccaccctggcccgaggagctcgacccccagcacctgtggtgggaatggtaccacccgcggttcaccatctttgggacccttgccttcttcctggttatgaagttctggatgctgattctggccaccaccatccccatgcctgccgggtacttcatgcccatctttgtctatggagctgctatcgggcgcctctttggggagactctctcttttatcttccctgagggcatcgtggctggagggatcaccaatcccatcatgccaggggggtatgctctggcaggggctgcagccttctcaggggctgtgacccacaccatctccacggcgctgctggccttcgaggtgaccggccagatagtgcatgcactgcccgtgctgatggcggtgctggcagccaacgccattgcacagagctgccagccctccttctatgatggcaccgtcattgtcaagaagctgccatacctgccacggattctgggccgcaacatcggttcccaccgcgtgagggtggagcacttcatgaaccacagcatcaccacactggccaaggacacgccactggaggaggtggtcaaggttgtgacctccacagacgtggccgagtatcccttggtggagagcacagagtcccagatcctggtgggcatagtgcgaagggcccagctggtgcaggccctgaaggctgagcctccttcctgggctcctggacaccagcagtgtctccaggacatcttggctgcaggctgccccacagaaccagtgaccctgaagctgtccccagagacttccctgcatgaggcacacaacctctttgagctgttgaaccttcattccctctttgtgacgtcgcggggcagagctgtgggctgcgtgtcctgggtggagatgaagaaagcaatttccaacctgacaaatccgccagccccaaagtgagccggcccagcaagatgaaacagggcaccccagctgacctggtactgaggttgggctgagaccctgcttctcttcccccatcaccacctgcccctccctccagcccagctccattctttggcataacaggcaactttaacctagcccagaagaggatggctcatcctgggtgggacgatggctcctgccttgaaagacaaaaatcccaccttgggcagagctgagtgtgagaagatggaaaaccagtatctgccaggtgctcagtgactggccatcacattaatgaatgatgagattggagtacactgtcaccaagggcaggcacagatggcttctggggttgtctggttcccagtgagaggctcctgagaaaaataaagctggttcccaga

SEQ ID NO: 277396 - DNA, 2696 bp, Homo sapiens
  misc_feature (1520)..(1520): n is a, c, g, or t
ggccccgtttgatccccacacagctgggagggtggaggggctcttcccatgttacggacggggaagcgaagcctcttggaaagggcggggctcgcagttgcatcacagagacagaaggagctacaaagatgatgcagtcctttgaatcccagtcacccaggagagcttttcacaaacacagaccctttccttggaccccaggattttgatttgggatctggggaagggacctcacatctcttcccatcagctccccacacagccagctcataggccagtgatgaagccctcatcactcaggtgtggggaggaggacttgagctgcagatgtgacgctcctgacacgtcgcaggcacacggcaggtgtcggcctcctcgccagccctgggcaagatgggtcatcaggatgggaccgtgtggcacagcctgcgggctttggagccaggcaaacctgggctgggaatcctggctctgcctcggcctccgtgatcttagacaggcagccccagctccttgagacaccatttctctacaacgggatcacgctgcctgcctcgtgggatttccgtgggcactcagggtgcactggagctgggagcaaaggaggctctgtgagaggagggccagttcagccgcagcaggaggactgacaggggcctgatggaggagtttgtggggctgcgtgaaggctcctcagggaaccctgtgactctgcaggagctgtggggcccctgtcccctcatccgccgaggcatccgaggtggcctggagtggctgaagcagaagctcttccgcctgggcgaggactggtacttcctgatgaccctcggggtgctcatggccctggtcagctgtgccatggacttggctgttgagagtgtggtccgagcgcaccagtggctgtacagggagattggggacagccacctgctccggtatctctcctggactgtgtaccctgtggccctcgtctctttctcttcgggcttctctcagagcatcacaccctcctctggaggttctggaatcccggaggtgaagaccatgttggcgggtgtggtcttggaggactacctggatatcaagaactttggggccaaagtggtgggcctctcctgcaccctggcctgtggcagcaccctcttcctcggcaaagtgggccctttcgtgcacctgtctgtgatgatggctgcctacctgggccgtgtgcgcaccacgaccatcggggagcctgagaacaagagcaagcaaaacgaaatgctggtggcagcggcggcagtgggcgtggccacagtctttggcgctcccttcagcggcgtcctgttcagcatcgaggtcatgtcttcccacttctctgtctgggattactggaggggcttctttgcggccacctgcggggccttcatgttccggctcctggcggtcttcaacagcgagcaggagaccatcacctccctctacaagaccagtttccgggtggacgttcccttcgacctgcctgagatcttcttttttgtggngctggggggtctctgcggcatcctgggcagcgcttacctcttctgtcagcgaatcttctttggcttcatcaggaacaataggttcagctccaaactgctggccaccagcaagcctgtgtactccgctctggccaccttggttctcgcctccatcacctacccacccagcgccggccgcttcctagcttctcggctgtccatgaagcagcatctggactcgctgttcgacaaccactcctgggcgctgatgacccagaactccagcccaccctggcccgaggagctcgacccccagcacctgtggtgggaatggtaccacccgcggttcaccatctttgggacccttgccttcttcctggttatgaagttctggatgctgattctggccaccaccatccccatgcctgccgggtacttcatgcccatctttgtctatggagctgctatcgggcgcctctttggggagactctctcttttatcttccctgagggcatcgtggctggagggatcaccaatcccatcatgccaggggggtatgctctggcaggggctgcagccttctcaggggctgtgacccacaccatctccacggcgctgctggccttcgaggtgaccggccagatagtgcatgcactgcccgtgctgatggcggtgctggcagccaacgccattgcacagagctgccagccctccttctatgatggcaccgtcattgtcaagaagctgccatacctgccacggattctgggccgcaacatcggttcccaccgcgtgagggtggagcacttcatgaaccacagcatcaccacactggccaaggacacgccactggaggaggtggtcaaggttgtgacctccacagacgtggccgagtatcccttggtggagagcacagagtcccagatcctggtgggcatagtgcgaagggcccagctggtgcaggccctgaaggctgagcctccttcctgggctcctggacaccagcagtgtctccaggacatcttggctgcaggctgccccacagaaccatatctgccaggtgctcagtgactggccatcacattaatgaatgatgagattggagtacactgtcaccaagggcaggcacagatggcttctggggttgtctggttcccagtgagaggctcctgagaaaaataaagctggttcccaga

SEQ ID NO: 277397 - DNA, 1799 bp, Homo sapiens
ctctctacctgacacacagggaggctgtggtcatgctggccccactcaccattgcccccctgccttctccttcccttcccagcctcctcccctctccctctgtgctttttcaaaccttccatgtccagctctgagacccctggaccctgagtctcagccttggcagatgacccctctctgtcctgctgtgtgcatgagctcccccttcccagccctcgtccagcagcacccaggagcctgagtacagctgggcaccaccctctgtgcagctgtgatgggtggggaggctcctgctccccttctctcttggcagttctgccctgcacagctctggcctccacagttctggttggtttgtcaaggacgtttttaatctccatggtgcactggagctgggagcaaaggaggctctgtgagaggagggccagttcagccgcagcaggaggactgacaggggcctgatggaggagttggtggggctgcgtgagggcttctcaggggaccctgtgactctgcaggagctgtggggcccctgtccccacatccgccgagccatccaaggtggcctggagtggctaaagcagaaggtgttccgcctgggagaagactggtacttcctgatgaccctcggggtgctcatggccctggtcagctatgccatgaactttgccatcgggtgtgtggtccgagcacaccagtggctgtacagggagattggggacagccacctgctccggtatctttcctggactgtgtaccctgtggccctcgtctctttctcctcaggcttctcccagagcatcacgccctcctctggaggttctggaatcccggagctgaagaccatgttggcgggtgtgatcttggaggactacctggatatcaagaactttggggccaaggtggtgggcctctcctgcaccctggccaccggcagcaccctgttcctgggcaaagtggtatggtcagggccctttcgtgcacctgtctgtaatgatcgctgcctacctgggccgtgtgcgcaccacgaccatcggggagcctgagaacaagagcaagcaaaacgaaatgctggtggcagcggcggcagtgggcgtggccacagtctttgcagctcccttcagcggcgtcctgttcagcatcgaggtcatgtcttcccacttctctgtccgggattactggaggggcttctttgcggccacctgcggggccttcatattccggctcctggcagtcttcaacagcgagcaggagaccatcacctccctctacaagaccagtttccgggtggacgttcccttcgacctgcctgagatcttcttttttgtggcgctgggtggcatctgcggcgtcctgagctgtgcttacctcttctgtcagcgaaccttcctcagcttcatcaagaccaatcggtacagctccaaactgctggctactaggtcggctgtccatgaagcagcatctggactcgctgttcgacaaccactcctgggcgctgatgacccagaactccagcccaccctggcccgaggagctcgacccccagcacctttggtgggaatggtaccacccgcggttcaccatctttgggacccttgccttcttcctggttatgaagttctggatgctgattctggccaccaccatccccatgcctgccgggtacttcatgcccatctttatccttggagctgccatcgggcgcctcttgggagaggctcttgccgtcgccttccctgagggcattgtgactggaggggttaccaatcccatcatgcccggggggtatgctctggcag

SEQ ID NO: 277398 - DNA, 1779 bp, Homo sapiens
ctctctacctgacacacagggaggctgtggtcatgctggccccactcaccattgcccccctgccttctccttcccttcccagcctcctcccctctccctctgtgctttttcaaaccttccatgtccagctctgagacccctggaccctgagtctcagccttggcagatgacccctctctgtcctgctgtgtgcatgagctcccccttcccagccctcgtccagcagcacccaggagcctgagtacagctgggcaccaccctctgtgcagctgtgatgggtggggaggctcctgctccccttctctcttggcagttctgccctgcacagctctggcctccacagttctggttggtttgtcaaggacgtttttaatctccatggtgcactggagctgggagcaaaggaggctctgtgagaggagggccagttcagccgcagcaggaggactgacaggggcctgatggaggagttggtggggctgcgtgagggcttctcaggggaccctgtgactctgcaggagctgtggggcccctgtccccacatccgccgagccatccaaggtggcctggagtggctaaagcagaaggtgttccgcctgggagaagactggtacttcctgatgaccctcggggtgctcatggccctggtcagctatgccatgaactttgccatcgggtgtgtggtccgagcacaccagtggctgtacagggagattggggacagccacctgctccggtatctttcctggactgtgtaccctgtggccctcgtctctttctcctcaggcttctcccagagcatcacgccctcctctggaggttctggaatcccggagctgaagaccatgttggcgggtgtgatcttggaggactacctggatatcaagaactttggggccaaggtggtgggcctctcctgcaccctggccaccggcagcaccctgttcctgggcaaagtggtatggtcagggccctttcgtgcacctgtctgtaatgatcgctgcctacctgggccgtgtgcgcaccacgaccatcggggagcctgagaacaagagcaagcaaaacgaaatgctggtggcagcggcggcagtgggcgtggccacagtctttgcagctcccttcagcggcgtcctgttcagcatcgaggtcatgtcttcccacttctctgtccgggattactggaggggcttctttgcggccacctgcggggccttcatattccggctcctggcagtcttcaacagcgagcaggagaccatcacctccctctacaagaccagtttccgggtggacgttcccttcgacctgcctgagatcttcttttttgtggcgctgggtggcatctgcggcgtcctgagctgtgcttacctcttctgtcagcgaaccttcctcagcttcatcaagaccaatcggtacagctccaaactgctggctactaggtcggagcctgtgtactccgctctggccaccttgcttctcgcctccatcacctacccgcctggtgtgggccacttcctagcttctcggctgtccatgaagcagcatctggactcgctgttcgacgatggctcctgccttgaaagacaaaaatcccaccttgggcagagctgagtgtgagaagatggaaaaccagtatctgccaggtgctcagtgactggccatcacattaatgaatgatgagattggagtacactgtcaccaagggcaggcacagatggcttctggggttgtctggttcccagtgagaggctcctgagaaaaataaagctggttcccaga

SEQ ID NO: 277399 - DNA, 1192 bp, Homo sapiens
ctctctacctgacacacagggaggctgtggtcatgctggccccactcaccattgcccccctgccttctccttcccttcccagcctcctcccctctccctctgtgctttttcaaaccttccatgtccagctctgagacccctggaccctgagtctcagccttggcagatgacccctctctgtcctgctgtgtgcatgagctcccccttcccagccctcgtccagcagcacccaggagcctgagtacagctgggcaccaccctctgtgcagctgtgatgggtggggaggctcctgctccccttctctcttggcagttctgccctgcacagctctggcctccacagttctggttggtttgtcaaggacgtttttaatctccatggtaaaccccggccggcggggaaggggggtggcagggagagagtgatgattggtagagcatatacctgtccaggtgcactggagctgggagcaaaggaggctctgtgagaggagggccagttcagccgcagcaggaggactgacaggggcctgatggaggagttggtggggctgcgtgagggcttctcaggggaccctgtgactctgcaggagctgtggggcccctgtccccacatccgccgagccatccaaggtggcctggagtggctaaagcagaaggtgttccgcctgggagaagactggtacttcctgatgaccctcggggtgctcatggccctggtcagctatgccatgaactttgccatcgggtgtgtggtccgaggcttctcccagagcatcacgccctcctctggaggtgagtccacggtcgccatgccagtccccagtgccaaaaccttctcagatcccagggggcttctgatggggggagtcgggaaggggcagcctcatttcacagacaaaggcccaggaagagtcatgtggcttgcccaaagggacacagcaagaaggccagatcttgacttttgggtcactgctggccctacctgctttccaggggctccgctgggacttgatgggaggcctggtgggaggatcttctgcgaagcctgttccagtggccagtgccagggaggggccagtggaggaggcacagctcccccaggccgctcagccctgcctcctgctccaggccagcagaggggagctcaaagctcactcagtggtggcctgagatttcatccgggcttccc

SEQ ID NO: 277400 - DNA, 558 bp, Homo sapiens
gctgtcccctgccagcccccatggggacctggattctgtgcctgcactccctctgactctcagaacattcagcagccccaagaggacaaagttggcagctttctccttaaaggtctagaaggttgtgttcccggcaactgtctgctccatctctgtgtcagaggtgatgcctgcgagcgccttaggtgggatttcagtcagaggtaaaagagaattccggaagacaattattctagccctgagttctagaatgccttctgggcatgggctcctggctgcaagctgtccagcacggccccgtttgatccccacacagctgggagggtggaggggctcttcccatgttacggacggggaagcgaagcctcttggaaagggcggggctcgcagttgcgtaagtggcagagctgggattcgaacctagatgtgttggacccaaagcccttcagaggccgaggtggtttgaacatgtgcctatggagacaggctggcccggaagagccagagaagcccctccctacccacctgcttgctcagcaaagctgggactgaccttgc

SEQ ID NO: 277401 - DNA, 827 bp, Homo sapiens
ccctcggcccagctgagagcctggaggaggggatggggctcattcttgttctcacttcagccccgctttgggcgtcctgttcagcatcgaggtcatgtcttcccacttctctgtccgggattactggaggggcttctttgcggccacctgcggggccttcatattccggctcctggcagtcttcaacagcgagcaggagaccatcacctccctctacaagaccagtttccgggtggacgttcccttcgacctgcctgagatcttcttttttgtggcgctgggtggcatctgcggcgtcctgagctgtgcttacctcttctgtcagcgaaccttcctcagcttcatcaagaccaatcggtacagctccaaactgctggctactaggtcggagcctgtgtactccgctctggccaccttgcttctcgcctccatcacctacccgcctggtgtgggccacttcctagcttctcggctgtccatgaagcagcatctggactcgctgttcgacaaccactcctgggcgctgatgacccagaactccagcccaccctggcccgaggagctcgacccccagcacctttggtgggaatggtaccacccgcggttcaccatctttgggacccttgccttcttcctggttatgaagttctggatgctgattctggccaccaccatccccatgcctgccgggtacttcatgcccatctttatccttggagctgccatcgggcgcctcttgggagaggctcttgccgtcgccttccctgagggcattgtgactggaggggttaccaatcccatcatgcccggggggtatgctctggcag

SEQ ID NO: 277402 - DNA, 2545 bp, Homo sapiens
  misc_feature (949)..(949): n is a, c, g, or t
tccaggtggtacgctccgggtaacgggagctggaggctctgtgagaggagggccagctcagccacagcaggaggactgacaggggcctgatggaggagtttgtggggctgcgtgaaggctcctcagggaaccctgtgactctgcaggagctgtggggcccctgtcccctcatccgccgaggcatccgaggtggcctggagtggctgaagcagaagctcttccgcctgggcgaggactggtacttcctgatgaccctcggggtgctcatggccctggtcagctgtgccatggacttggctgttgagagtgtggtccgagcgcaccagtggctgtacagggagattggggacagccacctgctccggtatctctcctggactgtgtaccctgtggccctcgtctctttctcttcgggcttctctcagagcatcacaccctcctctggaggttctggaatcccggaggtgaagaccatgttggcgggtgtggtcttggaggactacctggatatcaagaactttggggccaaagtggtgggcctctcctgcaccctggcctgtggcagcaccctcttcctcggcaaagtgggccctttcgtgcacctgtctgtgatgatggctgcctacctgggccgtgtgcgcaccacgaccatcggggagcctgagaacaagagcaagcaaaacgaaatgctggtggcagcggcggcagtgggcgtggccacagtctttggcgctcccttcagcggcgtcctgttcagcatcgaggtcatgtcttcccacttctctgtctgggattactggaggggcttctttgcggccacctgcggggccttcatgttccggctcctggcggtcttcaacagcgagcaggagaccatcacctccctctacaagaccagtttccgggtggacgttcccttcgacctgcctgagatcttcttttttgtggngctggggggtctctgcggcatcctgggcagcgcttacctcttctgtcagcgaatcttctttggcttcatcaggaacaataggttcagctccaaactgctggccaccagcaagcctgtgtactccgctctggccaccttggttctcgcctccatcacctacccacccagcgccggccgcttcctagcttctcggctgtccatgaagcagcatctggactcgctgttcgacaaccactcctgggcgctgatgacccagaactccagcccaccctggcccgaggagctcgacccccagcacctgtggtgggaatggtaccacccgcggttcaccatctttgggacccttgccttcttcctggttatgaagttctggatgctgattctggccaccaccatccccatgcctgccgggtacttcatgcccatctttgtctatggagctgctatcgggcgcctctttggggagactctctcttttatcttccctgagggcatcgtggctggagggatcaccaatcccatcatgccaggggggtatgctctggcaggggctgcagccttctcaggggctgtgacccacaccatctccacggcgctgctggccttcgaggtgaccggccagatagtgcatgcactgcccgtgctgatggcggtgctggcagccaacgccattgcacagagctgccagccctccttctatgatggcaccgtcattgtcaagaagctgccatacctgccacggattctgggccgcaacatcggttcccaccgcgtgagggtggagcacttcatgaaccacagcatcaccacactggccaaggacacgccactggaggaggtggtcaaggttgtgacctccacagacgtggccgagtatcccttggtggagagcacagagtcccagatcctggtgggcatagtgcgaagggcccagctggtgcaggccctgaaggctgagcctccttcctgggctcctggacaccagcagtgtctccaggacatcttggctgcaggctgccccacagaaccagtgaccctgaagctgtccccagagacttccctgcatgaggcacacaacctctttgagctgttgaaccttcattccctctttgtgacgtcgcggggcagagctgtgggctgcgtgtcctgggtggagatgaagaaagcaatttccaacctgacaaatccgccagccccaaagtgagccggcccagcaagatgaaacagggcaccccagctgacctggtactgaggttgggctgagaccctgcttctcttcccccatcaccacctgcccctccctccagcccagctccattctttggcataacaggcaactttaacctagcccagaagaggatggctcatcctgggtgggacgatggctcctgccttgaaagacaaaaatcccaccttgggcagagctgagtgtgagaagatggaaaaccagtatctgccaggtgctcagtgactggccatcacattaatgaatgatgagattggagtacactgtcaccaagggcaggcacagatggcttctggggttgtctggttcccagtgagaggctcctgagaaaaataaagctggttcccaga

SEQ ID NO: 277403 - DNA, 2660 bp, Homo sapiens
  misc_feature (1520)..(1520): n is a, c, g, or t
ggccccgtttgatccccacacagctgggagggtggaggggctcttcccatgttacggacggggaagcgaagcctcttggaaagggcggggctcgcagttgcatcacagagacagaaggagctacaaagatgatgcagtcctttgaatcccagtcacccaggagagcttttcacaaacacagaccctttccttggaccccaggattttgatttgggatctggggaagggacctcacatctcttcccatcagctccccacacagccagctcataggccagtgatgaagccctcatcactcaggtgtggggaggaggacttgagctgcagatgtgacgctcctgacacgtcgcaggcacacggcaggtgtcggcctcctcgccagccctgggcaagatgggtcatcaggatgggaccgtgtggcacagcctgcgggctttggagccaggcaaacctgggctgggaatcctggctctgcctcggcctccgtgatcttagacaggcagccccagctccttgagacaccatttctctacaacgggatcacgctgcctgcctcgtgggatttccgtgggcactcagggtgcactggagctgggagcaaaggaggctctgtgagaggagggccagttcagccgcagcaggaggactgacaggggcctgatggaggagtttgtggggctgcgtgaaggctcctcagggaaccctgtgactctgcaggagctgtggggcccctgtcccctcatccgccgaggcatccgaggtggcctggagtggctgaagcagaagctcttccgcctgggcgaggactggtacttcctgatgaccctcggggtgctcatggccctggtcagctgtgccatggacttggctgttgagagtgtggtccgagcgcaccagtggctgtacagggagattggggacagccacctgctccggtatctctcctggactgtgtaccctgtggccctcgtctctttctcttcgggcttctctcagagcatcacaccctcctctggaggttctggaatcccggaggtgaagaccatgttggcgggtgtggtcttggaggactacctggatatcaagaactttggggccaaagtggtgggcctctcctgcaccctggcctgtggcagcaccctcttcctcggcaaagtgggccctttcgtgcacctgtctgtgatgatggctgcctacctgggccgtgtgcgcaccacgaccatcggggagcctgagaacaagagcaagcaaaacgaaatgctggtggcagcggcggcagtgggcgtggccacagtctttggcgctcccttcagcggcgtcctgttcagcatcgaggtcatgtcttcccacttctctgtctgggattactggaggggcttctttgcggccacctgcggggccttcatgttccggctcctggcggtcttcaacagcgagcaggagaccatcacctccctctacaagaccagtttccgggtggacgttcccttcgacctgcctgagatcttcttttttgtggngctggggggtctctgcggcatcctgggcagcgcttacctcttctgtcagcgaatcttctttggcttcatcaggaacaataggttcagctccaaactgctggccaccagcaagcctgtgtactccgctctggccaccttggttctcgcctccatcacctacccacccagcgccggccgcttcctagcttctcggctgtccatgaagcagcatctggactcgctgttcgacaaccactcctgggcgctgatgacccagaactccagcccaccctggcccgaggagctcgacccccagcacctgtggtgggaatggtaccacccgcggttcaccatctttgggacccttgccttcttcctggttatgaagttctggatgctgattctggccaccaccatccccatgcctgccgggtacttcatgcccatctttgtctatggagctgctatcgggcgcctctttggggagactctctcttttatcttccctgagggcatcgtggctggagggatcaccaatcccatcatgccaggggggtatgctctggcaggggctgcagccttctcaggggctgtgacccacaccatctccacggcgctgctggccttcgaggtgaccggccagatagtgcatgcactgcccgtgctgatggcggtgctggcagccaacgccattgcacagagctgccagccctccttctatgatggcaccgtcattgtcaagaagctgccatacctgccacggattctgggccgcaacatcggttcccaccgcgtgagggtggagcacttcatgaaccacagcatcaccacactggccaaggacacgccactggaggaggtggtcaaggttgtgacctccacagacgtggccgagtatcccttggtggagagcacagagtcccagatcctggtgggcatagtgcgaagggcccagctggtgcaggccctgaaggctgagcctccttcctgggctcctggacaccagcagtgtctccaggacatcttggctgcaggctgccccacagaaccagtgaccctgaagctgtccccagagacttccctgcatgaggcacagatggcttctggggttgtctggttcccagtgagaggctcctgagaaaaataaagctggttcccaga

SEQ ID NO: 277404 - DNA, 1871 bp, Homo sapiens
ctctctacctgacacacagggaggctgtggtcatgctggccccactcaccattgcccccctgccttctccttcccttcccagcctcctcccctctccctctgtgctttttcaaaccttccatgtccagctctgagacccctggaccctgagtctcagccttggcagatgacccctctctgtcctgctgtgtgcatgagctcccccttcccagccctcgtccagcagcacccaggagcctgagtacagctgggcaccaccctctgtgcagctgtgatgggtggggaggctcctgctccccttctctcttggcagttctgccctgcacagctctggcctccacagttctggttggtttgtcaaggacgtttttaatctccatggtaaaccccggccggcggggaaggggggtggcagggagagagtgatgattggtagagcatatacctgtccaggtgcactggagctgggagcaaaggaggctctgtgagaggagggccagttcagccgcagcaggaggactgacaggggcctgatggaggagttggtggggctgcgtgagggcttctcaggggaccctgtgactctgcaggagctgtggggcccctgtccccacatccgccgagccatccaaggtggcctggagtggctaaagcagaaggtgttccgcctgggagaagactggtacttcctgatgaccctcggggtgctcatggccctggtcagctatgccatgaactttgccatcgggtgtgtggtccgagcacaccagtggctgtacagggagattggggacagccacctgctccggtatctttcctggactgtgtaccctgtggccctcgtctctttctcctcaggcttctcccagagcatcacgccctcctctggaggttctggaatcccggagctgaagaccatgttggcgggtgtgatcttggaggactacctggatatcaagaactttggggccaaggtggtgggcctctcctgcaccctggccaccggcagcaccctgttcctgggcaaagtggtatggtcagggccctttcgtgcacctgtctgtaatgatcgctgcctacctgggccgtgtgcgcaccacgaccatcggggagcctgagaacaagagcaagcaaaacgaaatgctggtggcagcggcggcagtgggcgtggccacagtctttgcagctcccttcagcggcgtcctgttcagcatcgaggtcatgtcttcccacttctctgtccgggattactggaggggcttctttgcggccacctgcggggccttcatattccggctcctggcagtcttcaacagcgagcaggagaccatcacctccctctacaagaccagtttccgggtggacgttcccttcgacctgcctgagatcttcttttttgtggcgctgggtggcatctgcggcgtcctgagctgtgcttacctcttctgtcagcgaaccttcctcagcttcatcaagaccaatcggtacagctccaaactgctggctactaggtcggctgtccatgaagcagcatctggactcgctgttcgacaaccactcctgggcgctgatgacccagaactccagcccaccctggcccgaggagctcgacccccagcacctttggtgggaatggtaccacccgcggttcaccatctttgggacccttgccttcttcctggttatgaagttctggatgctgattctggccaccaccatccccatgcctgccgggtacttcatgcccatctttatccttggagctgccatcgggcgcctcttgggagaggctcttgccgtcgccttccctgagggcattgtgactggaggggttaccaatcccatcatgcccggggggtatgctctggcag

SEQ ID NO: 277405 - DNA, 1375 bp, Homo sapiens
aagcaggctggtacggtccggaggagttatgggcctgatggaggagttggtggggctgcgtgagggcttctcaggggaccctgtgactctgcaggagctgtggggcccctgtccccacatccgccgagccatccaaggtggcctggagtggctaaagcagaaggtgttccgcctgggagaagactggtacttcctgatgaccctcggggtgctcatggccctggtcagctatgccatgaactttgccatcgggtgtgtggtccgagcacaccagtggctgtacagggagattggggacagccacctgctccggtatctttcctggactgtgtaccctgtggccctcgtctctttctcctcaggcttctcccagagcatcacgccctcctctggaggttctggaatcccggagctgaagaccatgttggcgggtgtgatcttggaggactacctggatatcaagaactttggggccaaggtggtgggcctctcctgcaccctggccaccggcagcaccctgttcctgggcaaagtggtatggtcagggccctttcgtgcacctgtctgtaatgatcgctgcctacctgggccgtgtgcgcaccacgaccatcggggagcctgagaacaagagcaagcaaaacgaaatgctggtggcagcggcggcagtgggcgtggccacagtctttgcagctcccttcagcggcgtcctgttcagcatcgaggtcatgtcttcccacttctctgtccgggattactggaggggcttctttgcggccacctgcggggccttcatattccggctcctggcagtcttcaacagcgagcaggagaccatcacctccctctacaagaccagtttccgggtggacgttcccttcgacctgcctgagatcttcttttttgtggcgctgggtggcatctgcggcgtcctgagctgtgcttacctcttctgtcagcgaaccttcctcagcttcatcaagaccaatcggtacagctccaaactgctggctactaggtcggctgtccatgaagcagcatctggactcgctgttcgacaaccactcctgggcgctgatgacccagaactccagcccaccctggcccgaggagctcgacccccagcacctttggtgggaatggtaccacccgcggttcaccatctttgggacccttgccttcttcctggttatgaagttctggatgctgattctggccaccaccatccccatgcctgccgggtacttcatgcccatctttatccttggagctgccatcgggcgcctcttgggagaggctcttgccgtcgccttccctgagggcattgtgactggaggggttaccaatcccatcatgcccggggggtatgctctggcag

SEQ ID NO: 277406 - DNA, 1026 bp, Homo sapiens
gcatctctgggtgggcaacttacccgagaacgtgcgggaagagaagatcatcgagcatttcaaacggttctggaatcccggagctgaagaccatgttggcgggtgtgatcttggaggactacctggatatcaagaactttggggccaaggtggtgggcctctcctgcaccctggccaccggcagcaccctgttcctgggcaaagtggtatggtcagggccctttcgtgcacctgtctgtaatgatcgctgcctacctgggccgtgtgcgcaccacgaccatcggggagcctgagaacaagagcaagcaaaacgaaatgctggtggcagcggcggcagtgggcgtggccacagtctttgcagctcccttcagcggcgtcctgttcagcatcgaggtcatgtcttcccacttctctgtccgggattactggaggggcttctttgcggccacctgcggggccttcatattccggctcctggcagtcttcaacagcgagcaggagaccatcacctccctctacaagaccagtttccgggtggacgttcccttcgacctgcctgagatcttcttttttgtggcgctgggtggcatctgcggcgtcctgagctgtgcttacctcttctgtcagcgaaccttcctcagcttcatcaagaccaatcggtacagctccaaactgctggctactaggtcggagcctgtgtactccgctctggccaccttgcttctcgcctccatcacctacccgcctggtgtgggccacttcctagcttctcggctgtccatgaagcagcatctggactcgctgttcgacgatggctcctgccttgaaagacaaaaatcccaccttgggcagagctgagtgtgagaagatggaaaaccagtatctgccaggtgctcagtgactggccatcacattaatgaatgatgagattggagtacactgtcaccaagggcaggcacagatggcttctggggttgtctggttcccagtgagaggctcctgagaaaaataaagctggttcccaga

SEQ ID NO: 277407 - DNA, 769 bp, Homo sapiens
ggtctcgatctcctgacctcgtgatcctcctgcctcggcctcccaaagtgctgggattacaggagtgagccaccgcaactggcctggcagttccttatttatatactttgatctatgccccggaaacatgcccctgtcctctaccaagtaccttcctctacgtaccccaatttgtaacagcatttgttgccctctagtactagtatcgatttctctggtttttcccatttgactgtaagatcctttcaagttatcttattcctactaccacttaaaaatgacagtgtatgaatcactcattgacacttaacttgtgaagaggaaaaaggggcgtttccacttagaattaactcataactcaaattcttagtatacttatagctgtctgaaaagctgaagaatcttttagtctaagccaaaacatctgcttactctttttgtttttgttttttgaggtttgagtcttgctctgtagccctggctggagtgcagtggtataacctcggctcactgcaacctccacctcccgagctcaggcaattctcctgcctcagcctcccgagtagctgggattacaggcatgcaccatcacgtccagctaattttgtatttttagtagagatggggtttcaccatgttggccaggctggtcttgaactcctaacttcaggtgatctgcccacctcagcctcccaaagtgctgggattacaggtgtgagccgccatgcccggcctgcttactcattttgaaatggagaaattaccattt

SEQ ID NO: 277408 - DNA, 720 bp, Homo sapiens
aaaaacaaaagcttaagtcagtaaatcttttatcaagttacacaaatcaaattactttgttactaggaaacttcaatttttctaatggtaacatgatttctaataaactgaaatgtcacaaataaagcaagaaatccaatttaacactctcattcttataaacgcaatcatgtccaatccaaataccccatcccagcctagtctcctcctcactctgaatcccattcacacagtatgtgaacctctgccttgtccagtagtataacatggtgaacaagtggtttttatcacatgcttctcatctatgttccctttcatacctgttttatcataagagtacttttgattccagaacatatcacaagttagttccgtatttctttctttctttctgagatggagtcttactctgtcgcccaggctggagtgcagtagcgcgatctcggctcactgcaacctccacctcccggattcaagcgattctcctgcctcagcctcccgagtagctgggactacaggcatgcaccatcacgtccagctaattttgtatttttagtagagatggggtttcaccatgttggccaggctggtcttgaactcctaacttcaggtgatctgcccacctcagcctcccaaagtgctgggagccgaggcaggcagatcacccgaggtcaggagcttgagactagactgaccaacacggagaaaccttgtctctac

SEQ ID NO: 277409 - DNA, 966 bp, Homo sapiens
ccctccactgtcctcctggttctagaatcccactgctattccataccaggcactttagaaccagagactctgctgcttttcctgggcagggcctgcttgctccagctctcaagtctgacttgcatctacactgcgggcaagatgtggctgcaagaccgcatcgccacgttcttcttcccaaaaggcatgatgctcaccacggctgcgctgatgctcttcttcttacacctgggcatcttcatcagagacgtgcacaacttctgcatcacctaccactatgaccacatgagctttcactacacggtcgtcctgatgttctcccaggtgatcagcatctgctgggctgccatggggtcactctatgctgagatgacagaaaacaatgctcaacggagccatgctcttcaaccgcctgtccttggagtttctggccatcgagtaccgggaggagcaccactgaggcctggggagtcggaacagggctaaggagggggaagcaaaaggctgcctcgggtgttttaataaagttgttgtttatttccacctgccagctccttcatggggcgaggggtcggaggctggagacccgggaggaaagcaagtcaagacaaatgcttgacccacggggactccaggcctggcctgcagccactctggtggacttggctttgggtctggggtcttagtgtcttaggcttgagggagaggggcagtgaagaggtgccctcagcctccccattaccccgcctctcctccacagaacccacatcctaggctggcctagccacaagcaagggggctcaggaggggcccacgcggatgtgagggttcatgagtgggtccaggttgggatcgctgtcagctgcggcccggcctaggcgagacatgagggcaaggagggccaggaagcccagcagtcccaagagtagcagcagccccgcccgctggagcagggtcagcggccgc

SEQ ID NO: 277410 - DNA, 1117 bp, Homo sapiens
ccctccactgtcctcctggttctagaatcccactgctattccataccaggcactttagaaccagagactctgctgcttttcctgggcagggcctgcttgctccagctctcaagtctgacttgcatctacactgcgggcaagatgtggctgcaagaccgcatcgccacgttcttcttcccaaaaggcatgatgctcaccacggctgcgctgatgctcttcttcttacacctgggcatcttcatcagagacgtgcacaacttctgcatcacctaccactatgaccacatgagctttcactacacggtcgtcctgatgttctcccaggtgatcagcatctgctgggctgccatggggtcactctatgctgagatgacagaaaacaagtacgtctgcttctccgccctgaccatcctgagtgagtggcaggagggggagggtgcaagagggagcggggagctttggaaccctgagatgtggcaaggagtagccagggaagggtactggggctcatggggggctctgtcccccgcccagtgctcaacggagccatgctcttcaaccgcctgtccttggagtttctggccatcgagtaccgggaggagcaccactgaggcctggggagtcggaacagggctaaggagggggaagcaaaaggctgcctcgggtgttttaataaagttgttgtttatttccacctgccagctccttcatggggcgaggggtcggaggctggagacccgggaggaaagcaagtcaagacaaatgcttgacccacggggactccaggcctggcctgcagccactctggtggacttggctttgggtctggggtcttagtgtcttaggcttgagggagaggggcagtgaagaggtgccctcagcctccccattaccccgcctctcctccacagaacccacatcctaggctggcctagccacaagcaagggggctcaggaggggcccacgcggatgtgagggttcatgagtgggtccaggttgggatcgctgtcagctgcggcccggcctaggcgagacatgagggcaaggagggccaggaagcccagcagtcccaagagtagcagcagccccgcccgctggagcagggtcagcggccgc

SEQ ID NO: 277411 - DNA, 342 bp, Homo sapiens
tgagttaggcttcagaggcagcgctgggtaggcctgagaggagcaagcacagtgggaggcccaacctcagaccacactcatctggatttccagaggtctccaggaggcaaggactatttggtggccctgcttcacccaactgctcttctagcattctccacatcatgtgctatgagttggattcgatcagaattctcaccactggttctaagtcagaatcatctggagagcaagaagcagaatgtctgaaatcttcctatggtacagaactgctggatgagaccatcagtgggaatttggctatgaatgacaaataaataaaaatatgcctacatctaaaaa

SEQ ID NO: 277412 - DNA, 621 bp, Homo sapiens
tgagttaggcttcagaggcagcgctgggtaggcctgagaggagcaagcacagtgggaggcccaacctcagaccacactcatctggatttccagaggtctccaggaggcaaggactatttggtggccctgcttcacccaactgctcttctagcattctccacatcatgtgctatgagttggattcgatcagaattctcaccactggttctaagtcagaatcatctggagagcaagaagcagaatgtctgaaatcttcctatggtacagaactgctggatgagaccatcagtgggatccctcacctgcaggccatgaggaccgttttatgggctctaaactgctcacggctcacaacaatgacaacatcagtcaagatgtctcgactccggagacgattaaggttgagaagaacatcactggcatggcgggtgaactggatacagctgtcagccggcgaggccattttgtcttcacttgaaaaaagaggccaaaatcctgttagtcctccagaacctgtttcctgcttgccacaggtatcagagcaggtggcttagcctgctaaggtacagaatgcaactcaggtcccttgtgtttgatctttgaacaattcatagtccaaaa

SEQ ID NO: 277413 - DNA, 946 bp, Homo sapiens
tgagttaggcttcagaggcagcgctgggtaggcctgagaggagcaagcacagtgggaggcccaacctcagaccacactcatctggatttccagaggtctccaggaggcaaggactatttggtggccctgcttcacccaactgctcttctagcattctccacatcatgtgctatgagttggattcgatcagaattctcaccactggttctaagtcagaatcatctggagagcaagaagcagaatgtctgaaatcttcctatggtacagaactgctggatgagaccatcagtggggtaagctcaaatactccatgataattcaagacatgattaactataatagtctccagttcttgttgaggttttgtcaagcccatgatggcctggtatgtaagttcttggtgattcctatttcttaaagacctacctagatctacagctttctcccatctgcatgatcaaagtgtgtcgttcacagagcacaattattttgtcctgtcgtgctcttttggacagagacccaccagtgacataaaagacaaaactagctagagaagaaaaaagagacgtattgcctgatcttagctgagtgccatgaccttcttgttccccattcacctcatctgtaaagagggaagacaaacccacttcagtgagttgtcgtgagggtaattgagaccgtgagtgtaaagcctactggcaatgagaaggctctccaaatctcaattccctgagtctttgacagcgagaagaaagtgaaaacgagaagctagggtggtgccttttctgagagcatttttcttcatctttcttcccatgaacagcctctgttgaattgtatcatgtccccacaaaattcatacgttgaagtcctaacttctagtaccttagaatgtgaccttatttggaaatagggtcgttgcagatataattagttaagttgagat

SEQ ID NO: 277414 - DNA, 1844 bp, Homo sapiens
ttggtttttttttggcttttatttttgtgtgtgtggattaccaccatatagctcaccatgttatcccagaaagactacaatttcatacagaatgcacagatgtttaaataaaaagccatttaagtgaggggataattctcactaaaaaaagctcaaaaataagaaatgacaattctagatacacttttttgacatgtaaaatgacataaccatagtcacagggaataaagaatcaggtttgaatgtccacaggtttctaaaactaagctctggcttcgtatctgttgaaaatctttagcggttggggaaaatagctatatttaaaaacaaatattgaattttgagttgaaaggtacattttcctcccttgatggagacagaacttttctatggagaacccaagcagcctttccatgatcttactaagttgtccaagagccaaccccgatcagcagcaacaggactcaagctgttcaccctgctttcgagttggctgagcttcctgctgctttcacacattcttctttttctacctcagttcctctttgcttgtagtctttcactccattaacttgcccaagcactggacttaagtatggaagagcctatacgcagttgtaatatatttcgtattttgaaagtgtagaagtttgtattaatttaaaaagaaaaagcttaaatggaaagttaagcaatcctgaacaagaaaactctctcactgcctttgggctagagaaagagtatgctctcaaggagttacataatcttttccaaagcaggatggactgtatctatcatacacattaggataagatgagccaccacaccttaaagaaatcaggcttgagcctatacaagccataaccaaatagaagattttaaacaaaggagcacatagcccaaagctgacatgttatttctataaactctggtatatatgtgaaggagttactgttggctggcttgtgggttttttgactcactacatttttttagacaaaatcacaatgtgaaggcacattaatagttgagattttcttttccttccaggtggacttgctgactgattagtttcatatactacttagtaacctcaagaagtagcaggaggatgccatgtatcaatcttgaacttcaagtctcactgcaacaaggatggagactccagcagagtgcagggtgggcacagacaggccacaagatggcgcagcacctccatacttgggctcttgacaaccaagtactgctgaagttgtagcaggaactactagtccttcactgaggcatgtagccgccttgccgtacagtctgtgtacctggaccaaaagcatctgctgcagaaacttcctgaaacattttcatttgcccagatccacaggattgtgaaatatgatctgaaatctgctgtttaagtctaacaaaatcttcctcattgactgatgaaacttgctttgacctttcaaaatgtgaaatatctggactggattcatgctgactgcagttctgtttgaagtactgttgcctgggcaaaataccatcaccgccatctacatgatctactaattgtagatcttctggccgctcctctgaatctaacaagggctgggtagactcggatcttgagaagacttggactgacggaacttggtgtctgtagccactgtgtaccacggtagaatactggacagtgctcgaagtgttttgtgaagattcattttcatcactgctagaaatgcttggcctagaagatgacatgcatgaagaccccccaataccactgctgtgtccttcagtattaattttttcctttttgaacaggtccaatgatttcagatcttctggaa

SEQ ID NO: 277415 - DNA, 1124 bp, Homo sapiens
aatgtgccttcttacagggcctcggggagtctgggatgttcctggggtcatctgtgttctttgccattgctgacgctgtggccgcagtgcgaagagaaagagacatagctgaggacttcacggtgaagagcccagcaacgccagaatgggttcgaatggcctgtgcagatcgattcacagaaatgcaatgattacaatcacctgcctctggacagatgccctcctcagatgggcagggccgggaaaccagcaccctccacccactccaggaactcctctgtgcggatcttggcctagagatcccaagagatgaccctgagacatttaaaccttggtctatccctatagcataacactgctatcattccctaaaaggtgtttcagtttttcacaagtaaaaagatggcttgttaatcctaactgggttccaaacttatattcttatactgttgtagaaaaaaatagacacaaaatttagaaacgttatccaactttgattatgttaacccaatgaatcattatttgcaaagcatttcacttagactttccagcctagaggccaccagaaaagcactgctgtatccacagtaagcaagtttagtgctgatttgtttctgaaaagatcacgtaaatgttgctgtaaaagcaaacttttcctttctgtgtccatccaatctaaatgggctggtaatacaggttatgattatagaatgaaagacacttcttggtagataaatatatgatgacttttcccaggggtgtatttggttcagtagccacaagagagttctgcaggttttgttttgccatggattgaccataagtctatgtacgtgcatttgacagcaaaggagtggtatttccctcatgcacatctactattcaactgattaacattcttttggatttggaggaggggaaaaagcaatataaaaacattttcaatatcttgcccccaacccctctgtgttggtgttgctgttgttgaaaaacatccaatctggtatcagagtttaagaaatattgcatatttcagtttcccatagattgaagtgagaacataaagcaaaagaattataatggaattaccccctacattgtggtttatgcgatcctctctacca

SEQ ID NO: 277416 - DNA, 912 bp, Homo sapiens
atctgcaggagcaggatgcaggcctccctctggatggctcccttccagtggcacagagaccagctcacctccaatgacaaggaagagtatcagcatgacgggatagaagaaccccaggacgaagcagaagatatactcatgggccactgcggagaccaggaacacacccagcatggctacccctcgggcccgggcaccaaggagctggcagggtgctgcctccaaggccccgaaacagagagtgctactgcgaacaaatcaacctcttccactccactgctgcttttggtgccccataacgacgaccccctctcagcaggaagtagccagaaagattacgactccccatctccctgcgattctcatgataaataaatatccatgcatgataaaaatcgtgtaaattgacagtggggactgtgacaagcaggtctcactaatgcagacctccataacaactgtttcagtactgactgagtggttaagttaaatgttaaaaaccagtgcccttatacaaaggctggaatgtaacaaaagcccaccaagagttttgcctaggcctttcctgaacctcaaagcatgattaaacaagttttgctgggggtctgaagaaactccccaaacctccgttatttagcaggagataagagaagggtaatcaccccagcacctggacccatttagattaagtaaacttactgaggctccagaagaaggtcttcaagactcagaccttagttatagattaaaagaagttaatcacttatgtctttagatgaatgcacacctacacatagatgtagagcttagaaggatatatgctctggaaattgtaatttttagtggcctgtgataatttccaggccttctccctgtaactggttacagaaataaaaactcacttcctcccca

SEQ ID NO: 277417 - DNA, 885 bp, Homo sapiens
agagaccgggatggtgctgtgttcagccaccagtggcttgcgatgagacagtcttcaggagggtccaagcagctgcccgtgagatttttcctggggaccctcccgagggctgtcccgtgtgcaaaactgcacgtccctttcactactggggaagaacagagatcagaagcagacacgctcaaagggtgctgcctccaaggccccgaaacagagagtgctactgcgaacaaatcaacctcttccactccactgctgcttttggtgccccataacgacgaccccctctcagcaggaagtagccagaaagattacgactccccatctccctgcgattctcatgataaataaatatccatgcatgataaaaatcgtgtaaattgacagtggggactgtgacaagcaggtctcactaatgcagacctccataacaactgtttcagtactgactgagtggttaagttaaatgttaaaaaccagtgcccttatacaaaggctggaatgtaacaaaagcccaccaagagttttgcctaggcctttcctgaacctcaaagcatgattaaacaagttttgctgggggtctgaagaaactccccaaacctccgttatttagcaggagataagagaagggtaatcaccccagcacctggacccatttagattaagtaaacttactgaggctccagaagaaggtcttcaagactcagaccttagttatagattaaaagaagttaatcacttatgtctttagatgaatgcacacctacacatagatgtagagcttagaaggatatatgctctggaaattgtaatttttagtggcctgtgataatttccaggccttctccctgtaactggttacagaaataaaaactcacttcctcccca

SEQ ID NO: 277418 - DNA, 1327 bp, Homo sapiens
tgagatactttttccagtttgagcgctggcttgtggggagagtgcacactctgagagcagtttttcccacagaggatatgtgtacaggctttgtccctggcaccaaaactctggtgactcatcttctcctgggatggggttttctcctcactctcccctggagaatttctacattgccttcttgatgttggctcactctccaagcctttttgtagctcagagtgcccaataaactcctctggactttctctgtaaagccttgtttatttctacttcctctgaatcatcccattttagattttcttttttaatctcgttcttgaactcaaaacctgaaaaaaaaaaaccccacagaaatacaatggactatagagaaggaaaacaatggaatgcaaagttataactatactacgtagaagaaatatctaattgaaattcttcatgtgattaagtctcctgctaattaatagctttttattttctcattgtaatatttttgagctccaaattattacaggaaaattatgccctaaactccaacttttctcctatcttttttcggatgttctgacacaatgacaaactgaggcaagacattaagcactatatcatctgccagtctgtttataggtgtaccctcaattcttgaatgttctaacttctagcagcagaataacaaaaggcaaccctgggcttggccagctcaaacaggaagaaagcaaggtgctaagtacccagccagcataggctcaggctgtgaaaggcaaggccatgctagagaaaaagggagaagatggacctggtctggaggcctaaccagcagtctgacaatgcatagtgaaactccatgggaaaagatgacatgaacttagttgaaagaggttggcaaatgcaaaatcagggctgtaaaatgcaaggggaataacctttaactccatgaaaaccaaaacttggatagggtcacacatcaagatgatgatgatgccaggatcagtgacagctcctactcaactgctaggctaatggcctctaaagtggactttgccatcctttgaccatcagagccaagggagtcttaccaagtctgtttgggaacagcactggcaggtctagtttcctgacttcctggccaggattcctgaagtccttttcatccctgtctgcaccatccacagtgccatcttctacctccgtgggttccccattctggtgattcagctctccagcctcaatatcacttccttcttggccaggaacagcatcgcttgccataggaggtgcagaggcccaggagcctgaaagagcattcatttcctcatgaaagata

SEQ ID NO: 277419 - DNA, 783 bp, Homo sapiens
tccggcgtgctccgcaacagcttccggcgtgacgcagtagaaaaggtggcgtggctggcgattcgtgttcgtgagggccttttctggtgtaccctcaattcttgaatgttctaacttctagcagcagaataacaaaaggcaaccctgggcttggccagctcaaacaggaagaaagcaaggtgctaagtacccagccagcataggctcaggctgtgaaaggcaaggccatgctagagaaaaagggagaagatggacctggtctggaggcctaaccagcagtctgacaatgcatagtgaaactccatgggaaaagatgacatgaacttagttgaaagaggttggcaaatgcaaaatcagggctgtaaaatgcaaggggaataacctttaactccatgaaaaccaaaacttggatagggtcacacatcaagatgatgatgatgccaggatcagtgacagctcctactcaactgctaggctaatggcctctaaagtggactttgccatcctttgaccatcagagccaagggagtcttaccaagtctgtttgggaacagcactggcaggtctagtttcctgacttcctggccaggattcctgaagtccttttcatccctgtctgcaccatccacagtgccatcttctacctccgtgggttccccattctggtgattcagctctccagcctcaatatcacttccttcttggccaggaacagcatcgcttgccataggaggtgcagaggcccaggagcctgaaagagcattcatttcctcatgaaagata

SEQ ID NO: 277420 - DNA, 391 bp, Homo sapiens
tcctggggaaggggctgctgcgggggcgactgctgtgggggctgagcgggggcctgcgccgcttggccttcaggatcttgttcacgtggtccaggttcttcttggtggacaggatcttggtgtagttgcacatcttccgcacttcgcactggatggcttcgatctcccgccgcttgaacctcttcttcagggaggagccgactgcgggaggggaagagataagaaattgagcacaggatgcaaggtgccttcaactcagcctcttcactgacagctagcattctacttggctataaagattatagagaattaatgctatgggtatgtctccgtgcccaagatgcattattcctttttctttattaaaataaaaacaaacatttctcaaata

SEQ ID NO: 277421 - DNA, 657 bp, Homo sapiens
gggcaggagtggcgctgtatccacattcacttcagaagttgaagattccaaataggagaataagtggggagaggggagacaaggaagagggtttggccctgcttcagggcccactgggtgggtaggtgtggggaggaagatggggacagatgggaggagagctcagagccagggttcacccaccgcccccaggcttcttcagatagtcaccaccaccccggccatcagtggagatttcccggaaaacagtgagcatggagtgccggactctgtcagccagagctgggacgtcatctggtgtcagcccttccgtgggcactgggggcagcacccgcacctgacattgtcctggggcaaggggagcaccatcatggcctgtccacccaggtctttgcccacaggtggggcccagcttccgagtgatactcttcctcaacctttcagttctcttcccccaaccctggacaaccatccctgggcttgccagctgccacttctgaggcccttctcctatacaaagccttctccaatccccagttcagacatctcctcagcacccctccagcccccctcctctgggtttggcatttactgctgaatgagtgttattcattacagctttgtgcacacaggccttatctttcctgttaagattag

SEQ ID NO: 277422 - DNA, 560 bp, Homo sapiens
gggcaggagtggcgctgtatccacattcacttcagaagttgaagattccaaataggagaataagtggggagaggggagacaaggaagagggtttggccctgcttcagggcccactgggtgggtaggtgtggggaggaagatggggacagatgggaggagagctcagagccagggttcacccaccgcccccaggcttcttcagatagtcaccaccaccccggccatcagtggagatttcccggaaaacagtgagcatggagtgccggactctgtcagccagagctgggacgtcatctggtgtcagcccttccgtgggcactgggggcagcacccgcacctgacattgtcctggggcaaggggagcaccatcatggcctgtccacccaggtctttgcccacagggatgtcctcccagcctctccggacacaccctaccccagaactgctcaaagccctcacccgaggtgaagcgacgctccttcttgcagtagaagtcttggatgactcacgtcctgggtgagcagggtctgggcgacctcagacatgacactgatggcatc

SEQ ID NO: 277423 - DNA, 1681 bp, Homo sapiens
  misc_feature (186)..(186): n is a, c, g, or t
ggcaggagggaaaggttatgggtcggcccggcggtctctcccagcacccgcgactctcaccttgctcagctgctggtggatgagctgcttcagctcggaggctttctccggaggcagcgacatgctggcagccggcgtctccccgccgcttctccccgcctcagatgccctaactgcgcggccccngccgggccagggagcgttaggagcgactgagcacaaagcgccgcagccgttcgcctagcgcagctcccgggggacgcaacgccgcgtcaggccgggggctgacctggaaatgaggccccggcggcgcggcgccaactgttttcaaacagtggcggacaaacagggcttggggctggcccgcacgctgcctgatcgtttccgcccgccgctccacctccccgcgggccccgcaccccgagacctcagcgcaccccatcgccttgcttgccagggtctccgaaagcgctgctggcccctcttcgcggccacccggcggcctctttccgccctctgaaccggcagttagctggcagcctcaaggcccggcgcccagggactcaaaggaccctcccgcgccccgcgaggctccggggtctcgggcttccgccttcttgctgccctcgttcttgccagggccgcggttagtccctgctggccaccccactgcgaccatgttcgttccctgcggggagtcggcccccgaccttgccggcttcaccctcctaatgccagcagtatctgttggaaatgttggccagcttgcaatggatctgattatttctacactgaatatgtctaagattggttacttctataccgattgtcttgtgccaatggttggaaacaatccatatgcgaccacagaaggaaattcaacagaacttagcataaatgctgaagtgtattcattgccttcaagaaagctggtggctctacagttaagatccatttttattaagtataaatcaaagccattctgtgaaaaactgctttcctgggtgaaaagcagtggctgtgccagagtcattgttctttcaagcagtcattcatatcagcgtaatgatctgcagcttcgtagtactcccttccggtacctacttacaccttccatgcaaaaaagtgttcaaaataaaataaagagccttaactgggaagaaatggaaaaaagccggtgcattcctgaaatagatgattccgagttttgtatccgcattccgggaggaggtatcacaaaaacactctatgatgaaagctgttctaaagaaatccaaatggcagttctgctgaaatttgtttcagaaggggacaacatcccagatgcattaggtcttgttgagtatcttaatgagtggcttcagatactcaaaccacttagcgatgaccccacagtatctgcctcacggtggaaaataccaagttcttggagattactctttggcagtggtcttccccctgcacttttctgatctaatttctgttttataccttatacccaaaacacttactaccaacacagctgttaaacattctatacaaaaaaattgtatgatctggtattaggaaattactttcacagtaaatatcaaagaaaaaagattaagggtctctttgccatgcttttcatcatatgcaccaaatgtaaattttgtacaataaaattttatttcctaagtaa

SEQ ID NO: 277424 - DNA, 984 bp, Homo sapiens
ctggttgaatacctccctctccactcccatcttcaggccagcagtatctgttggaaatgttggccagcttgcaatggatctgattatttctacactgaatatgtctaagattggttacttctataccgattgtcttgtgccaatggttggaaacaatccatatgcgaccacagaaggaaattcaacagaacttagcataaatgctgaagtgtattcattgccttcaagaaagctggtggctctacagttaagatccatttttattaagtataaatcaaagccattctgtgaaaaactgctttcctgggtgaaaagcagtggctgtgccagagtcattgttctttcaagcagtcattcatatcagcgtaatgatctgcagcttcgtagtactcccttccggtacctacttacaccttccatgcaaaaaagtgttcaaaataaaataaagagccttaactgggaagaaatggaaaaaagccggtgcattcctgaaatagatgattccgagttttgtatccgcattccgggaggaggtatcacaaaaacactctatgatgaaagctgttctaaagaaatccaaatggcagttctgctgaaatttgtttcagaaggggacaacatcccagatgcattaggtcttgttgagtatcttaatgagtggcttcagatactcaaaccacttagcgatgaccccacagtatctgcctcacggtggaaaataccaagttcttggagattactctttggcagtggtcttccccctgcacttttctgatctaatttctgttttataccttatacccaaaacacttactaccaacacagctgttaaacattctatacaaaaaaattgtatgatctggtattaggaaattactttcacagtaaatatcaaagaaaaaagattaagggtctctttgccatgcttttcatcatatgcaccaaatgtaaattttgtacaataaaattttatttcctaagtaa

SEQ ID NO: 277425 - DNA, 830 bp, Homo sapiens
cgcggcgcgcgacgcgagagacgacgaggaacaacagaacttagctaatgctgagtgtattcattgccttcaagaaagctggtggctctacagttaagatccatttttattaagtataaatcaaagccattctgtgaaaaactgctttcctgggtgaaaagcagtggctgtgccagagtcattgttctttcaagcagtcattcatatcagcgtaatgatctgcagcttcgtagtactcccttccggtacctacttacaccttccatgcaaaaaagtgttcaaaataaaataaagagccttaactgggaagaaatggaaaaaagccggtgcattcctgaaatagatgattccgagttttgtatccgcattccgggaggaggtatcacaaaaacactctatgatgaaagctgttctaaagaaatccaaatggcagttctgctgaaatttgtttcagaaggggacaacatcccagatgcattaggtcttgttgagtatcttaatgagtggcttcagatactcaaaccacttagcgatgaccccacagtatctgcctcacggtggaaaataccaagttcttggagattactctttggcagtggtcttccccctgcacttttctgatctaatttctgttttataccttatacccaaaacacttactaccaacacagctgttaaacattctatacaaaaaaattgtatgatctggtattaggaaattactttcacagtaaatatcaaagaaaaaagattaagggtctctttgccatgcttttcatcatatgcaccaaatgtaaattttgtacaataaaattttatttcctaagtaa

SEQ ID NO: 277426 - DNA, 1111 bp, Homo sapiens
aaaagcagctgtaccgtccgaatccggggtctcgggcttccgccttcttgctgccctcgttcttgccagggccgcggttagtccctgctggccaccccactgcgaccatgttcgttccctgcggggagtcggcccccgaccttgccggcttcaccctcctaatgccagcagtatctgttggaaatgttggccagcttgcaatggatctgattatttctacactgaatatgtctaagattggttacttctataccgattgtcttgtgccaatggttggaaacaatccatatgcgaccacagaaggaaattcaacagaacttagcataaatgctgaagtgtattcattgccttcaagaaagctggtggctctacagttaagatccatttttattaagtataaatcaaagccattctgtgaaaaactgctttcctgggtgaaaagcagtggctgtgccagagtcattgttctttcaagcagtcattcatatcagcgtaatgatctgcagcttcgtagtactcccttccggtacctacttacaccttccatgcaaaaaagtgttcaaaataaaataaagagccttaactgggaagaaatggaaaaaagccggtgcattcctgaaatagatgattccgagttttgtatccgcattccgggaggaggtatcacaaaaacactctatgatgaaagctgttctaaagaaatccaaatggcagttctgctgaaatttgtttcagaaggggacaacatcccagatgcattaggtcttgttgagtatcttaatgagtggcttcagatactcaaaccacttagcgatgaccccacagtatctgcctcacggtggaaaataccaagttcttggagattactctttggcagtggtcttccccctgcacttttctgatctaatttctgttttataccttatacccaaaacacttactaccaacacagctgttaaacattctatacaaaaaaattgtatgatctggtattaggaaattactttcacagtaaatatcaaagaaaaaagattaagggtctctttgccatgcttttcatcatatgcaccaaatgtaaattttgtacaataaaattttatttcctaagtaa

SEQ ID NO: 277427 - DNA, 1914 bp, Homo sapiens
  misc_feature (186)..(186): n is a, c, g, or t
ggcaggagggaaaggttatgggtcggcccggcggtctctcccagcacccgcgactctcaccttgctcagctgctggtggatgagctgcttcagctcggaggctttctccggaggcagcgacatgctggcagccggcgtctccccgccgcttctccccgcctcagatgccctaactgcgcggccccngccgggccagggagcgttaggagcgactgagcacaaagcgccgcagccgttcgcctagcgcagctcccgggggacgcaacgccgcgtcaggccgggggctgacctggaaatgaggccccggcggcgcggcgccaactgttttcaaacagtggcggacaaacagggcttggggctggcccgcacgctgcctgatcgtttccgcccgccgctccacctccccgcgggccccgcaccccgagacctcagcgcaccccatcgccttgcttgccagggtctccgaaagcgctgctggcccctcttcgcggccacccggcggcctctttccgccctctgaaccggcagttagctggcagcctcaaggcccggcgcccagggactcaaaggaccctcccgcgccccgcgaggctccggggtctcgggcttccgccttcttgctgccctcgttcttgccagggccgcggttagtccctgctggccaccccactgcgaccatgttcgttccctgcggggagtcggcccccgaccttgccggcttcaccctcctaatgccagcagtatctgttggaaatgttggccagcttgcaatggatctgattatttctacactgaatatgtctaagattggttacttctataccgattgtcttgtgccaatggttggaaacaatccatatgcgaccacagaaggaaattcaacagaacttagcataaatgctgaagtgtattcattgccttcaagaaagctggtggctctacagttaagatccatttttattaagtataaatcaaagccattctgtgaaaaactgctttcctgggtgaaaagcagtggctgtgccagagtcattgttctttcaagcagtcattcatatcagcgtaatgatctgcagcttcgtagtactcccttccggtacctacttacaccttccatgcaaaaaagtgttcaaaataaaataaagagccttaactgggaagaaatggaaaaaagccggtgcattcctgaaatagatgattccgagttttgtatccgcattccgggaggaggtatcacaaaaacactctatgatgaaagctgttctaaagaaatccaaatggcagttctgctgaaatttgtttcagaaggggacaacatcccagatgcattaggtcttgttgagtatcttaatgagtggcttcagatactcaaaccacttagcgatgaccccacagtatctgcctcacggtggaaaataccaagttcttggagattactctttggcagtggtcttccccctgcacttttctgatctaatttctgttttataccttatacccaaaacacttactaccaacacagctgttaaacattctatacaaaaaaattgtatgatctggtattaggaaattactttcacagtaaatatcaaagaaaaaagattaagggtctctttgccatgcttttcatcatatgcaccaaatgtaaattttgtacaataaaattttatttcctaagtaaaaaaaaaaaagaaacaacacaaacactaaacataaacaacacaatatctaccccacatcacacccaacccacaccacacccatactccacttacaacacaaatactccacactaataccaacacccacgactcatccacacccgcccacctcacctcccacccccctcttcgcgccccaccacctcttcctactcacccccaccacccacagaccctgggaaacacaagctta

SEQ ID NO: 277428 - DNA, 1595 bp, Homo sapiens
  misc_feature (186)..(186): n is a, c, g, or t
ggcaggagggaaaggttatgggtcggcccggcggtctctcccagcacccgcgactctcaccttgctcagctgctggtggatgagctgcttcagctcggaggctttctccggaggcagcgacatgctggcagccggcgtctccccgccgcttctccccgcctcagatgccctaactgcgcggccccngccgggccagggagcgttaggagcgactgagcacaaagcgccgcagccgttcgcctagcgcagctcccgggggacgcaacgccgcgtcaggccgggggctgacctggaaatgaggccccggcggcgcggcgccaactgttttcaaacagtggcggacaaacagggcttggggctggcccgcacgctgcctgatcgtttccgcccgccgctccacctccccgcgggccccgcaccccgagacctcagcgcaccccatcgccttgcttgccagggtctccgaaagcgctgctggcccctcttcgcggccacccggcggcctctttccgccctctgaaccggcagttagctggcagcctcaaggcccggcgcccagggactcaaaggaccctcccgcgccccgcgaggctccggggtctcgggcttccgccttcttgctgccctcgttcttgccagggccgcggttagtccctgctggccaccccactgcgaccatgttcgttccctgcggggagtcggcccccgaccttgccggcttcaccctcctaatgccagcagtatctgttggaaatgttggccagcttgcaatggatctgattatttctacactgaatatgtctaagattggttacttctataccgattgtcttgtgccaatggttggaaacaatccatatgcgaccacagaaggaaattcaacagaacttagcataaatgctgaagtgtattcattgccttcaagaaagctggtggctctacagttaagatccatttttattaagtataaatcaaagccattctgtgaaaaactgctttcctgggtgaaaagcagtggctgtgccagagtcattgttctttcaagcagtcattcatatcagcgtaatgatctgcagcttcgtagtactcccttccggtacctacttacaccttccatgcaaaaaagtgttcaaaataaaataaagagccttaactgggaagaaatggaaaaaagccggtgcattcctgaaatagatgattccgagttttgtatccgcattccgggaggaggtatcacaaaaacactctatgatgaaagctgttctaaagaaatccaaatggcagttctgctgaaatttgtttcagaaggggacaacatcccagatgcattaggtcttgttgagtatcttaatgagtggcttcagatactcaaaccacttagcgatgaccccacagtatctgcctcacggtggaaaataccaagttcttggagattactctttggcagtggtcttccccctgcacttttctgatctaatttctgttttataccttatacccaaaacacttactaccaacacagctgttaaacattctatacaaaaaaattgtatgatctggtattaggaaattactttcacagtaaatatcaaaga

SEQ ID NO: 277429 - DNA, 1614 bp, Homo sapiens
  misc_feature (186)..(186): n is a, c, g, or t
ggcaggagggaaaggttatgggtcggcccggcggtctctcccagcacccgcgactctcaccttgctcagctgctggtggatgagctgcttcagctcggaggctttctccggaggcagcgacatgctggcagccggcgtctccccgccgcttctccccgcctcagatgccctaactgcgcggccccngccgggccagggagcgttaggagcgactgagcacaaagcgccgcagccgttcgcctagcgcagctcccgggggacgcaacgccgcgtcaggccgggggctgacctggaaatgaggccccggcggcgcggcgccaactgttttcaaacagtggcggacaaacagggcttggggctggcccgcacgctgcctgatcgtttccgcccgccgctccacctccccgcgggccccgcaccccgagacctcagcgcaccccatcgccttgcttgccagggtctccgaaagcgctgctggcccctcttcgcggccacccggcggcctctttccgccctctgaaccggcagttagctggcagcctcaaggcccggcgcccagggactcaaaggaccctcccgcgccccgcgaggctccggggtctcgggcttccgccttcttgctgccctcgttcttgccagggccgcggttagtccctgctggccaccccactgcgaccatgttcgttccctgcggggagtcggcccccgaccttgccggcttcaccctcctaatgccagcagtatctgttggaaatgttggccagcttgcaatggatctgattatttctacactgaatatgtctaagattggttacttctataccgattgtcttgtgccaatggttggaaacaatccatatgcgaccacagaaggaaattcaacagaacttagcataaatgctgaagtgtattcattgccttcaagaaagctggtggctctacagttaagatccatttttattaagtataaatcaaagccattctgtgaaaaactgctttcctgggtgaaaagcagtggctgtgccagagtcattgttctttcaagcagtcattcatatcagcgtaatgatctgcagcttcgtagtactcccttccggtacctacttacaccttccatgcaaaaaagtgttcaaaataaaataaagagccttaactgggaagaaatggaaaaaagccggtgcattcctgaaatagatgattccgagttttgtatccgcattccgggaggaggtatcacaaaaacactctatgatgaaagctgttctaaagaaatccaaatggcagttctgctgaaatttgtttcagaaggggacaacatcccagatgcattaggtcttgttgagtatcttaatgagtggcttcagatactcaaaccacttagcgatgaccccacagtatctgcctcacggtggaaaataccaagttcttggagattactctttggcagtggtcttccccctgcacttttctgatctaatttctgttttataccttatacccaaaacacttactaccaacacagctgttaaacattctatacaaaaaaattgtatgatctggtattaggaaattacctcgtgccgaattcggcacgagattttttatttttttaag

SEQ ID NO: 277430 - DNA, 2500 bp, Homo sapiens
  misc_feature (186)..(186): n is a, c, g, or t
ggcaggagggaaaggttatgggtcggcccggcggtctctcccagcacccgcgactctcaccttgctcagctgctggtggatgagctgcttcagctcggaggctttctccggaggcagcgacatgctggcagccggcgtctccccgccgcttctccccgcctcagatgccctaactgcgcggccccngccgggccagggagcgttaggagcgactgagcacaaagcgccgcagccgttcgcctagcgcagctcccgggggacgcaacgccgcgtcaggccgggggctgacctggaaatgaggccccggcggcgcggcgccaactgttttcaaacagtggcggacaaacagggcttggggctggcccgcacgctgcctgatcgtttccgcccgccgctccacctccccgcgggccccgcaccccgagacctcagcgcaccccatcgccttgcttgccagggtctccgaaagcgctgctggcccctcttcgcggccacccggcggcctctttccgccctctgaaccggcagttagctggcagcctcaaggcccggcgcccagggactcaaaggaccctcccgcgccccgcgaggctccggggtctcgggcttccgccttcttgctgccctcgttcttgccagggccgcggttagtccctgctggccaccccactgcgaccatgttcgttccctgcggggagtcggcccccgaccttgccggcttcaccctcctaatgccagcagtatctgttggaaatgttggccagcttgcaatggatctgattatttctacactgaatatgtctaagattggttacttctataccgattgtcttgtgccaatggttggaaacaatccatatgcgaccacagaaggaaattcaacagaacttagcataaatgctgaagtgtattcattgccttcaagaaagctggtggctctacagttaagatccatttttattaagtataaatcaaagccattctgtgaaaaactgctttcctgggtgaaaagcagtggctgtgccagagtcattgttctttcaagcagtcattcatatcagcgtaatgatctgcagcttcgtagtactcccttccggtacctacttacaccttccatgcaaaaaagtgttcaaaataaaataaagagccttaactgggaagaaatggaaaaaagccggtgcattcctgaaatagatgattccgagttttgtatccgcattccgggaggaggtatcacaaaaacactctatgatgaaagctgttctaaagaaatccaaatggcagttctgctgaaatttgtttcagaaggggacaacatcccagatgcattaggtcttgttgagtatcttaatgagtggcttcagatactcaaaccacttgtaagttctattatagcttaagcctcttctttgtctggttgtattcattaactcgcactttatatactacctaagtagaccaagtaagtgaacgtttgtattaaatatagacatatctttacataaaatttagtttaagctgaacttttgaaaattagaggacagttaaccaacctattatttacagttttttcattaaagctgactttccaaaaaggaaaatccttagttcttcattgtacttactattcatgttagattaattatgccagacatagtcttgcaataataaacaagccttctgtggaattcaggaatttttttagggaagtaaaaagtattgctatgtgagcaatactgtagctattgaatatgtattacagttgatatttttctctattatgaaatgagagcattacacccagggaagtgagttagcctttaggcataacagaacactgagcataaggctgctttctaagatgggtaactagctttttaattcatgcttttgccaagaacaaattgatacaaatcacataatgctgattttttttttaatccctattctttttgaatgtgattttccctaataaacttcatctacagcctttctggcatatctttataatttggaacttaaagaaatttatcttcagttgacatgaagacaaagaaactttatttttccttaacaataaaacctggctataaaagtgccaaccaaaaggaacacaaaaggagagttttataattcactttaaaaggagatttgatggtaaagtttaaagattaaaatattttgttcttcaattacagagcgatgaccccacagtatctgcctcacggtggaaaataccaagttcttggagattactctttggcagtggtcttccccctgcacttttctgatctaatttctgttttataccttatacccaaaacacttactaccaacacagctgttaaacattctatacaaaaaaattgtatgatctggtattaggaaattactttcacagtaaatatcaaagaaaaaagattaagggtctctttgccatgcttttcatcatatgcaccaaatgtaaattttgtacaataaaattttatttcctaagtaa

SEQ ID NO: 277431 - DNA, 1047 bp, Homo sapiens
ctgaggagctacagctattatgcaacagagccaggttcaagctctgagctgttttactccaaaggctgtggcaataagaactcctctgagaaatgtgtggccagcagtatctgttggaaatgttggccagcttgcaatggatctgattatttctacactgaatatgtctaagattggttacttctataccgattgtcttgtgccaatggttggaaacaatccatatgcgaccacagaaggaaattcaacagaacttagcataaatgctgaagtgtattcattgccttcaagaaagctggtggctctacagttaagatccatttttattaagtataaatcaaagccattctgtgaaaaactgctttcctgggtgaaaagcagtggctgtgccagagtcattgttctttcaagcagtcattcatatcagcgtaatgatctgcagcttcgtagtactcccttccggtacctacttacaccttccatgcaaaaaagtgttcaaaataaaataaagagccttaactgggaagaaatggaaaaaagccggtgcattcctgaaatagatgattccgagttttgtatccgcattccgggaggaggtatcacaaaaacactctatgatgaaagctgttctaaagaaatccaaatggcagttctgctgaaatttgtttcagaaggggacaacatcccagatgcattaggtcttgttgagtatcttaatgagtggcttcagatactcaaaccacttagcgatgaccccacagtatctgcctcacggtggaaaataccaagttcttggagattactctttggcagtggtcttccccctgcacttttctgatctaatttctgttttataccttatacccaaaacacttactaccaacacagctgttaaacattctatacaaaaaaattgtatgatctggtattaggaaattactttcacagtaaatatcaaagaaaaaagattaagggtctctttgccatgcttttcatcatatgcaccaaatgtaaattttgtacaataaaattttatttcctaagtaa

SEQ ID NO: 277432 - DNA, 739 bp, Homo sapiens
tattctctcaatggtgtgcaaagtataaatcaaagccattctgtgaaaaactgctttcctgggtgaaaagcagtggctgtgccagagtcattgttctttcaagcagtcattcatatcagcgtaatgatctgcagcttcgtagtactcccttccggtacctacttacaccttccatgcaaaaaagtgttcaaaataaaataaagagccttaactgggaagaaatggaaaaaagccggtgcattcctgaaatagatgattccgagttttgtatccgcattccgggaggaggtatcacaaaaacactctatgatgaaagctgttctaaagaaatccaaatggcagttctgctgaaatttgtttcagaaggggacaacatcccagatgcattaggtcttgttgagtatcttaatgagtggcttcagatactcaaaccacttagcgatgaccccacagtatctgcctcacggtggaaaataccaagttcttggagattactctttggcagtggtcttccccctgcacttttctgatctaatttctgttttataccttatacccaaaacacttactaccaacacagctgttaaacattctatacaaaaaaattgtatgatctggtattaggaaattactttcacagtaaatatcaaagaaaaaagattaagggtctctttgccatgcttttcatcatatgcaccaaatgtaaattttgtacaataaaattttatttcctaagtaa

SEQ ID NO: 277433 - DNA, 591 bp, Homo sapiens
tgatttcaaatctctgagactgaggtagaaatgggaaaaaccaaatatggtacagagccttaactgggaagaaatggaaaaaagccggtgcattcctgaaatagatgattccgagttttgtatccgcattccgggaggaggtatcacaaaaacactctatgatgaaagctgttctaaagaaatccaaatggcagttctgctgaaatttgtttcagaaggggacaacatcccagatgcattaggtcttgttgagtatcttaatgagtggcttcagatactcaaaccacttagcgatgaccccacagtatctgcctcacggtggaaaataccaagttcttggagattactctttggcagtggtcttccccctgcacttttctgatctaatttctgttttataccttatacccaaaacacttactaccaacacagctgttaaacattctatacaaaaaaattgtatgatctggtattaggaaattactttcacagtaaatatcaaagaaaaaagattaagggtctctttgccatgcttttcatcatatgcaccaaatgtaaattttgtacaataaaattttatttcctaagtaa

SEQ ID NO: 277434 - DNA, 465 bp, Homo sapiens
accctatgaaagaatactgattcttatttttatttcttgtagctgttctaaagaaatccaaatggcagttctgctgaaatttgtttcagaaggggacaacatcccagatgcattaggtcttgttgagtatcttaatgagtggcttcagatactcaaaccacttagcgatgaccccacagtatctgcctcacggtggaaaataccaagttcttggagattactctttggcagtggtcttccccctgcacttttctgatctaatttctgttttataccttatacccaaaacacttactaccaacacagctgttaaacattctatacaaaaaaattgtatgatctggtattaggaaattactttcacagtaaatatcaaagaaaaaagattaagggtctctttgccatgcttttcatcatatgcaccaaatgtaaattttgtacaataaaattttatttcctaagtaa

SEQ ID NO: 277435 - DNA, 3900 bp, Homo sapiens
gaggaaatgttatcgttccatataaaaccatcgaagggactgccagaggtggaggggaggattttgaggacacttgtggagagctcgaattccagaatgatgaaattgttaggttgtgacagttggaagtgtcatgtacaacatgcggcgattaagtctttcacccaccttttcaatgggatttcatctgttagttactgtgagtctcttattttcccatgtggaccatgtaattgctgagacagaaatggaaggagaaggaaatgaaactggtgaatgtactggatcatattactgtaagaaaggggtgattttgcccatttgggaaccccaagacccttcttttggggacaaaattgctagagctactgtgtattttgtggccatggtctacatgtttcttggagtctctatcatagctgatcggttcatgtcctctatagaagtcatcacatctcaagaaaaagaaataaccataaagaaacccaatggagagaccaccaagacaactgtgaggatctggaatgaaacagtttctaacctgaccttgatggccctgggatcttctgctcctgagattctcctttcagtaattgaagtgtgtggccataacttcactgcaggagacctcggtcctagcaccatcgtgggaagtgctgcattcaatatgttcatcattattgcactctgtgtttatgtggtgcctgacggagagacaaggaagattaagcatttgcgtgtcttctttgtgacagcagcctggagcatctttgcctacacctggctttacattattttgtctgtcatatctcctggtgttgtggaggtctgggaaggtttgcttactttcttcttctttcccatctgtgttgtgttcgcttgggtagcggataggagacttctgttttacaagtatgtctacaagaggtatcgagctggcaagcagagggggatgattattgaacatgaaggagacaggccatcttctaagactgaaattgaaatggacgggaaagtggtcaattctcatgttgaaaatttcttagatggtgctctggttctggaggtggatgagagggaccaagatgatgaagaagctaggcgagaaatggctaggattctgaaggaacttaagcagaagcatccagataaagaaatagagcaattaatagaattagctaactaccaagtcctaagtcagcagcaaaaaagtagagcattttatcgcattcaagctactcgcctcatgactggagctggcaacattttaaagaggcatgcagctgaccaagcaaggaaggctgtcagcatgcacgaggtcaacactgaagtgactgaaaatgaccctgttagtaagatcttctttgaacaagggacatatcagtgtctggagaactgtggtactgtggcccttaccattatccgcagaggtggtgatttgactaacactgtgtttgttgacttcagaacagaggatggcacagcaaatgctgggtctgattatgaatttactgaaggaactgtggtgtttaagcctggtgatacccagaaggaaatcagagtgggtatcatagatgatgatatctttgaggaggatgaaaatttccttgtgcatctcagcaatgtcaaagtatcttctgaagcttcagaagatggcatactggaagccaatcatgtttctacacttgcttgcctcggatctccctccactgccactgtaactatttttgatgatgaccacgcaggcatttttacttttgaggaacctgtgactcatgtgagtgagagcattggcatcatggaggtgaaagtattgagaacatctggagctcgaggaaatgttatcgttccatataaaaccatcgaagggactgccagaggtggaggggaggattttgaggacacttgtggagagctcgaattccagaatgatgaaattgtcaaaacaatatcagtcaaggtaattgatgatgaggagtatgagaaaaacaagaccttcttccttgagattggagagccccgcctggtggagatgagtgagaagaaagccctgttattgaatgagcttggtggcttcacaataacaggaaaatacctgtttgttctagccaacctgtcttcaggaaggttcatgctagagaacatccgattctctctactgtaatcaccattgcagacgaatatgatgacaagcagccactgaccagcaaagaggaagaggagaggcgcattgcagaaatggggcgccccatcctgggagagcacaccaagttggaagtgatcattgaagaatcctatgaattcaagagtactgtggacaaactcattaagaagacaaacctggcccttgtggttgggactaacagctggagagaacagttcattgaagctatcactgtcagtgctggggaagatgatgacgacgatgaatgtggggaagagaagctgccctcctgtttcgattacgtgatgcactttctgactgtgttctggaaggtcctgtttgccttcgtcccccctactgaatactggaatggctgggcgtgtttcattgtctccatcctcatgattggcctactgacagctttcattggagacctggcttcccactttggctgcaccattggcctgaaagattctgtgactgcagtcgtgttcgtcgcacttggaacatcagtgccagacacatttgccagcaaagtggcagccacccaggaccagtatgcagacgcctccataggtaacgtcacgggcagcaacgcggtgaatgtcttcctgggaatcggtgtggcctggtccatcgctgccatctaccacgcagccaatggggaacagttcaaagtgtcccctggcacactagctttctctgtcactctcttcaccatttttgctttcatcaatgtgggggtgctgctgtatcggcggaggccagaaatcggaggtgagctgggtgggccccggactgccaagctcctcacatcctgcctctttgtgctcctatggctcttgtacattttcttctcctccctggaggcctactgccacataaaaggcttctaaaggaactatcagatatagtaaatttatatatatacatatatatacataaaaattatgtataatggacagaggaaactgacatttgtcatgttcacttacctgctgatggaatccagcttcaagagcatactctgtactagggccgaagtaaaaaaccatcacctcccattcccaggggcatcatcatgttcaacaaggcatggaggcagggccatctttgcagctcagtctagaagggctgcactctctccaggttgataaatccttaaggctttgatttgttttgtttttggttttgttttcagtggagctggggaggtagttaatgtttggctttatttttgttattttgttttgttttgtttttttgggagagtcagggttgttgcttttctttgtggaaagtgaaaccatccaaatgtaaatgggttttggtaaaaatttaaatcattagtattccccctcacctcccccaatcactttaaaacttattttggattaagaaaaaatctgggcatggaagaagaaagaagcatgtcttcatcgtattaccaaagttcatgcttatctccggaatgtgagtggaggtgaagctgcctccaagaagaagcataaaagtggaatggagccaggaaatccgatggttctagaaatagtctgatatttaaacatgtgatacctggcagtctcgtttaacaggtacaaggaaaacgtgcctagattcccaggaacgtgcaaaatcctttctttcttatctctttagctctggactgtgattggcaaggtccttcttccagcattcagcccagctaagcccccaggtgccccatcccaaccctg

SEQ ID NO: 277436 - DNA, 1737 bp, Homo sapiens
cctcctgtccacctgccatcccctatgcaaacagtaagaataaccccattcaaaaagcacatcatcgttttccatttgcattaacatgtgtctcagtcccatgttgccgttgcttgggattgtctgtcagttttattttcaaaggcatccatggcttgcacaatcctgttccagtcatgactgaacatttgctccttcttcatgtgccgttcggaaatgttgttgtgatacctgttacacagtgcatggtgaaaaacaaataaaacaaaacaaagagtatctgtatatagtagagtatagtacatactgttctcccatttggcaatgttgattggacattgaagacataagtgagttttcttttcacctgagttgttacttttgtgctgttattgagtttgattaattactagggataaaaggagaaaatggattattgttcacggttctgcacattcatttctaagaagcaataactgtcatgtggggagaagttaaagctattgagaggatagcaggcaaactacaaagatcttcatggaaaattagccatgtggaacacatcagaggcctctaaaaatcacccattaattcaggaaggccaaggagaaaggccttatagagacgttgatatgttggatgtgcctaggctttcagagccaccctttccacaacacccctccctgcaaagtatttatttcacatctgcactgtctggcacagatggtagatagtgctggtttgttcattttatttttttacttaaaaggctattttgagccctgtttctttcactgtccagtctagtcctctttgattatatcagtagttgctgagtaagaaagaagccagggtgaccaacgggcctttaaaagtgtgtctcctctacttatgctgaaagagaaggcaattaaataagactagtacctcccaggaggattggactgggatatttttaaccctttaaaaagaatagctgtttctatgttaaaataccaaagaacatggataaacccaacattccaaagtagtgagtccactaatgagaaaaataatagaatgactttggtcacctctcggagacttctgtgtctataaggaatcccaggctggagacattcctagccctctgtattgattcaaaaatacttaataaattaaagctgttgagacttattttttcttctgtcactcagtaaccatgatccttcctcatttaataaacatttggtgactgaatgagtaattaaatgctggttacccacttaatgtgccaggtagtatgatactttctggggactaagccatgaacaaaacagtctagatccctgccctcagaagggttacagtttatgtgattactattttcatgagtaaaagtgaagaaagccatatggaaagatttttatcttgcaagaaaaaacaattatgaaactcttttaacataaacacactgaaactgtatcaaagcaattgtccaaattgtatttatacccaagaatttctttaactaagagagcataaggcatatgtttggaaaaccaccctctttatctttgaccggcttgcagataaatatatctctccattttaaaccaagaagggcaatcatgttggtgatccagatcactgagaaagcccagtgtatcccatcttttatctttgttggcaatggaacttttctatggcccacactttacaattctttgtcattctaacccatccttcccatcctta

SEQ ID NO: 277437 - DNA, 4095 bp, Homo sapiens
gcttcccacagaagatgggagcgacctcttcctgatcgggagctgtttaaaaggagggagtgcgccgtattttctactagcgtggaggaacggaggaagaatccattcacactccccaaaccaggggatgtcatggtctagaacacctatgctgaagtacaaggctgagcaagaaagatcactccactgcaactgagcaaagtgctgaaggagttgaaaggaagaagagaacatcggacgtggtttcacggaggaggaagcattttaatttattcagaaagagtgaaaaggattttgaaagcaaataaggctagccacttttgaaacatgtcaaagagccccagcttatttacgacaagtaggttgtgacagttggaagtgtcatgtacaacatgcggcgattaagtctttcacccaccttttcaatgggatttcatctgttagttactgtgagtctcttattttcccatgtggaccatgtaattgctgagacagaaatggaaggagaaggaaatgaaactggtgaatgtactggatcatattactgtaagaaaggggtgattttgcccatttgggaaccccaagacccttcttttggggacaaaattgctagagctactgtgtattttgtggccatggtctacatgtttcttggagtctctatcatagctgatcggttcatgtcctctatagaagtcatcacatctcaagaaaaagaaataaccataaagaaacccaatggagagaccaccaagacaactgtgaggatctggaatgaaacagtttctaacctgaccttgatggccctgggatcttctgctcctgagattctcctttcagtaattgaagtgtgtggccataacttcactgcaggagacctcggtcctagcaccatcgtgggaagtgctgcattcaatatgttcatcattattgcactctgtgtttatgtggtgcctgacggagagacaaggaagattaagcatttgcgtgtcttctttgtgacagcagcctggagcatctttgcctacacctggctttacattattttgtctgtcatatctcctggtgttgtggaggtctgggaaggtttgcttactttcttcttctttcccatctgtgttgtgttcgcttgggtagcggataggagacttctgttttacaagtatgtctacaagaggtatcgagctggcaagcagagggggatgattattgaacatgaaggagacaggccatcttctaagactgaaattgaaatggacgggaaagtggtcaattctcatgttgaaaatttcttagatggtgctctggttctggaggtggatgagagggaccaagatgatgaagaagctaggcgagaaatggctaggattctgaaggaacttaagcagaagcatccagataaagaaatagagcaattaatagaattagctaactaccaagtcctaagtcagcagcaaaaaagtagagcattttatcgcattcaagctactcgcctcatgactggagctggcaacattttaaagaggcatgcagctgaccaagcaaggaaggctgtcagcatgcacgaggtcaacactgaagtgactgaaaatgaccctgttagtaagatcttctttgaacaagggacatatcagtgtctggagaactgtggtactgtggcccttaccattatccgcagaggtggtgatttgactaacactgtgtttgttgacttcagaacagaggatggcacagcaaatgctgggtctgattatgaatttactgaaggaactgtggtgtttaagcctggtgatacccagaaggaaatcagagtgggtatcatagatgatgatatctttgaggaggatgaaaatttccttgtgcatctcagcaatgtcaaagtatcttctgaagcttcagaagatggcatactggaagccaatcatgtttctacacttgcttgcctcggatctccctccactgccactgtaactatttttgatgatgaccacgcaggcatttttacttttgaggaacctgtgactcatgtgagtgagagcattggcatcatggaggtgaaagtattgagaacatctggagctcgaggaaatgttatcgttccatataaaaccatcgaagggactgccagaggtggaggggaggattttgaggacacttgtggagagctcgaattccagaatgatgaaattgtgaagatcattaccattagaatatttgaccgtgaggaatatgagaaagagtgcagtttctcccttgtgcttgaggaaccaaaatggataagaagaggaatgaaaggtttctagccaacctgtcttcaggaaggttcatgctagagaacatccgattctctctactgtaatcaccattgcagacgaatatgatgacaagcagccactgaccagcaaagaggaagaggagaggcgcattgcagaaatggggcgccccatcctgggagagcacaccaagttggaagtgatcattgaagaatcctatgaattcaagagtactgtggacaaactcattaagaagacaaacctggcccttgtggttgggactaacagctggagagaacagttcattgaagctatcactgtcagtgctggggaagatgatgacgacgatgaatgtggggaagagaagctgccctcctgtttcgattacgtgatgcactttctgactgtgttctggaaggtcctgtttgccttcgtcccccctactgaatactggaatggctgggcgtgtttcattgtctccatcctcatgattggcctactgacagctttcattggagacctggcttcccactttggctgcaccattggcctgaaagattctgtgactgcagtcgtgttcgtcgcacttggaacatcagtgccagacacatttgccagcaaagtggcagccacccaggaccagtatgcagacgcctccataggtaacgtcacgggcagcaacgcggtgaatgtcttcctgggaatcggtgtggcctggtccatcgctgccatctaccacgcagccaatggggaacagttcaaagtgtcccctggcacactagctttctctgtcactctcttcaccatttttgctttcatcaatgtgggggtgctgctgtatcggcggaggccagaaatcggaggtgagctgggtgggccccggactgccaagctcctcacatcctgcctctttgtgctcctatggctcttgtacattttcttctcctccctggaggcctactgccacataaaaggcttctaaaggaactatcagatatagtaaatttatatatatacatatatatacataaaaattatgtataatggacagaggaaactgacatttgtcatgttcacttacctgctgatggaatccagcttcaagagcatactctgtactagggccgaagtaaaaaaccatcacctcccattcccaggggcatcatcatgttcaacaaggcatggaggcagggccatctttgcagctcagtctagaagggctgcactctctccaggttgataaatccttaaggctttgatttgttttgtttttggttttgttttcagtggagctggggaggtagttaatgtttggctttatttttgttattttgttttgttttgtttttttgggagagtcagggttgttgcttttctttgtggaaagtgaaaccatccaaatgtaaatgggttttggtaaaaatttaaatcattagtattccccctcacctcccccaatcactttaaaacttattttggattaagaaaaaatctgggcatggaagaagaaagaagcatgtcttcatcgtattaccaaagttcatgcttatctccggaatgtgagtggaggtgaagctgcctccaagaagaagcataaaagtggaatggagccaggaaatccgatggttctagaaatagtctgatatttaaacatgtgatacctggcagtctcgtttaacaggtacaaggaaaacgtgcctagattcccaggaacgtgcaaaatcctttctttcttatctctttagctctggactgtgattggcaaggtccttcttccagcattcagcccagctaagcccccaggtgccccatcccaaccctg

SEQ ID NO: 277438 - DNA, 4071 bp, Homo sapiens
tccattccgccccctctttgttgcggaggcaaactgaggttcctggagtcagaatctatcagtcgtggtgactgccctggttgcactgtaagtatggggggacgtctccacgaaaaaaaactaactttctgccttgtgctctgcaggtccctccttctcccaccttccccaagtagctgctcctgacccccccacacaccttggcaaacgacaccagtggccgatagcaactggtgttttaaaaatactaatttggagccccatttgagacctacaacgggagagtctgcatcagattcggcctcagattctacagcatctgactacattcccagtaggttgtgacagttggaagtgtcatgtacaacatgcggcgattaagtctttcacccaccttttcaatgggatttcatctgttagttactgtgagtctcttattttcccatgtggaccatgtaattgctgagacagaaatggaaggagaaggaaatgaaactggtgaatgtactggatcatattactgtaagaaaggggtgattttgcccatttgggaaccccaagacccttcttttggggacaaaattgctagagctactgtgtattttgtggccatggtctacatgtttcttggagtctctatcatagctgatcggttcatgtcctctatagaagtcatcacatctcaagaaaaagaaataaccataaagaaacccaatggagagaccaccaagacaactgtgaggatctggaatgaaacagtttctaacctgaccttgatggccctgggatcttctgctcctgagattctcctttcagtaattgaagtgtgtggccataacttcactgcaggagacctcggtcctagcaccatcgtgggaagtgctgcattcaatatgttcatcattattgcactctgtgtttatgtggtgcctgacggagagacaaggaagattaagcatttgcgtgtcttctttgtgacagcagcctggagcatctttgcctacacctggctttacattattttgtctgtcatatctcctggtgttgtggaggtctgggaaggtttgcttactttcttcttctttcccatctgtgttgtgttcgcttgggtagcggataggagacttctgttttacaagtatgtctacaagaggtatcgagctggcaagcagagggggatgattattgaacatgaaggagacaggccatcttctaagactgaaattgaaatggacgggaaagtggtcaattctcatgttgaaaatttcttagatggtgctctggttctggaggtggatgagagggaccaagatgatgaagaagctaggcgagaaatggctaggattctgaaggaacttaagcagaagcatccagataaagaaatagagcaattaatagaattagctaactaccaagtcctaagtcagcagcaaaaaagtagagcattttatcgcattcaagctactcgcctcatgactggagctggcaacattttaaagaggcatgcagctgaccaagcaaggaaggctgtcagcatgcacgaggtcaacactgaagtgactgaaaatgaccctgttagtaagatcttctttgaacaagggacatatcagtgtctggagaactgtggtactgtggcccttaccattatccgcagaggtggtgatttgactaacactgtgtttgttgacttcagaacagaggatggcacagcaaatgctgggtctgattatgaatttactgaaggaactgtggtgtttaagcctggtgatacccagaaggaaatcagagtgggtatcatagatgatgatatctttgaggaggatgaaaatttccttgtgcatctcagcaatgtcaaagtatcttctgaagcttcagaagatggcatactggaagccaatcatgtttctacacttgcttgcctcggatctccctccactgccactgtaactatttttgatgatgaccacgcaggcatttttacttttgaggaacctgtgactcatgtgagtgagagcattggcatcatggaggtgaaagtattgagaacatctggagctcgaggaaatgttatcgttccatataaaaccatcgaagggactgccagaggtggaggggaggattttgaggacacttgtggagagctcgaattccagaatgatgaaattgtgaagatcattaccattagaatatttgaccgtgaggaatatgagaaagagtgcagtttctcccttgtgcttgaggaaccaaaatggataagaagaggaatgaaaggtttctagccaacctgtcttcaggaaggttcatgctagagaacatccgattctctctactgtaatcaccattgcagacgaatatgatgacaagcagccactgaccagcaaagaggaagaggagaggcgcattgcagaaatggggcgccccatcctgggagagcacaccaagttggaagtgatcattgaagaatcctatgaattcaagagtactgtggacaaactcattaagaagacaaacctggcccttgtggttgggactaacagctggagagaacagttcattgaagctatcactgtcagtgctggggaagatgatgacgacgatgaatgtggggaagagaagctgccctcctgtttcgattacgtgatgcactttctgactgtgttctggaaggtcctgtttgccttcgtcccccctactgaatactggaatggctgggcgtgtttcattgtctccatcctcatgattggcctactgacagctttcattggagacctggcttcccactttggctgcaccattggcctgaaagattctgtgactgcagtcgtgttcgtcgcacttggaacatcagtgccagacacatttgccagcaaagtggcagccacccaggaccagtatgcagacgcctccataggtaacgtcacgggcagcaacgcggtgaatgtcttcctgggaatcggtgtggcctggtccatcgctgccatctaccacgcagccaatggggaacagttcaaagtgtcccctggcacactagctttctctgtcactctcttcaccatttttgctttcatcaatgtgggggtgctgctgtatcggcggaggccagaaatcggaggtgagctgggtgggccccggactgccaagctcctcacatcctgcctctttgtgctcctatggctcttgtacattttcttctcctccctggaggcctactgccacataaaaggcttctaaaggaactatcagatatagtaaatttatatatatacatatatatacataaaaattatgtataatggacagaggaaactgacatttgtcatgttcacttacctgctgatggaatccagcttcaagagcatactctgtactagggccgaagtaaaaaaccatcacctcccattcccaggggcatcatcatgttcaacaaggcatggaggcagggccatctttgcagctcagtctagaagggctgcactctctccaggttgataaatccttaaggctttgatttgttttgtttttggttttgttttcagtggagctggggaggtagttaatgtttggctttatttttgttattttgttttgttttgtttttttgggagagtcagggttgttgcttttctttgtggaaagtgaaaccatccaaatgtaaatgggttttggtaaaaatttaaatcattagtattccccctcacctcccccaatcactttaaaacttattttggattaagaaaaaatctgggcatggaagaagaaagaagcatgtcttcatcgtattaccaaagttcatgcttatctccggaatgtgagtggaggtgaagctgcctccaagaagaagcataaaagtggaatggagccaggaaatccgatggttctagaaatagtctgatatttaaacatgtgatacctggcagtctcgtttaacaggtacaaggaaaacgtgcctagattcccaggaacgtgcaaaatcctttctttcttatctctttagctctggactgtgattggcaaggtccttcttccagcattcagcccagctaagcccccaggtgccccatcccaaccctg

SEQ ID NO: 277439 - DNA, 4009 bp, Homo sapiens
gctggtaaatttagagaaggcatcatactgggatcttttttcacatccagcccatgcggactgagcagccaaagcttgacagaggtccctccttctcccaccttccccaagtagctgctcctgacccccccacacaccttggcaaacgacaccagtggccgatagcaactggtgttttaaaaatactaatttggagccccatttgagacctacaacgggagagtctgcatcagattcggcctcagattctacagcatctgactacattcccagtaggttgtgacagttggaagtgtcatgtacaacatgcggcgattaagtctttcacccaccttttcaatgggatttcatctgttagttactgtgagtctcttattttcccatgtggaccatgtaattgctgagacagaaatggaaggagaaggaaatgaaactggtgaatgtactggatcatattactgtaagaaaggggtgattttgcccatttgggaaccccaagacccttcttttggggacaaaattgctagagctactgtgtattttgtggccatggtctacatgtttcttggagtctctatcatagctgatcggttcatgtcctctatagaagtcatcacatctcaagaaaaagaaataaccataaagaaacccaatggagagaccaccaagacaactgtgaggatctggaatgaaacagtttctaacctgaccttgatggccctgggatcttctgctcctgagattctcctttcagtaattgaagtgtgtggccataacttcactgcaggagacctcggtcctagcaccatcgtgggaagtgctgcattcaatatgttcatcattattgcactctgtgtttatgtggtgcctgacggagagacaaggaagattaagcatttgcgtgtcttctttgtgacagcagcctggagcatctttgcctacacctggctttacattattttgtctgtcatatctcctggtgttgtggaggtctgggaaggtttgcttactttcttcttctttcccatctgtgttgtgttcgcttgggtagcggataggagacttctgttttacaagtatgtctacaagaggtatcgagctggcaagcagagggggatgattattgaacatgaaggagacaggccatcttctaagactgaaattgaaatggacgggaaagtggtcaattctcatgttgaaaatttcttagatggtgctctggttctggaggtggatgagagggaccaagatgatgaagaagctaggcgagaaatggctaggattctgaaggaacttaagcagaagcatccagataaagaaatagagcaattaatagaattagctaactaccaagtcctaagtcagcagcaaaaaagtagagcattttatcgcattcaagctactcgcctcatgactggagctggcaacattttaaagaggcatgcagctgaccaagcaaggaaggctgtcagcatgcacgaggtcaacactgaagtgactgaaaatgaccctgttagtaagatcttctttgaacaagggacatatcagtgtctggagaactgtggtactgtggcccttaccattatccgcagaggtggtgatttgactaacactgtgtttgttgacttcagaacagaggatggcacagcaaatgctgggtctgattatgaatttactgaaggaactgtggtgtttaagcctggtgatacccagaaggaaatcagagtgggtatcatagatgatgatatctttgaggaggatgaaaatttccttgtgcatctcagcaatgtcaaagtatcttctgaagcttcagaagatggcatactggaagccaatcatgtttctacacttgcttgcctcggatctccctccactgccactgtaactatttttgatgatgaccacgcaggcatttttacttttgaggaacctgtgactcatgtgagtgagagcattggcatcatggaggtgaaagtattgagaacatctggagctcgaggaaatgttatcgttccatataaaaccatcgaagggactgccagaggtggaggggaggattttgaggacacttgtggagagctcgaattccagaatgatgaaattgtgaagatcattaccattagaatatttgaccgtgaggaatatgagaaagagtgcagtttctcccttgtgcttgaggaaccaaaatggataagaagaggaatgaaaggtttctagccaacctgtcttcaggaaggttcatgctagagaacatccgattctctctactgtaatcaccattgcagacgaatatgatgacaagcagccactgaccagcaaagaggaagaggagaggcgcattgcagaaatggggcgccccatcctgggagagcacaccaagttggaagtgatcattgaagaatcctatgaattcaagagtactgtggacaaactcattaagaagacaaacctggcccttgtggttgggactaacagctggagagaacagttcattgaagctatcactgtcagtgctggggaagatgatgacgacgatgaatgtggggaagagaagctgccctcctgtttcgattacgtgatgcactttctgactgtgttctggaaggtcctgtttgccttcgtcccccctactgaatactggaatggctgggcgtgtttcattgtctccatcctcatgattggcctactgacagctttcattggagacctggcttcccactttggctgcaccattggcctgaaagattctgtgactgcagtcgtgttcgtcgcacttggaacatcagtgccagacacatttgccagcaaagtggcagccacccaggaccagtatgcagacgcctccataggtaacgtcacgggcagcaacgcggtgaatgtcttcctgggaatcggtgtggcctggtccatcgctgccatctaccacgcagccaatggggaacagttcaaagtgtcccctggcacactagctttctctgtcactctcttcaccatttttgctttcatcaatgtgggggtgctgctgtatcggcggaggccagaaatcggaggtgagctgggtgggccccggactgccaagctcctcacatcctgcctctttgtgctcctatggctcttgtacattttcttctcctccctggaggcctactgccacataaaaggcttctaaaggaactatcagatatagtaaatttatatatatacatatatatacataaaaattatgtataatggacagaggaaactgacatttgtcatgttcacttacctgctgatggaatccagcttcaagagcatactctgtactagggccgaagtaaaaaaccatcacctcccattcccaggggcatcatcatgttcaacaaggcatggaggcagggccatctttgcagctcagtctagaagggctgcactctctccaggttgataaatccttaaggctttgatttgttttgtttttggttttgttttcagtggagctggggaggtagttaatgtttggctttatttttgttattttgttttgttttgtttttttgggagagtcagggttgttgcttttctttgtggaaagtgaaaccatccaaatgtaaatgggttttggtaaaaatttaaatcattagtattccccctcacctcccccaatcactttaaaacttattttggattaagaaaaaatctgggcatggaagaagaaagaagcatgtcttcatcgtattaccaaagttcatgcttatctccggaatgtgagtggaggtgaagctgcctccaagaagaagcataaaagtggaatggagccaggaaatccgatggttctagaaatagtctgatatttaaacatgtgatacctggcagtctcgtttaacaggtacaaggaaaacgtgcctagattcccaggaacgtgcaaaatcctttctttcttatctctttagctctggactgtgattggcaaggtccttcttccagcattcagcccagctaagcccccaggtgccccatcccaaccctg

SEQ ID NO: 277440 - DNA, 3820 bp, Homo sapiens
gctggtaaatttagagaaggcatcatactgggatcttttttcacatccagcccatgcggactgagcagccaaagcttgacagagtaggttgtgacagttggaagtgtcatgtacaacatgcggcgattaagtctttcacccaccttttcaatgggatttcatctgttagttactgtgagtctcttattttcccatgtggaccatgtaattgctgagacagaaatggaaggagaaggaaatgaaactggtgaatgtactggatcatattactgtaagaaaggggtgattttgcccatttgggaaccccaagacccttcttttggggacaaaattgctagagctactgtgtattttgtggccatggtctacatgtttcttggagtctctatcatagctgatcggttcatgtcctctatagaagtcatcacatctcaagaaaaagaaataaccataaagaaacccaatggagagaccaccaagacaactgtgaggatctggaatgaaacagtttctaacctgaccttgatggccctgggatcttctgctcctgagattctcctttcagtaattgaagtgtgtggccataacttcactgcaggagacctcggtcctagcaccatcgtgggaagtgctgcattcaatatgttcatcattattgcactctgtgtttatgtggtgcctgacggagagacaaggaagattaagcatttgcgtgtcttctttgtgacagcagcctggagcatctttgcctacacctggctttacattattttgtctgtcatatctcctggtgttgtggaggtctgggaaggtttgcttactttcttcttctttcccatctgtgttgtgttcgcttgggtagcggataggagacttctgttttacaagtatgtctacaagaggtatcgagctggcaagcagagggggatgattattgaacatgaaggagacaggccatcttctaagactgaaattgaaatggacgggaaagtggtcaattctcatgttgaaaatttcttagatggtgctctggttctggaggtggatgagagggaccaagatgatgaagaagctaggcgagaaatggctaggattctgaaggaacttaagcagaagcatccagataaagaaatagagcaattaatagaattagctaactaccaagtcctaagtcagcagcaaaaaagtagagcattttatcgcattcaagctactcgcctcatgactggagctggcaacattttaaagaggcatgcagctgaccaagcaaggaaggctgtcagcatgcacgaggtcaacactgaagtgactgaaaatgaccctgttagtaagatcttctttgaacaagggacatatcagtgtctggagaactgtggtactgtggcccttaccattatccgcagaggtggtgatttgactaacactgtgtttgttgacttcagaacagaggatggcacagcaaatgctgggtctgattatgaatttactgaaggaactgtggtgtttaagcctggtgatacccagaaggaaatcagagtgggtatcatagatgatgatatctttgaggaggatgaaaatttccttgtgcatctcagcaatgtcaaagtatcttctgaagcttcagaagatggcatactggaagccaatcatgtttctacacttgcttgcctcggatctccctccactgccactgtaactatttttgatgatgaccacgcaggcatttttacttttgaggaacctgtgactcatgtgagtgagagcattggcatcatggaggtgaaagtattgagaacatctggagctcgaggaaatgttatcgttccatataaaaccatcgaagggactgccagaggtggaggggaggattttgaggacacttgtggagagctcgaattccagaatgatgaaattgtgaagatcattaccattagaatatttgaccgtgaggaatatgagaaagagtgcagtttctcccttgtgcttgaggaaccaaaatggataagaagaggaatgaaaggtttctagccaacctgtcttcaggaaggttcatgctagagaacatccgattctctctactgtaatcaccattgcagacgaatatgatgacaagcagccactgaccagcaaagaggaagaggagaggcgcattgcagaaatggggcgccccatcctgggagagcacaccaagttggaagtgatcattgaagaatcctatgaattcaagagtactgtggacaaactcattaagaagacaaacctggcccttgtggttgggactaacagctggagagaacagttcattgaagctatcactgtcagtgctggggaagatgatgacgacgatgaatgtggggaagagaagctgccctcctgtttcgattacgtgatgcactttctgactgtgttctggaaggtcctgtttgccttcgtcccccctactgaatactggaatggctgggcgtgtttcattgtctccatcctcatgattggcctactgacagctttcattggagacctggcttcccactttggctgcaccattggcctgaaagattctgtgactgcagtcgtgttcgtcgcacttggaacatcagtgccagacacatttgccagcaaagtggcagccacccaggaccagtatgcagacgcctccataggtaacgtcacgggcagcaacgcggtgaatgtcttcctgggaatcggtgtggcctggtccatcgctgccatctaccacgcagccaatggggaacagttcaaagtgtcccctggcacactagctttctctgtcactctcttcaccatttttgctttcatcaatgtgggggtgctgctgtatcggcggaggccagaaatcggaggtgagctgggtgggccccggactgccaagctcctcacatcctgcctctttgtgctcctatggctcttgtacattttcttctcctccctggaggcctactgccacataaaaggcttctaaaggaactatcagatatagtaaatttatatatatacatatatatacataaaaattatgtataatggacagaggaaactgacatttgtcatgttcacttacctgctgatggaatccagcttcaagagcatactctgtactagggccgaagtaaaaaaccatcacctcccattcccaggggcatcatcatgttcaacaaggcatggaggcagggccatctttgcagctcagtctagaagggctgcactctctccaggttgataaatccttaaggctttgatttgttttgtttttggttttgttttcagtggagctggggaggtagttaatgtttggctttatttttgttattttgttttgttttgtttttttgggagagtcagggttgttgcttttctttgtggaaagtgaaaccatccaaatgtaaatgggttttggtaaaaatttaaatcattagtattccccctcacctcccccaatcactttaaaacttattttggattaagaaaaaatctgggcatggaagaagaaagaagcatgtcttcatcgtattaccaaagttcatgcttatctccggaatgtgagtggaggtgaagctgcctccaagaagaagcataaaagtggaatggagccaggaaatccgatggttctagaaatagtctgatatttaaacatgtgatacctggcagtctcgtttaacaggtacaaggaaaacgtgcctagattcccaggaacgtgcaaaatcctttctttcttatctctttagctctggactgtgattggcaaggtccttcttccagcattcagcccagctaagcccccaggtgccccatcccaaccctg

SEQ ID NO: 277441 - DNA, 3823 bp, Homo sapiens
tccattccgccccctctttgttgcggaggcaaactgaggttcctggagtcagaatctatcagtcgtggtgactgccctggttgcacttaggttgtgacagttggaagtgtcatgtacaacatgcggcgattaagtctttcacccaccttttcaatgggatttcatctgttagttactgtgagtctcttattttcccatgtggaccatgtaattgctgagacagaaatggaaggagaaggaaatgaaactggtgaatgtactggatcatattactgtaagaaaggggtgattttgcccatttgggaaccccaagacccttcttttggggacaaaattgctagagctactgtgtattttgtggccatggtctacatgtttcttggagtctctatcatagctgatcggttcatgtcctctatagaagtcatcacatctcaagaaaaagaaataaccataaagaaacccaatggagagaccaccaagacaactgtgaggatctggaatgaaacagtttctaacctgaccttgatggccctgggatcttctgctcctgagattctcctttcagtaattgaagtgtgtggccataacttcactgcaggagacctcggtcctagcaccatcgtgggaagtgctgcattcaatatgttcatcattattgcactctgtgtttatgtggtgcctgacggagagacaaggaagattaagcatttgcgtgtcttctttgtgacagcagcctggagcatctttgcctacacctggctttacattattttgtctgtcatatctcctggtgttgtggaggtctgggaaggtttgcttactttcttcttctttcccatctgtgttgtgttcgcttgggtagcggataggagacttctgttttacaagtatgtctacaagaggtatcgagctggcaagcagagggggatgattattgaacatgaaggagacaggccatcttctaagactgaaattgaaatggacgggaaagtggtcaattctcatgttgaaaatttcttagatggtgctctggttctggaggtggatgagagggaccaagatgatgaagaagctaggcgagaaatggctaggattctgaaggaacttaagcagaagcatccagataaagaaatagagcaattaatagaattagctaactaccaagtcctaagtcagcagcaaaaaagtagagcattttatcgcattcaagctactcgcctcatgactggagctggcaacattttaaagaggcatgcagctgaccaagcaaggaaggctgtcagcatgcacgaggtcaacactgaagtgactgaaaatgaccctgttagtaagatcttctttgaacaagggacatatcagtgtctggagaactgtggtactgtggcccttaccattatccgcagaggtggtgatttgactaacactgtgtttgttgacttcagaacagaggatggcacagcaaatgctgggtctgattatgaatttactgaaggaactgtggtgtttaagcctggtgatacccagaaggaaatcagagtgggtatcatagatgatgatatctttgaggaggatgaaaatttccttgtgcatctcagcaatgtcaaagtatcttctgaagcttcagaagatggcatactggaagccaatcatgtttctacacttgcttgcctcggatctccctccactgccactgtaactatttttgatgatgaccacgcaggcatttttacttttgaggaacctgtgactcatgtgagtgagagcattggcatcatggaggtgaaagtattgagaacatctggagctcgaggaaatgttatcgttccatataaaaccatcgaagggactgccagaggtggaggggaggattttgaggacacttgtggagagctcgaattccagaatgatgaaattgtgaagatcattaccattagaatatttgaccgtgaggaatatgagaaagagtgcagtttctcccttgtgcttgaggaaccaaaatggataagaagaggaatgaaaggtttctagccaacctgtcttcaggaaggttcatgctagagaacatccgattctctctactgtaatcaccattgcagacgaatatgatgacaagcagccactgaccagcaaagaggaagaggagaggcgcattgcagaaatggggcgccccatcctgggagagcacaccaagttggaagtgatcattgaagaatcctatgaattcaagagtactgtggacaaactcattaagaagacaaacctggcccttgtggttgggactaacagctggagagaacagttcattgaagctatcactgtcagtgctggggaagatgatgacgacgatgaatgtggggaagagaagctgccctcctgtttcgattacgtgatgcactttctgactgtgttctggaaggtcctgtttgccttcgtcccccctactgaatactggaatggctgggcgtgtttcattgtctccatcctcatgattggcctactgacagctttcattggagacctggcttcccactttggctgcaccattggcctgaaagattctgtgactgcagtcgtgttcgtcgcacttggaacatcagtgccagacacatttgccagcaaagtggcagccacccaggaccagtatgcagacgcctccataggtaacgtcacgggcagcaacgcggtgaatgtcttcctgggaatcggtgtggcctggtccatcgctgccatctaccacgcagccaatggggaacagttcaaagtgtcccctggcacactagctttctctgtcactctcttcaccatttttgctttcatcaatgtgggggtgctgctgtatcggcggaggccagaaatcggaggtgagctgggtgggccccggactgccaagctcctcacatcctgcctctttgtgctcctatggctcttgtacattttcttctcctccctggaggcctactgccacataaaaggcttctaaaggaactatcagatatagtaaatttatatatatacatatatatacataaaaattatgtataatggacagaggaaactgacatttgtcatgttcacttacctgctgatggaatccagcttcaagagcatactctgtactagggccgaagtaaaaaaccatcacctcccattcccaggggcatcatcatgttcaacaaggcatggaggcagggccatctttgcagctcagtctagaagggctgcactctctccaggttgataaatccttaaggctttgatttgttttgtttttggttttgttttcagtggagctggggaggtagttaatgtttggctttatttttgttattttgttttgttttgtttttttgggagagtcagggttgttgcttttctttgtggaaagtgaaaccatccaaatgtaaatgggttttggtaaaaatttaaatcattagtattccccctcacctcccccaatcactttaaaacttattttggattaagaaaaaatctgggcatggaagaagaaagaagcatgtcttcatcgtattaccaaagttcatgcttatctccggaatgtgagtggaggtgaagctgcctccaagaagaagcataaaagtggaatggagccaggaaatccgatggttctagaaatagtctgatatttaaacatgtgatacctggcagtctcgtttaacaggtacaaggaaaacgtgcctagattcccaggaacgtgcaaaatcctttctttcttatctctttagctctggactgtgattggcaaggtccttcttccagcattcagcccagctaagcccccaggtgccccatcccaaccctg

SEQ ID NO: 277442 - DNA, 3859 bp, Homo sapiens
gcttcccacagaagatgggagcgacctcttcctgatcgggagctgtttaaaaggagggagtgcgccgtattttctactagcgtggaggaacggaggaagaatccattcacactccccaaaccataggttgtgacagttggaagtgtcatgtacaacatgcggcgattaagtctttcacccaccttttcaatgggatttcatctgttagttactgtgagtctcttattttcccatgtggaccatgtaattgctgagacagaaatggaaggagaaggaaatgaaactggtgaatgtactggatcatattactgtaagaaaggggtgattttgcccatttgggaaccccaagacccttcttttggggacaaaattgctagagctactgtgtattttgtggccatggtctacatgtttcttggagtctctatcatagctgatcggttcatgtcctctatagaagtcatcacatctcaagaaaaagaaataaccataaagaaacccaatggagagaccaccaagacaactgtgaggatctggaatgaaacagtttctaacctgaccttgatggccctgggatcttctgctcctgagattctcctttcagtaattgaagtgtgtggccataacttcactgcaggagacctcggtcctagcaccatcgtgggaagtgctgcattcaatatgttcatcattattgcactctgtgtttatgtggtgcctgacggagagacaaggaagattaagcatttgcgtgtcttctttgtgacagcagcctggagcatctttgcctacacctggctttacattattttgtctgtcatatctcctggtgttgtggaggtctgggaaggtttgcttactttcttcttctttcccatctgtgttgtgttcgcttgggtagcggataggagacttctgttttacaagtatgtctacaagaggtatcgagctggcaagcagagggggatgattattgaacatgaaggagacaggccatcttctaagactgaaattgaaatggacgggaaagtggtcaattctcatgttgaaaatttcttagatggtgctctggttctggaggtggatgagagggaccaagatgatgaagaagctaggcgagaaatggctaggattctgaaggaacttaagcagaagcatccagataaagaaatagagcaattaatagaattagctaactaccaagtcctaagtcagcagcaaaaaagtagagcattttatcgcattcaagctactcgcctcatgactggagctggcaacattttaaagaggcatgcagctgaccaagcaaggaaggctgtcagcatgcacgaggtcaacactgaagtgactgaaaatgaccctgttagtaagatcttctttgaacaagggacatatcagtgtctggagaactgtggtactgtggcccttaccattatccgcagaggtggtgatttgactaacactgtgtttgttgacttcagaacagaggatggcacagcaaatgctgggtctgattatgaatttactgaaggaactgtggtgtttaagcctggtgatacccagaaggaaatcagagtgggtatcatagatgatgatatctttgaggaggatgaaaatttccttgtgcatctcagcaatgtcaaagtatcttctgaagcttcagaagatggcatactggaagccaatcatgtttctacacttgcttgcctcggatctccctccactgccactgtaactatttttgatgatgaccacgcaggcatttttacttttgaggaacctgtgactcatgtgagtgagagcattggcatcatggaggtgaaagtattgagaacatctggagctcgaggaaatgttatcgttccatataaaaccatcgaagggactgccagaggtggaggggaggattttgaggacacttgtggagagctcgaattccagaatgatgaaattgtgaagatcattaccattagaatatttgaccgtgaggaatatgagaaagagtgcagtttctcccttgtgcttgaggaaccaaaatggataagaagaggaatgaaaggtttctagccaacctgtcttcaggaaggttcatgctagagaacatccgattctctctactgtaatcaccattgcagacgaatatgatgacaagcagccactgaccagcaaagaggaagaggagaggcgcattgcagaaatggggcgccccatcctgggagagcacaccaagttggaagtgatcattgaagaatcctatgaattcaagagtactgtggacaaactcattaagaagacaaacctggcccttgtggttgggactaacagctggagagaacagttcattgaagctatcactgtcagtgctggggaagatgatgacgacgatgaatgtggggaagagaagctgccctcctgtttcgattacgtgatgcactttctgactgtgttctggaaggtcctgtttgccttcgtcccccctactgaatactggaatggctgggcgtgtttcattgtctccatcctcatgattggcctactgacagctttcattggagacctggcttcccactttggctgcaccattggcctgaaagattctgtgactgcagtcgtgttcgtcgcacttggaacatcagtgccagacacatttgccagcaaagtggcagccacccaggaccagtatgcagacgcctccataggtaacgtcacgggcagcaacgcggtgaatgtcttcctgggaatcggtgtggcctggtccatcgctgccatctaccacgcagccaatggggaacagttcaaagtgtcccctggcacactagctttctctgtcactctcttcaccatttttgctttcatcaatgtgggggtgctgctgtatcggcggaggccagaaatcggaggtgagctgggtgggccccggactgccaagctcctcacatcctgcctctttgtgctcctatggctcttgtacattttcttctcctccctggaggcctactgccacataaaaggcttctaaaggaactatcagatatagtaaatttatatatatacatatatatacataaaaattatgtataatggacagaggaaactgacatttgtcatgttcacttacctgctgatggaatccagcttcaagagcatactctgtactagggccgaagtaaaaaaccatcacctcccattcccaggggcatcatcatgttcaacaaggcatggaggcagggccatctttgcagctcagtctagaagggctgcactctctccaggttgataaatccttaaggctttgatttgttttgtttttggttttgttttcagtggagctggggaggtagttaatgtttggctttatttttgttattttgttttgttttgtttttttgggagagtcagggttgttgcttttctttgtggaaagtgaaaccatccaaatgtaaatgggttttggtaaaaatttaaatcattagtattccccctcacctcccccaatcactttaaaacttattttggattaagaaaaaatctgggcatggaagaagaaagaagcatgtcttcatcgtattaccaaagttcatgcttatctccggaatgtgagtggaggtgaagctgcctccaagaagaagcataaaagtggaatggagccaggaaatccgatggttctagaaatagtctgatatttaaacatgtgatacctggcagtctcgtttaacaggtacaaggaaaacgtgcctagattcccaggaacgtgcaaaatcctttctttcttatctctttagctctggactgtgattggcaaggtccttcttccagcattcagcccagctaagcccccaggtgccccatcccaaccctg

SEQ ID NO: 277443 - DNA, 4021 bp, Homo sapiens
gcttcccacagaagatgggagcgacctcttcctgatcgggagctgtttaaaaggagggagtgcgccgtattttctactagcgtggaggaacggaggaagaatccattcacactccccaaaccaggggatgtcatggtctagaacacctatgctgaagtacaaggctgagcaagaaagatcactccactgcaactgagcaaagtgctgaaggagttgaaaggaagaagagaacatcggacgtggtttcacggaggaggaagcattttaatttattcagaaagagtgaaaaggattttgaaagcaaataaggctagccacttttgaaacatgtcaaagagccccagcttatttacgacaagtaggttgtgacagttggaagtgtcatgtacaacatgcggcgattaagtctttcacccaccttttcaatgggatttcatctgttagttactgtgagtctcttattttcccatgtggaccatgtaattgctgagacagaaatggaaggagaaggaaatgaaactggtgaatgtactggatcatattactgtaagaaaggggtgattttgcccatttgggaaccccaagacccttcttttggggacaaaattgctagagctactgtgtattttgtggccatggtctacatgtttcttggagtctctatcatagctgatcggttcatgtcctctatagaagtcatcacatctcaagaaaaagaaataaccataaagaaacccaatggagagaccaccaagacaactgtgaggatctggaatgaaacagtttctaacctgaccttgatggccctgggatcttctgctcctgagattctcctttcagtaattgaagtgtgtggccataacttcactgcaggagacctcggtcctagcaccatcgtgggaagtgctgcattcaatatgttcatcattattgcactctgtgtttatgtggtgcctgacggagagacaaggaagattaagcatttgcgtgtcttctttgtgacagcagcctggagcatctttgcctacacctggctttacattattttgtctgtcatatctcctggtgttgtggaggtctgggaaggtttgcttactttcttcttctttcccatctgtgttgtgttcgcttgggtagcggataggagacttctgttttacaagtatgtctacaagaggtatcgagctggcaagcagagggggatgattattgaacatgaaggagacaggccatcttctaagactgaaattgaaatggacgggaaagtggtcaattctcatgttgaaaatttcttagatggtgctctggttctggaggtggatgagagggaccaagatgatgaagaagctaggcgagaaatggctaggattctgaaggaacttaagcagaagcatccagataaagaaatagagcaattaatagaattagctaactaccaagtcctaagtcagcagcaaaaaagtagagcattttatcgcattcaagctactcgcctcatgactggagctggcaacattttaaagaggcatgcagctgaccaagcaaggaaggctgtcagcatgcacgaggtcaacactgaagtgactgaaaatgaccctgttagtaagatcttctttgaacaagggacatatcagtgtctggagaactgtggtactgtggcccttaccattatccgcagaggtggtgatttgactaacactgtgtttgttgacttcagaacagaggatggcacagcaaatgctgggtctgattatgaatttactgaaggaactgtggtgtttaagcctggtgatacccagaaggaaatcagagtgggtatcatagatgatgatatctttgaggaggatgaaaatttccttgtgcatctcagcaatgtcaaagtatcttctgaagcttcagaagatggcatactggaagccaatcatgtttctacacttgcttgcctcggatctccctccactgccactgtaactatttttgatgatgaccacgcaggcatttttacttttgaggaacctgtgactcatgtgagtgagagcattggcatcatggaggtgaaagtattgagaacatctggagctcgaggaaatgttatcgttccatataaaaccatcgaagggactgccagaggtggaggggaggattttgaggacacttgtggagagctcgaattccagaatgatgaaattgtgaagatcattaccattagaatatttgaccgtgaggaatatgagaaagagtgcagtttctcccttgtgcttgaggaaccaaaatggataagaagaggaatgaaaggtacgaatatgatgacaagcagccactgaccagcaaagaggaagaggagaggcgcattgcagaaatggggcgccccatcctgggagagcacaccaagttggaagtgatcattgaagaatcctatgaattcaagagtactgtggacaaactcattaagaagacaaacctggcccttgtggttgggactaacagctggagagaacagttcattgaagctatcactgtcagtgctggggaagatgatgacgacgatgaatgtggggaagagaagctgccctcctgtttcgattacgtgatgcactttctgactgtgttctggaaggtcctgtttgccttcgtcccccctactgaatactggaatggctgggcgtgtttcattgtctccatcctcatgattggcctactgacagctttcattggagacctggcttcccactttggctgcaccattggcctgaaagattctgtgactgcagtcgtgttcgtcgcacttggaacatcagtgccagacacatttgccagcaaagtggcagccacccaggaccagtatgcagacgcctccataggtaacgtcacgggcagcaacgcggtgaatgtcttcctgggaatcggtgtggcctggtccatcgctgccatctaccacgcagccaatggggaacagttcaaagtgtcccctggcacactagctttctctgtcactctcttcaccatttttgctttcatcaatgtgggggtgctgctgtatcggcggaggccagaaatcggaggtgagctgggtgggccccggactgccaagctcctcacatcctgcctctttgtgctcctatggctcttgtacattttcttctcctccctggaggcctactgccacataaaaggcttctaaaggaactatcagatatagtaaatttatatatatacatatatatacataaaaattatgtataatggacagaggaaactgacatttgtcatgttcacttacctgctgatggaatccagcttcaagagcatactctgtactagggccgaagtaaaaaaccatcacctcccattcccaggggcatcatcatgttcaacaaggcatggaggcagggccatctttgcagctcagtctagaagggctgcactctctccaggttgataaatccttaaggctttgatttgttttgtttttggttttgttttcagtggagctggggaggtagttaatgtttggctttatttttgttattttgttttgttttgtttttttgggagagtcagggttgttgcttttctttgtggaaagtgaaaccatccaaatgtaaatgggttttggtaaaaatttaaatcattagtattccccctcacctcccccaatcactttaaaacttattttggattaagaaaaaatctgggcatggaagaagaaagaagcatgtcttcatcgtattaccaaagttcatgcttatctccggaatgtgagtggaggtgaagctgcctccaagaagaagcataaaagtggaatggagccaggaaatccgatggttctagaaatagtctgatatttaaacatgtgatacctggcagtctcgtttaacaggtacaaggaaaacgtgcctagattcccaggaacgtgcaaaatcctttctttcttatctctttagctctggactgtgattggcaaggtccttcttccagcattcagcccagctaagcccccaggtgccccatcccaaccctg

SEQ ID NO: 277444 - DNA, 4117 bp, Homo sapiens
  misc_feature (2300)..(2300): n is a, c, g, or t
  misc_feature (2302)..(2302): n is a, c, g, or t
  misc_feature (2304)..(2304): n is a, c, g, or t
  misc_feature (2310)..(2312): n is a, c, g, or t
  misc_feature (2314)..(2314): n is a, c, g, or t
gcttcccacagaagatgggagcgacctcttcctgatcgggagctgtttaaaaggagggagtgcgccgtattttctactagcgtggaggaacggaggaagaatccattcacactccccaaaccaggggatgtcatggtctagaacacctatgctgaagtacaaggctgagcaagaaagatcactccactgcaactgagcaaagtgctgaaggagttgaaaggaagaagagaacatcggacgtggtttcacggaggaggaagcattttaatttattcagaaagagtgaaaaggattttgaaagcaaataaggctagccacttttgaaacatgtcaaagagccccagcttatttacgacaagtaggttgtgacagttggaagtgtcatgtacaacatgcggcgattaagtctttcacccaccttttcaatgggatttcatctgttagttactgtgagtctcttattttcccatgtggaccatgtaattgctgagacagaaatggaaggagaaggaaatgaaactggtgaatgtactggatcatattactgtaagaaaggggtgattttgcccatttgggaaccccaagacccttcttttggggacaaaattgctagagctactgtgtattttgtggccatggtctacatgtttcttggagtctctatcatagctgatcggttcatgtcctctatagaagtcatcacatctcaagaaaaagaaataaccataaagaaacccaatggagagaccaccaagacaactgtgaggatctggaatgaaacagtttctaacctgaccttgatggccctgggatcttctgctcctgagattctcctttcagtaattgaagtgtgtggccataacttcactgcaggagacctcggtcctagcaccatcgtgggaagtgctgcattcaatatgttcatcattattgcactctgtgtttatgtggtgcctgacggagagacaaggaagattaagcatttgcgtgtcttctttgtgacagcagcctggagcatctttgcctacacctggctttacattattttgtctgtcatatctcctggtgttgtggaggtctgggaaggtttgcttactttcttcttctttcccatctgtgttgtgttcgcttgggtagcggataggagacttctgttttacaagtatgtctacaagaggtatcgagctggcaagcagagggggatgattattgaacatgaaggagacaggccatcttctaagactgaaattgaaatggacgggaaagtggtcaattctcatgttgaaaatttcttagatggtgctctggttctggaggtggatgagagggaccaagatgatgaagaagctaggcgagaaatggctaggattctgaaggaacttaagcagaagcatccagataaagaaatagagcaattaatagaattagctaactaccaagtcctaagtcagcagcaaaaaagtagagcattttatcgcattcaagctactcgcctcatgactggagctggcaacattttaaagaggcatgcagctgaccaagcaaggaaggctgtcagcatgcacgaggtcaacactgaagtgactgaaaatgaccctgttagtaagatcttctttgaacaagggacatatcagtgtctggagaactgtggtactgtggcccttaccattatccgcagaggtggtgatttgactaacactgtgtttgttgacttcagaacagaggatggcacagcaaatgctgggtctgattatgaatttactgaaggaactgtggtgtttaagcctggtgatacccagaaggaaatcagagtgggtatcatagatgatgatatctttgaggaggatgaaaatttccttgtgcatctcagcaatgtcaaagtatcttctgaagcttcagaagatggcatactggaagccaatcatgtttctacacttgcttgcctcggatctccctccactgccactgtaactatttttgatgatgaccacgcaggcatttttacttttgaggaacctgtgactcatgtgagtgagagcattggcatcatggaggtgaaagtattgagaacatctggagctcgaggaaatgttatcgttccatataaaaccatcgaagggactgccagaggtggaggggaggattttgaggacacttgtggagagctcgaattccagaatgatgaaattgtgaagatcattaccattagaatatttgaccgtgaggaatatgagaaagagtgcagtttctcccttgtgcttgaggaaccaaaatggataagaagaggaatgaaaggtgtnanantaacannnanataccttctagccaacctgtcttcaggaaggttcatgctagagaacatccgattctctctactgtaatcaccattgcagacgaatatgatgacaagcagccactgaccagcaaagaggaagaggagaggcgcattgcagaaatggggcgccccatcctgggagagcacaccaagttggaagtgatcattgaagaatcctatgaattcaagagtactgtggacaaactcattaagaagacaaacctggcccttgtggttgggactaacagctggagagaacagttcattgaagctatcactgtcagtgctggggaagatgatgacgacgatgaatgtggggaagagaagctgccctcctgtttcgattacgtgatgcactttctgactgtgttctggaaggtcctgtttgccttcgtcccccctactgaatactggaatggctgggcgtgtttcattgtctccatcctcatgattggcctactgacagctttcattggagacctggcttcccactttggctgcaccattggcctgaaagattctgtgactgcagtcgtgttcgtcgcacttggaacatcagtgccagacacatttgccagcaaagtggcagccacccaggaccagtatgcagacgcctccataggtaacgtcacgggcagcaacgcggtgaatgtcttcctgggaatcggtgtggcctggtccatcgctgccatctaccacgcagccaatggggaacagttcaaagtgtcccctggcacactagctttctctgtcactctcttcaccatttttgctttcatcaatgtgggggtgctgctgtatcggcggaggccagaaatcggaggtgagctgggtgggccccggactgccaagctcctcacatcctgcctctttgtgctcctatggctcttgtacattttcttctcctccctggaggcctactgccacataaaaggcttctaaaggaactatcagatatagtaaatttatatatatacatatatatacataaaaattatgtataatggacagaggaaactgacatttgtcatgttcacttacctgctgatggaatccagcttcaagagcatactctgtactagggccgaagtaaaaaaccatcacctcccattcccaggggcatcatcatgttcaacaaggcatggaggcagggccatctttgcagctcagtctagaagggctgcactctctccaggttgataaatccttaaggctttgatttgttttgtttttggttttgttttcagtggagctggggaggtagttaatgtttggctttatttttgttattttgttttgttttgtttttttgggagagtcagggttgttgcttttctttgtggaaagtgaaaccatccaaatgtaaatgggttttggtaaaaatttaaatcattagtattccccctcacctcccccaatcactttaaaacttattttggattaagaaaaaatctgggcatggaagaagaaagaagcatgtcttcatcgtattaccaaagttcatgcttatctccggaatgtgagtggaggtgaagctgcctccaagaagaagcataaaagtggaatggagccaggaaatccgatggttctagaaatagtctgatatttaaacatgtgatacctggcagtctcgtttaacaggtacaaggaaaacgtgcctagattcccaggaacgtgcaaaatcctttctttcttatctctttagctctggactgtgattggcaaggtccttcttccagcattcagcccagctaagcccccaggtgccccatcccaaccctg

SEQ ID NO: 277445 - DNA, 1499 bp, Homo sapiens
gcttcccacagaagatgggagcgacctcttcctgatcgggagctgtttaaaaggagggagtgcgccgtattttctactagcgtggaggaacggaggaagaatccattcacactccccaaaccaggggatgtcatggtctagaacacctatgctgaagtacaaggctgagcaagaaagatcactccactgcaactgagcaaagtgctgaaggagttgaaaggaagaagagaacatcggacgtggtttcacggaggaggaagcattttaatttattcagaaagagtgaaaaggattttgaaagcaaataaggctagccacttttgaaacatgtcaaagagccccagcttatttacgacaagtaggttgtgacagttggaagtgtcatgtacaacatgcggcgattaagtctttcacccaccttttcaatgggatttcatctgttagttactgtgagtctcttattttcccatgtggaccatgtaattgctgagacagaaatggaaggagaaggaaatgaaactggtgaatgtactggatcatattactgtaagaaaggggtgattttgcccatttgggaaccccaagacccttcttttggggacaaaattgctagagctactgtgtattttgtggccatggtctacatgtttcttggagtctctatcatagctgatcggttcatgtcctctatagaagtcatcacatctcaagaaaaagaaataaccataaagaaacccaatggagagaccaccaagacaactgtgaggatctggaatgaaacagtttctaacctgaccttgatggccctgggatcttctgctcctgagattctcctttcagtaattgaagtgtgtctataaggaatcccaggctggagacattcctagccctctgtattgattcaaaaatacttaataaattaaagctgttgagacttattttttcttctgtcactcagtaaccatgatccttcctcatttaataaacatttggtgactgaatgagtaattaaatgctggttacccacttaatgtgccaggtagtatgatactttctggggactaagccatgaacaaaacagtctagatccctgccctcagaagggttacagtttatgtgattactattttcatgagtaaaagtgaagaaagccatatggaaagatttttatcttgcaagaaaaaacaattatgaaactcttttaacataaacacactgaaactgtatcaaagcaattgtccaaattgtatttatacccaagaatttctttaactaagagagcataaggcatatgtttggaaaaccaccctctttatctttgaccggcttgcagataaatatatctctccattttaaaccaagaagggcaatcatgttggtgatccagatcactgagaaagcccagtgtatcccatcttttatctttgttggcaatggaacttttctatggcccacactttacaattctttgtcattctaacccatccttcccatcctta

SEQ ID NO: 277446 - DNA, 1676 bp, Homo sapiens
cctcctgtccacctgccatcccctatgcaaacagtaagaataaccccattcaaaaagcacatcatcgttttccatttgcattaacatgtgtctcagtcccatgttgccgttgcttgggattgtctgtcagttttattttcaaaggcatccatggcttgcacaatcctgttccagtcatgactgaacatttgctccttcttcatgtgccgttcggaaatgttgttgtgatacctgttacacagtgcatggtgaaaaacaaataaaacaaaacaaagagtatctgtatatagtagagtatagtacatactgttctcccatttggcaatgttgattggacattgaagacataagtgagttttcttttcacctgagttgttacttttgtgctgttattgagtttgattaattactagggataaaaggagaaaatggattattgttcacggttctgcacattcatttctaagaagcaataactgtcatgtggggagaagttaaagctattgagaggatagcaggcaaactacaaagatcttcatggaaaattagccatgtggaacacatcagaggcctctaaaaatcacccattaattcagagccaccctttccacaacacccctccctgcaaagtatttatttcacatctgcactgtctggcacagatggtagatagtgctggtttgttcattttatttttttacttaaaaggctattttgagccctgtttctttcactgtccagtctagtcctctttgattatatcagtagttgctgagtaagaaagaagccagggtgaccaacgggcctttaaaagtgtgtctcctctacttatgctgaaagagaaggcaattaaataagactagtacctcccaggaggattggactgggatatttttaaccctttaaaaagaatagctgtttctatgttaaaataccaaagaacatggataaacccaacattccaaagtagtgagtccactaatgagaaaaataatagaatgactttggtcacctctcggagacttctgtgtctataaggaatcccaggctggagacattcctagccctctgtattgattcaaaaatacttaataaattaaagctgttgagacttattttttcttctgtcactcagtaaccatgatccttcctcatttaataaacatttggtgactgaatgagtaattaaatgctggttacccacttaatgtgccaggtagtatgatactttctggggactaagccatgaacaaaacagtctagatccctgccctcagaagggttacagtttatgtgattactattttcatgagtaaaagtgaagaaagccatatggaaagatttttatcttgcaagaaaaaacaattatgaaactcttttaacataaacacactgaaactgtatcaaagcaattgtccaaattgtatttatacccaagaatttctttaactaagagagcataaggcatatgtttggaaaaccaccctctttatctttgaccggcttgcagataaatatatctctccattttaaaccaagaagggcaatcatgttggtgatccagatcactgagaaagcccagtgtatcccatcttttatctttgttggcaatggaacttttctatggcccacactttacaattctttgtcattctaacccatccttcccatcctta

SEQ ID NO: 277447 - DNA, 3146 bp, Homo sapiens
gcttcccacagaagatgggagcgacctcttcctgatcgggagctgtttaaaaggagggagtgcgccgtattttctactagcgtggaggaacggaggaagaatccattcacactccccaaaccaggggatgtcatggtctagaacacctatgctgaagtacaaggctgagcaagaaagatcactccactgcaactgagcaaagtgctgaaggagttgaaaggaagaagagaacatcggacgtggtttcacggaggaggaagcattttaatttattcagaaagagtgaaaaggattttgaaagcaaataaggctagccacttttgaaacatgtcaaagagccccagcttatttacgacaagtaggttgtgacagttggaagtgtcatgtacaacatgcggcgattaagtctttcacccaccttttcaatgggatttcatctgttagttactgtgagtctcttattttcccatgtggaccatgtaattgctgagacagaaatggaaggagaaggaaatgaaactggtgaatgtactggatcatattactgtaagaaaggggtgattttgcccatttgggaaccccaagacccttcttttggggacaaaattgctagagctactgtgtattttgtggccatggtctacatgtttcttggagtctctatcatagctgatcggttcatgtcctctatagaagtcatcacatctcaagaaaaagaaataaccataaagaaacccaatggagagaccaccaagacaactgtgaggatctggaatgaaacagtttctaacctgaccttgatggccctgggatcttctgctcctgagattctcctttcagtaattgaagtgtgtggccataacttcactgcaggagacctcggtcctagcaccatcgtgggaagtgctgcattcaatatgttcatcattattgcactctgtgtttatgtggtgcctgacggagagacaaggaagattaagcatttgcgtgtcttctttgtgacagcagcctggagcatctttgcctacacctggctttacattattttgtctgtcatatctcctggtgttgtggaggtctgggaaggtttgcttactttcttcttctttcccatctgtgttgtgttcgcttgggtagcggataggagacttctgttttacaagtatgtctacaagaggtatcgagctggcaagcagagggggatgattattgaacatgaaggagacaggccatcttctaagactgaaattgaaatggacgggaaagtggtcaattctcatgttgaaaatttcttagatggtgctctggttctggaggtggatgagagggaccaagatgatgaagaagctaggcgagaaatggctaggattctgaaggaacttaagcagaagcatccagataaagaaatagagcaattaatagaattagctaactaccaagtcctaagtcagcagcaaaaaagtagagcattttatcgcattcaagctactcgcctcatgactggagctggcaacattttaaagaggcatgcagctgaccaagcaaggaaggctgtcagcatgcacgaggtcaacactgaagtgactgaaaatgaccctgttagtaagatcttctttgaacaagggacatatcagtgtctggagaactgtggtactgtggcccttaccattatccgcagaggtggtgatttgactaacactgtgtttgttgacttcagaacagaggatggcacagcaaatgctgggtctgattatgaatttactgaaggaactgtggtgtttaagcctggtgatacccagaaggaaatcagagtgggtatcatagatgatgatatctttgaggaggatgaaaatttccttgtgcatctcagcaatgtcaaagtatcttctgaagcttcagaagatggcatactggaagccaatcatgtttctacacttgcttgcctcggatctccctccactgccactgtaactatttttgatgatgaccacgcaggcatttttacttttgaggaacctgtgactcatgtgagtgagagcattggcatcatggaggtgaaagtattgagaacatctggagctcgaggaaatgttatcgttccatataaaaccatcgaagggactgccagaggtggaggggaggattttgaggacacttgtggagagctcgaattccagaatgatgaaattgtcaaaacaatatcagtcaaggtaattgatgatgaggagtatgagaaaaacaagaccttcttccttgagattggagagccccgcctggaggcctactgccacataaaaggcttctaaaggaactatcagatatagtaaatttatatatatacatatatatacataaaaattatgtataatggacagaggaaactgacatttgtcatgttcacttacctgctgatggaatccagcttcaagagcatactctgtactagggccgaagtaaaaaaccatcacctcccattcccaggggcatcatcatgttcaacaaggcatggaggcagggccatctttgcagctcagtctagaagggctgcactctctccaggttgataaatccttaaggctttgatttgttttgtttttggttttgttttcagtggagctggggaggtagttaatgtttggctttatttttgttattttgttttgttttgtttttttgggagagtcagggttgttgcttttctttgtggaaagtgaaaccatccaaatgtaaatgggttttggtaaaaatttaaatcattagtattccccctcacctcccccaatcactttaaaacttattttggattaagaaaaaatctgggcatggaagaagaaagaagcatgtcttcatcgtattaccaaagttcatgcttatctccggaatgtgagtggaggtgaagctgcctccaagaagaagcataaaagtggaatggagccaggaaatccgatggttctagaaatagtctgatatttaaacatgtgatacctggcagtctcgtttaacaggtacaaggaaaacgtgcctagattcccaggaacgtgcaaaatcctttctttcttatctctttagctctggactgtgattggcaaggtccttcttccagcattcagcccagctaagcccccaggtgccccatcccaaccctg

SEQ ID NO: 277448 - DNA, 435 bp, Homo sapiens
gcggccgctggcgcggagcttgtggcgccagaattcggagcgcggaagagccagagctgcgagcgcctggagctggatctctctccggtcgcgcacgccgaggccagtagggagagaagatggtggttctccgcagcagcttggagctgcacaaccactccgcggcctcggccacgggctccttggacctgtccagtgacttcctcagtctggagcacatcggccggaggcggctccgctcggccggcgcggcgcagaagaaacccgcggcgaccacagccaaagcgggcgtgagtacgggcctgaggcgggctcccagggcggttcccggggggactgccggcagcccggcgctcggaggggcctgggggtgggcggcgccggtcagggtgacagttgtcgggggagaagtgtggtcgaggacgagtaaaatgg

SEQ ID NO: 277449 - DNA, 5529 bp, Homo sapiens
cttgttatgaactataaaccagtaaatcttatattagctgcttcatagacattgctgatatttgtttatcatgaaatggtttttctagatactaacttgtagtttcttggggagatacaaaatgattctgcacaaaaagcagtttttactaacttgtaatcagagaatactctttggaggaatttaaattggagttttgtaaagaaaaacttagatggctttcttaatttttcttaaaggatgggtcatcagttaaggaagttgaaacctaccaccggacacgtgctttaagatctttgagaaaagatgcacagaattcttcagattctagttttgagaagaatgtggaaataacggagcaacttgctaatggcaggcattttacaaggcagttggccagacagcaggctgataaaaaaaaagaagagcacagagaagacaaagtgattccagttactcggtcattgagggctagaaacatcgttcaaagtacagaacacttacatgaagataatggtgatgttgaagtgcgtcgaagttgtaggattagaagtcgttatagtggtgtaaaccagtccatgctgtttgacaaacttataactaacactgctgaagctgtacttcaaaaaatggatgacatgaagaagatgcgtagacagcgaatgagagaacttgaagacttgggagtgtttaatgaaacagaagaaagcaatcttaatatgtacacaagaggaaaacagaaagatattcaaagaactgatgaagaaacaactgataatcaagaaggcagtgtggagtcatctgaagagggtgaagaccaagaacatgaagatgatggtgaagatgaagatgatgaagatgatgatgatgatgacgatgatgatgatgatgatgatgatgaagatgatgaagatgaagaagatggagaagaagagaatcagaagcgatattatcttagacagagaaaagctactgtttactatcaggctccattggaaaaacctcgtcaccagagaaagcccaacatattttatagtggcccagcttctcctgcaagaccaagataccgattatcttccgcaggaccaagaagtccttactgtaaacgaatgaacaggcgaaggcatgcaatccacagtagtgactcgacttcatcttcctcctctgaagatgaacagcactttgagaggcggaggaaaaggagtcgtaatagggctatcaataggtgcctcccactaaattttcggaaagatgaattaaaaggcatttataaagatcgaatgaaaattggagcaagccttgccgatgttgatccaatgcaactagattcttcagtacgatttgatagtgttggtggcctgtctaatcatatagcagctctaaaagagatggtggtgtttccattactttatccagaagtctttgaaaaatttaaaattcaacccccaagaggttgtttgttttatgggccacctggaactggaaagactctggttgccagagcacttgccaatgagtgcagtcaaggggataaaagagtagcatttttcatgaggaaaggtgctgattgtctaagtaaatgggtaggagaatctgaaagacagctacgattgctgtttgatcaggcctatcagatgcgcccatcaattattttttttgacgaaattgatggtctggctccagtacggtcaagcaggcaagatcagattcacagttctattgtttccaccctgctagctcttatggatggattggacagcagaggggaaattgtggtcattggtgctacgaacaggctagattctatagatcctgctttacgaaggcctggtcgctttgatagagaattcctctttagcctgcctgataaagaggctcgaaaagagattctaaagattcacaccagggattggaatcccaaaccactggacacatttttagaagagctagcagaaaactgtgttggatactgtggagcagatattaaatcaatatgtgctgaagctgctttatgtgctttacgacgacgctacccacagatctataccactagtgagaaactgcagttggatctctcttcaattaatatctcagctaaggatttcgaggtagctatgcaaaagatgataccagcctcccaaagagctgtgacatcacctgggcaggcactgtccaccgttgtgaaaccactcctgcaaaacactgttgacaagattttagaagccctgcagagagtatttccacatgcagaattcagaacaaataaaacattagactcagatatttcttgtcctctgctagaaagtgacttggcttacagtgatgatgatgttccatcagtttatgaaaatggactttctcagaaatcttctcataaggcaaaagacaattttaattttcttcatttgaatagaaatgcttgttaccaacctatgtcttttcgaccaagaatattgatagtaggagaaccaggatttgggcaaggttctcacttggcaccagctgtcattcatgctttggaaaagtttactgtatatacattagacattcctgttctttttggagttagtactacatcccctgaagaaacatgtgcccaggtgattcgtgaagctaagagaacagcaccaagtatagtgtatgttcctcatatccacgtgtggtgggaaatagttggaccgacacttaaagccacatttaccacattattacagaatattccttcatttgctccagttttactacttgcaacttctgacaaaccccattccgctttgccagaagaggtgcaagaattgtttatccgtgattatggagagatttttaatgtccagttaccggataaagaagaacggacaaaattttttgaagatttaattctaaaacaagctgctaagcctcctatatcaaaaaagaaagcagttttgcaggctttggaggtactcccagtagcaccaccacctgagccaagatcactgacagcagaagaagtgaaacgactagaagaacaagaagaagatacatttagagaactgaggattttcttaagaaatgttacacataggcttgctattgacaagcgattccgagtgtttactaagcctgttgaccctgatgaggttcctgattatgtcactgtaataaagcaaccaatggacctttcatctgtaatcagtaaaattgatctacacaagtatctgactgtgaaagactatttgagagatattgatctaatctgtagtaatgccttagaatacaatccagatagagatcctggagatcgtcttattaggcatagagcctgtgctttaagagatactgcctatgccataattaaagaagaacttgatgaagactttgagcagctctgtgaagaaattcaggaatctagaaagaaaagaggttgtagctcctccaaatatgccccgtcttactaccatgtgatgccaaagcaaaattccactcttgttggtgataaaagatcagacccagagcagaatgaaaagctaaagacaccgagtactcctgtggcttgcagcactcctgctcagttgaagaggaaaattcgcaaaaagtcaaactggtacttaggcaccataaaaaagcgaaggaagatttcacaggcaaaggatgatagccagaatgccatagatcacaaaattgagagtgatacagaggaaactcaagacacaagtgtagatcataatgagaccggaaacacaggagagtcttcggtggaagaaaatgaaaaacagcaaaatgcctctgaaagcaaactggaattgagaaataattcaaatacttgtaatatagagaatgagcttgaagactctaggaagactacagcatgtacagaattgagagacaagattgcttgtaatggagatgcttctagctctcagataatacatatttctgatgaaaatgaaggaaaagaaatgtgtgttctgcgaatgactcgagctagacgttcccaggtagaacagcagcagctcatcactgttgaaaaggctttggcaattctttctcagcctacaccctcacttgttgtggatcatgagcgattaaaaaatcttttgaagactgttgttaaaaaaagtcaaaactacaacatatttcagttggaaaatttgtatgcagtaatcagccaatgtatttatcggcatcgcaaggaccatgataaaacatcacttattcagaaaatggagcaagaggtagaaaacttcagttgttccagatgatgatgtcatggtatcgagtattctttatattcagttcctatttaagtcatttttgtcatgtccgcctaattgatgtagtatgaaaccctgcatctttaaggaaaagattaaaatagtaaaataaaagtatttaaactttcctgatatttatgtacatattaagataaatgtcatgtgtaagataactgataaatattggaactttgctagaacaagaccctgtagtaatagtaataatagttgaagtttggccaactcttaataaagttattttggtaactaatgttttatggcacttaagaataattagcagcgttaaattttgtttgtattaagcacttttaattttatccttcctaaaaatagtttattgtatctgacaagaaacttacttaaccattgtgtccttcccatcttttttgtcatctttgttttcttcaaatgccctcctcccatctgccttgagattcccttgtcttcacttaaaagccagagtgcaagtcatgatttgcgggagggctcttgaaccacttctggctgcaccacaattctgtacttgagtatcacagtcattgtttttgagacaaacatttttataattctaatttgggttaataaagattttaaatatttcttggtttacttttgtaattatatacacaacaaatgtattaataactaccttgttaaacaccttttaatagcacaaggtttttatatttgcaagctgttgatatctttctaaaactgtttaggttatagtctattgatactttttatatacaattttataaatataaatattataattttatattaatggtaccaaaaatacatttcttaaggttaaaagcatgcacttccatgcatacttgcttttggggagagtggggagaagacattctaataatcagtttgtgaaatagcttctgttggaaaccttttgaggggaataaggaatggtcatctaaaatgagagattctggattttaatgcagttcaaagttgagctgtatttttgttgttgatttatctggattttttttaaagccttctaaaacccagtgaattcaataccttaattagtacatactatcttatgtaatgcataaagcaatgccagtcactgagaacatttaaatatatttatattcctggagatacacattctcatttttgttggtttattataaattattcttctagatgcatcttttataactaggatttcattttgtgtgtatagcttatgtaataaattttaaaggtgaaaactctcttaaaattg

SEQ ID NO: 277450 - DNA, 4557 bp, Homo sapiens
gcggccgctggcgcggagcttgtggcgccagaattcggagcgcggaagagccagagctgcgagcgcctggagctggatctctctccggtcgcgcacgccgaggccagtagggagagaagatggtggttctccgcagcagcttggagctgcacaaccactccgcggcctcggccacgggctccttggacctgtccagtgacttcctcagtctggagcacatcggccggaggcggctccgctcggccggcgcggcgcagaagaaacccgcggcgaccacagccaaagcgggcgatgggtcatcagttaaggaagttgaaacctaccaccggacacgtgctttaagatctttgagaaaagatgcacagaattcttcagattctagttttgagaagaatgtggaaataacggagcaacttgctaatggcaggcattttacaaggcagttggccagacagcaggctgataaaaaaaaagaagagcacagagaagacaaagtgattccagttactcggtcattgagggctagaaacatcgttcaaagtacagaacacttacatgaagataatggtgatgttgaagtgcgtcgaagttgtaggattagaagtcgttatagtggtgtaaaccagtccatgctgtttgacaaacttataactaacactgctgaagctgtacttcaaaaaatggatgacatgaagaagatgcgtagacagcgaatgagagaacttgaagacttgggagtgtttaatgaaacagaagaaagcaatcttaatatgtacacaagaggaaaacagaaagatattcaaagaactgatgaagaaacaactgataatcaagaaggcagtgtggagtcatctgaagagggtgaagaccaagaacatgaagatgatggtgaagatgaagatgatgaagatgatgatgatgatgacgatgatgatgatgatgatgatgatgaagatgatgaagatgaagaagatggagaagaagagaatcagaagcgatattatcttagacagagaaaagctactgtttactatcaggctccattggaaaaacctcgtcaccagagaaagcccaacatattttatagtggcccagcttctcctgcaagaccaagataccgattatcttccgcaggaccaagaagtccttactgtaaacgaatgaacaggcgaaggcatgcaatccacagtagtgactcgacttcatcttcctcctctgaagatgaacagcactttgagaggcggaggaaaaggagtcgtaatagggctatcaataggtgcctcccactaaattttcggaaagatgaattaaaaggcatttataaagatcgaatgaaaattggagcaagccttgccgatgttgatccaatgcaactagattcttcagtacgatttgatagtgttggtggcctgtctaatcatatagcagctctaaaagagatggtggtgtttccattactttatccagaagtctttgaaaaatttaaaattcaacccccaagaggttgtttgttttatgggccacctggaactggaaagactctggttgccagagcacttgccaatgagtgcagtcaaggggataaaagagtagcatttttcatgaggaaaggtgctgattgtctaagtaaatgggtaggagaatctgaaagacagctacgattgctgtttgatcaggcctatcagatgcgcccatcaattattttttttgacgaaattgatggtctggctccagtacggtcaagcaggcaagatcagattcacagttctattgtttccaccctgctagctcttatggatggattggacagcagaggggaaattgtggtcattggtgctacgaacaggctagattctatagatcctgctttacgaaggcctggtcgctttgatagagaattcctctttagcctgcctgataaagaggctcgaaaagagattctaaagattcacaccagggattggaatcccaaaccactggacacatttttagaagagctagcagaaaactgtgttggatactgtggagcagatattaaatcaatatgtgctgaagctgctttatgtgctttacgacgacgctacccacagatctataccactagtgagaaactgcagttggatctctcttcaattaatatctcagctaaggatttcgaggtagctatgcaaaagatgataccagcctcccaaagagctgtgacatcacctgggcaggcactgtccaccgttgtgaaaccactcctgcaaaacactgttgacaagattttagaagccctgcagagagtatttccacatgcagaattcagaacaaataaaacattagactcagatatttcttgtcctctgctagaaagtgacttggcttacagtgatgatgatgttccatcagtttatgaaaatggactttctcagaaatcttctcataaggcaaaagacaattttaattttcttcatttgaatagaaatgcttgttaccaacctatgtcttttcgaccaagaatattgatagtaggagaaccaggatttgggcaaggttctcacttggcaccagctgtcattcatgctttggaaaagtttactgtatatacattagacattcctgttctttttggagttagtactacatcccctgaagaaacatgtgcccaggtgattcgtgaagctaagagaacagcaccaagtatagtgtatgttcctcatatccacgtgtggtgggaaatagttggaccgacacttaaagccacatttaccacattattacagaatattccttcatttgctccagttttactacttgcaacttctgacaaaccccattccgctttgccagaagaggtgcaagaattgtttatccgtgattatggagagatttttaatgtccagttaccggataaagaagaacggacaaaattttttgaagatttaattctaaaacaagctgctaagcctcctatatcaaaaaagaaagcagttttgcaggctttggaggtactcccagtagcaccaccacctgagccaagatcactgacagcagaagaagtgaaacgactagaagaacaagaagaagatacatttagagaactgaggattttcttaagaaatgttacacataggcttgctattgacaagcgattccgagtgtttactaagcctgttgaccctgatgaggttcctgattatgtcactgtaataaagcaaccaatggacctttcatctgtaatcagtaaaattgatctacacaagtatctgactgtgaaagactatttgagagatattgatctaatctgtagtaatgccttagaatacaatccagatagagatcctggagatcgtcttattaggcatagagcctgtgctttaagagatactgcctatgccataattaaagaagaacttgatgaagactttgagcagctctgtgaagaaattcaggaatctagaaagaaaagaggttgtagctcctccaaatatgccccgtcttactaccatgtgatgccaaagcaaaattccactcttgttggtgataaaagatcagacccagagcagaatgaaaagctaaagacaccgagtactcctgtggcttgcagcactcctgctcagttgaagaggaaaattcgcaaaaagtcaaactggtacttaggcaccataaaaaagcgaaggaagatttcacaggcaaaggatgatagccagaatgccatagatcacaaaattgagagtgatacagaggaaactcaagacacaagtgtagatcataatgagaccggaaacacaggagagtcttcggtggaagaaaatgaaaaacagcaaaatgcctctgaaagcaaactggaattgagaaataattcaaatacttgtaatatagagaatgagcttgaagactctaggaagactacagcatgtacagaattgagagacaagattgcttgtaatggagatgcttctagctctcagataatacatatttctgatgaaaatgaaggaaaagaaatgtgtgttctgcgaatgactcgagctagacgttcccaggtagaacagcagcagctcatcactgttgaaaaggctttggcaattctttctcagcctacaccctcacttgttgtggatcatgagcgattaaaaaatcttttgaagactgttgttaaaaaaagtcaaaactacaacatatttcagttggaaaatttgtatgcagtaatcagccaatgtatttatcggcatcgcaaggaccatgataaaacatcacttattcagaaaatggagcaagaggtagaaaacttcagttgttccagatgatgatgtcatggtatcgagtattctttatattcagttcctatttaagtcatttttgtcatgtccgcctaattgatgtagtatgaaaccctgcatctttaaggaaaagattaaaatagtaaaataaaagtatttaaactttcctgatatttatgtacatattaagataaatgtcatgtgtaagataactgataaatattggaactttgctagaacaagaccccaaaagggggatcctatagatctcgccccgcaggcaccaggctgg

SEQ ID NO: 277451 - DNA, 5526 bp, Homo sapiens
gcggccgctggcgcggagcttgtggcgccagaattcggagcgcggaagagccagagctgcgagcgcctggagctggatctctctccggtcgcgcacgccgaggccagtagggagagaagatggtggttctccgcagcagcttggagctgcacaaccactccgcggcctcggccacgggctccttggacctgtccagtgacttcctcagtctggagcacatcggccggaggcggctccgctcggccggcgcggcgcagaagaaacccgcggcgaccacagccaaagcgggcgatgggtcatcagttaaggaagttgaaacctaccaccggacacgtgctttaagatctttgagaaaagatgcacagaattcttcagattctagttttgagaagaatgtggaaataacggagcaacttgctaatggcaggcattttacaaggcagttggccagacagcaggctgataaaaaaaaagaagagcacagagaagacaaagtgattccagttactcggtcattgagggctagaaacatcgttcaaagtacagaacacttacatgaagataatggtgatgttgaagtgcgtcgaagttgtaggattagaagtcgttatagtggtgtaaaccagtccatgctgtttgacaaacttataactaacactgctgaagctgtacttcaaaaaatggatgacatgaagaagatgcgtagacagcgaatgagagaacttgaagacttgggagtgtttaatgaaacagaagaaagcaatcttaatatgtacacaagaggaaaacagaaagatattcaaagaactgatgaagaaacaactgataatcaagaaggcagtgtggagtcatctgaagagggtgaagaccaagaacatgaagatgatggtgaagatgaagatgatgaagatgatgatgatgatgacgatgatgatgatgatgatgatgatgaagatgatgaagatgaagaagatggagaagaagagaatcagaagcgatattatcttagacagagaaaagctactgtttactatcaggctccattggaaaaacctcgtcaccagagaaagcccaacatattttatagtggcccagcttctcctgcaagaccaagataccgattatcttccgcaggaccaagaagtccttactgtaaacgaatgaacaggcgaaggcatgcaatccacagtagtgactcgacttcatcttcctcctctgaagatgaacagcactttgagaggcggaggaaaaggagtcgtaatagggctatcaataggtgcctcccactaaattttcggaaagatgaattaaaaggcatttataaagatcgaatgaaaattggagcaagccttgccgatgttgatccaatgcaactagattcttcagtacgatttgatagtgttggtggcctgtctaatcatatagcagctctaaaagagatggtggtgtttccattactttatccagaagtctttgaaaaatttaaaattcaacccccaagaggttgtttgttttatgggccacctggaactggaaagactctggttgccagagcacttgccaatgagtgcagtcaaggggataaaagagtagcatttttcatgaggaaaggtgctgattgtctaagtaaatgggtaggagaatctgaaagacagctacgattgctgtttgatcaggcctatcagatgcgcccatcaattattttttttgacgaaattgatggtctggctccagtacggtcaagcaggcaagatcagattcacagttctattgtttccaccctgctagctcttatggatggattggacagcagaggggaaattgtggtcattggtgctacgaacaggctagattctatagatcctgctttacgaaggcctggtcgctttgatagagaattcctctttagcctgcctgataaagaggctcgaaaagagattctaaagattcacaccagggattggaatcccaaaccactggacacatttttagaagagctagcagaaaactgtgttggatactgtggagcagatattaaatcaatatgtgctgaagctgctttatgtgctttacgacgacgctacccacagatctataccactagtgagaaactgcagttggatctctcttcaattaatatctcagctaaggatttcgaggtagctatgcaaaagatgataccagcctcccaaagagctgtgacatcacctgggcaggcactgtccaccgttgtgaaaccactcctgcaaaacactgttgacaagattttagaagccctgcagagagtatttccacatgcagaattcagaacaaataaaacattagactcagatatttcttgtcctctgctagaaagtgacttggcttacagtgatgatgatgttccatcagtttatgaaaatggactttctcagaaatcttctcataaggcaaaagacaattttaattttcttcatttgaatagaaatgcttgttaccaacctatgtcttttcgaccaagaatattgatagtaggagaaccaggatttgggcaaggttctcacttggcaccagctgtcattcatgctttggaaaagtttactgtatatacattagacattcctgttctttttggagttagtactacatcccctgaagaaacatgtgcccaggtgattcgtgaagctaagagaacagcaccaagtatagtgtatgttcctcatatccacgtgtggtgggaaatagttggaccgacacttaaagccacatttaccacattattacagaatattccttcatttgctccagttttactacttgcaacttctgacaaaccccattccgctttgccagaagaggtgcaagaattgtttatccgtgattatggagagatttttaatgtccagttaccggataaagaagaacggacaaaattttttgaagatttaattctaaaacaagctgctaagcctcctatatcaaaaaagaaagcagttttgcaggctttggaggtactcccagtagcaccaccacctgagccaagatcactgacagcagaagaagtgaaacgactagaagaacaagaagaagatacatttagagaactgaggattttcttaagaaatgttacacataggcttgctattgacaagcgattccgagtgtttactaagcctgttgaccctgatgaggttcctgattatgtcactgtaataaagcaaccaatggacctttcatctgtaatcagtaaaattgatctacacaagtatctgactgtgaaagactatttgagagatattgatctaatctgtagtaatgccttagaatacaatccagatagagatcctggagatcgtcttattaggcatagagcctgtgctttaagagatactgcctatgccataattaaagaagaacttgatgaagactttgagcagctctgtgaagaaattcaggaatctagaaagaaaagaggttgtagctcctccaaatatgccccgtcttactaccatgtgatgccaaagcaaaattccactcttgttggtgataaaagatcagacccagagcagaatgaaaagctaaagacaccgagtactcctgtggcttgcagcactcctgctcagttgaagaggaaaattcgcaaaaagtcaaactggtacttaggcaccataaaaaagcgaaggaagatttcacaggcaaaggatgatagccagaatgccatagatcacaaaattgagagtgatacagaggaaactcaagacacaagtgtagatcataatgagaccggaaacacaggagagtcttcggtggaagaaaatgaaaaacagcaaaatgcctctgaaagcaaactggaattgagaaataattcaaatacttgtaatatagagaatgagcttgaagactctaggaagactacagcatgtacagaattgagagacaagattgcttgtaatggagatgcttctagctctcagataatacatatttctgatgaaaatgaaggaaaagaaatgtgtgttctgcgaatgactcgagctagacgttcccaggtagaacagcagcagctcatcactgttgaaaaggctttggcaattctttctcagcctacaccctcacttgttgtggatcatgagcgattaaaaaatcttttgaagactgttgttaaaaaaagtcaaaactacaacatatttcagttggaaaatttgtatgcagtaatcagccaatgtatttatcggcatcgcaaggaccatgataaaacatcacttattcaggtaaactcttgagtggaaacagttcctatttaagtcatttttgtcatgtccgcctaattgatgtagtatgaaaccctgcatctttaaggaaaagattaaaatagtaaaataaaagtatttaaactttcctgatatttatgtacatattaagataaatgtcatgtgtaagataactgataaatattggaactttgctagaacaagaccctgtagtaatagtaataatagttgaagtttggccaactcttaataaagttattttggtaactaatgttttatggcacttaagaataattagcagcgttaaattttgtttgtattaagcacttttaattttatccttcctaaaaatagtttattgtatctgacaagaaacttacttaaccattgtgtccttcccatcttttttgtcatctttgttttcttcaaatgccctcctcccatctgccttgagattcccttgtcttcacttaaaagccagagtgcaagtcatgatttgcgggagggctcttgaaccacttctggctgcaccacaattctgtacttgagtatcacagtcattgtttttgagacaaacatttttataattctaatttgggttaataaagattttaaatatttcttggtttacttttgtaattatatacacaacaaatgtattaataactaccttgttaaacaccttttaatagcacaaggtttttatatttgcaagctgttgatatctttctaaaactgtttaggttatagtctattgatactttttatatacaattttataaatataaatattataattttatattaatggtaccaaaaatacatttcttaaggttaaaagcatgcacttccatgcatacttgcttttggggagagtggggagaagacattctaataatcagtttgtgaaatagcttctgttggaaaccttttgaggggaataaggaatggtcatctaaaatgagagattctggattttaatgcagttcaaagttgagctgtatttttgttgttgatttatctggattttttttaaagccttctaaaacccagtgaattcaataccttaattagtacatactatcttatgtaatgcataaagcaatgccagtcactgagaacatttaaatatatttatattcctggagatacacattctcatttttgttggtttattataaattattcttctagatgcatcttttataactaggatttcattttgtgtgtatagcttatgtaataaattttaaaggtgaaaactctcttaaaattg

SEQ ID NO: 277452 - DNA, 2245 bp, Homo sapiens
taattatggcataggcagtatctcttaaagcacaggctctatgccataattaaagaagaacttgatgaagactttgagcagctctgtgaagaaattcaggaatctagaaagaaaagaggttgtagctcctccaaatatgccccgtcttactaccatgtgatgccaaagcaaaattccactcttgttggtgataaaagatcagacccagagcagaatgaaaagctaaagacaccgagtactcctgtggcttgcagcactcctgctcagttgaagaggaaaattcgcaaaaagtcaaactggtacttaggcaccataaaaaagcgaaggaagatttcacaggcaaaggatgatagccagaatgccatagatcacaaaattgagagtgatacagaggaaactcaagacacaagtgtagatcataatgagaccggaaacacaggagagtcttcggtggaagaaaatgaaaaacagcaaaatgcctctgaaagcaaactggaattgagaaataattcaaatacttgtaatatagagaatgagcttgaagactctaggaagactacagcatgtacagaattgagagacaagattgcttgtaatggagatgcttctagctctcagataatacatatttctgatgaaaatgaaggaaaagaaatgtgtgttctgcgaatgactcgagctagacgttcccaggtagaacagcagcagctcatcactgttgaaaaggctttggcaattctttctcagcctacaccctcacttgttgtggatcatgagcgattaaaaaatcttttgaagactgttgttaaaaaaagtcaaaactacaacatatttcagttggaaaatttgtatgcagtaatcagccaatgtatttatcggcatcgcaaggaccatgataaaacatcacttattcagaaaatggagcaagaggtagaaaacttcagttgttccagatgatgatgtcatggtatcgagtattctttatattcagttcctatttaagtcatttttgtcatgtccgcctaattgatgtagtatgaaaccctgcatctttaaggaaaagattaaaatagtaaaataaaagtatttaaactttcctgatatttatgtacatattaagataaatgtcatgtgtaagataactgataaatattggaactttgctagaacaagaccctgtagtaatagtaataatagttgaagtttggccaactcttaataaagttattttggtaactaatgttttatggcacttaagaataattagcagcgttaaattttgtttgtattaagcacttttaattttatccttcctaaaaatagtttattgtatctgacaagaaacttacttaaccattgtgtccttcccatcttttttgtcatctttgttttcttcaaatgccctcctcccatctgccttgagattcccttgtcttcacttaaaagccagagtgcaagtcatgatttgcgggagggctcttgaaccacttctggctgcaccacaattctgtacttgagtatcacagtcattgtttttgagacaaacatttttataattctaatttgggttaataaagattttaaatatttcttggtttacttttgtaattatatacacaacaaatgtattaataactaccttgttaaacaccttttaatagcacaaggtttttatatttgcaagctgttgatatctttctaaaactgtttaggttatagtctattgatactttttatatacaattttataaatataaatattataattttatattaatggtaccaaaaatacatttcttaaggttaaaagcatgcacttccatgcatacttgcttttggggagagtggggagaagacattctaataatcagtttgtgaaatagcttctgttggaaaccttttgaggggaataaggaatggtcatctaaaatgagagattctggattttaatgcagttcaaagttgagctgtatttttgttgttgatttatctggattttttttaaagccttctaaaacccagtgaattcaataccttaattagtacatactatcttatgtaatgcataaagcaatgccagtcactgagaacatttaaatatatttatattcctggagatacacattctcatttttgttggtttattataaattattcttctagatgcatcttttataactaggatttcattttgtgtgtatagcttatgtaataaattttaaaggtgaaaactctcttaaaattg

SEQ ID NO: 277453 - DNA, 2054 bp, Homo sapiens
gcggccgctggcgcggagcttgtggcgccagaattcggagcgcggaagagccagagctgcgagcgcctggagctggatctctctccggtcgcgcacgccgaggccagtagggagagaagatggtggttctccgcagcagcttggagctgcacaaccactccgcggcctcggccacgggctccttggacctgtccagtgacttcctcagtctggagcacatcggccggaggcggctccgctcggccggcgcggcgcagaagaaacccgcggcgaccacagccaaagcgggcgatgggtcatcagttaaggaagttgaaacctaccaccggacacgtgctttaagatctttgagaaaagatgcacagaattcttcagattctagttttgagaagaatgtggaaataacggagcaacttgctaatggcaggcattttacaaggcagttggccagacagcaggctgataaaaaaaaagaagagcacagagaagacaaagtgattccagttactcggtcattgagggctagaaacatcgttcaaagtacagaacacttacatgaagataatggtgatgttgaagtgcgtcgaagttgtaggattagaagtcgttatagtggtgtaaaccagtccatgctgtttgacaaacttataactaacactgctgaagctgtacttcaaaaaatggatgacatgaagaagatgcgtagacagcgaatgagagaacttgaagacttgggagtgtttaatgaaacagaagaaagcaatcttaatatgtacacaagaggaaaacagaaagatattcaaagaactgatgaagaaacaactgataatcaagaaggcagtgtggagtcatctgaagagggtgaagaccaagaacatgaagatgatggtgaagatgaagatgatgaagatgatgatgatgatgacgatgatgatgatgatgatgatgatgaagatgatgaagatgaagaagatggagaagaagagaatcagaagcgatattatcttagacagagaaaagctactgtttactatcaggctccattggaaaaacctcgtcaccagagaaagcccaacatattttatagtggcccagcttctcctgcaagaccaagataccgattatcttccgcaggaccaagaagtccttactgtaaacgaatgaacaggcgaaggcatgcaatccacagtagtgactcgacttcatcttcctcctctgaagatgaacagcactttgagaggcggaggaaaaggagtcgtaatagggctatcaataggtgcctcccactaaattttcggaaagatgaattaaaaggcatttataaagatcgaatgaaaattggagcaagccttgccgatgttgatccaatgcaactagattcttcagtacgatttgatagtgttggtggcctgtctaatcatatagcagctctaaaagagatggtggtgtttccattactttatccagaagtctttgaaaaatttaaaattcaacccccaagaggttgtttgttttatgggccacctggaactggaaagactctggttgccagagcacttgccaatgagtgcagtcaaggggataaaagagtagcatttttcatgaggaaaggtgctgattgtctaagtaaatgggtaggagaatctgaaagacagctacgattgctgtttgatcaggcctatcagatgcgcccatcaattattttttttgacgaaattgatggtctggctccagtacggtcaagcaggcaagatcagattcacaggtaaaacttgcttgatggcacttcaacgtttcttcctatttcctgagtggtattgatgtgtgagagatagaatgttaaatggtgaaagaaactttataagctagtagttcctttttttggtagtagaaccccagtatatagtacaaaaataaaaaatgtggatggttgcagtggctcatacctgtattcctggcactttgggaggccaaggcaggcagatcacttgaggtcaagagtttgagaccagcctggccaacatggtgaaatcctgtctctactaaaaaaaaaa

SEQ ID NO: 277454 - DNA, 982 bp, Homo sapiens
gcggccgctggcgcggagcttgtggcgccagaattcggagcgcggaagagccagagctgcgagcgcctggagctggatctctctccggtcgcgcacgccgaggccagtagggagagaagatggtggttctccgcagcagcttggagctgcacaaccactccgcggcctcggccacgggctccttggacctgtccagtgacttcctcagtctggagcacatcggccggaggcggctccgctcggccggcgcggcgcagaagaaacccgcggcgaccacagccaaagcgggcgatgggtcatcagttaaggaagttgaaacctaccaccggacacgtgctttaagatctttgagaaaagatgcacagaattcttcagattctagttttgagaagaatgtggaaataacggagcaacttgctaatggcaggcattttacaaggcagttggccagacagcaggctgataaaaaaaaagaagagcacagagaagacaaagtgattccagttactcggtcattgagggctagaaacatcgttcaaagtacagaacacttacatgaagataatggtgatgttgaagtgcgtcgaagttgtaggattagaagtcgttatagtggtgtaaaccagtccatgctgtttgacaaacttataactaacactgctgaagctgtacttcaaaaaatggatgacatgaagaagatgcgtagacagcgaatgagagaacttgaagacttgggagtgtttaatgaaacagaagaagtaaatatattcttccattaagggaatgatttaatatccagtttaatttttttatagtacctaatccatttttcattaaatatctactttttccagcatttatttgatcagtcattagttactgctggaaatgtaagagtttatggctgtaaatatcttaattttaaacaagattggaggatccaacttaatttttttaataaatagattccaaatgttaatgg

SEQ ID NO: 277455 - DNA, 599 bp, Homo sapiens
actttatatgttactcctgggaggttaaacattgtttcagactaatagaactagcattattaacgtgctgactctaactgaatttgttttgttctctctctactaggtgattcgtgaagctaagagaacagcaccaagtatagtgtatgttcctcatatccacgtgtggtgggaaatagttggaccgacacttaaagccacatttaccacattattacagaatattccttcatttgctccagttttactacttgcaacttctgacaaaccccattccgctttgccagaagaggtaatttatgtggggcggtatcattatactttcaaaaagagttgtttctaccacaataatcataacttattgaaaaaattcaaatgctgtagaagtgaataaaaggataagttttcttatcaaatataccattggtaactatttggtatatgtgctcattgggcaagatggtatatgtatatgtgtatgtatatattaaggatacataaattttttctcttgaaaaatggtattatatgccgggtgcagtggctcacgcctgtaatcccagcactttgggaggccgaggtgggtggatcatgaggtc

SEQ ID NO: 277456 - DNA, 446 bp, Homo sapiens
cttctcacagtatgctctattcttgtttctgtattttaatcatacaaaatactgtggtttctcactatttatcctttcatatatcagggtttttcactctttgaatttcagaaaatggttgaatgttctttcatcatttttctttaaatttcttgaagctcagttgaagaggaaaattcgcaaaaagtcaaactggtacttaggcaccataaaaaagcgaaggaagatttcacaggcaaaggatgatagccagaatgccatagatcacaaaattgagagtgatacagaggaaactcaagacacaagtgtagatcataatgagaccggaaacacaggagagtcttcggtggaagaaaatgaaaaacagcaaaatgcctctgaaagcaaactggaattgagaaataattcaaatacttgtaatatagagaatgagcttgaagactcta

SEQ ID NO: 277457 - DNA, 3359 bp, Homo sapiens
gcggccgctggcgcggagcttgtggcgccagaattcggagcgcggaagagccagagctgcgagcgcctggagctggatctctctccggtcgcgcacgccgaggccagtagggagagaagatggtggttctccgcagcagcttggagctgcacaaccactccgcggcctcggccacgggctccttggacctgtccagtgacttcctcagtctggagcacatcggccggaggcggctccgctcggccggcgcggcgcagaagaaacccgcggcgaccacagccaaagcgggcgatgggtcatcagttaaggaagttgaaacctaccaccggacacgtgctttaagatctttgagaaaagatgcacagaattcttcagattctagttttgagaagaatgtggaaataacggagcaacttgctaatggcaggcattttacaaggcagttggccagacagcaggctgataaaaaaaaagaagagcacagagaagacaaagtgattccagttactcggtcattgagggctagaaacatcgttcaaagtacagaacacttacatgaagataatggtgatgttgaagtgcgtcgaagttgtaggattagaagtcgttatagtggtgtaaaccagtccatgctgtttgacaaacttataactaacactgctgaagctgtacttcaaaaaatggatgacatgaagaagatgcgtagacagcgaatgagagaacttgaagacttgggagtgtttaatgaaacagaagaaagcaatcttaatatgtacacaagaggaaaacagaaagatattcaaagaactgatgaagaaacaactgataatcaagaaggcagtgtggagtcatctgaagagggtgaagaccaagaacatgaagatgatggtgaagatgaagatgatgaagatgatgatgatgatgacgatgatgatgatgatgatgatgatgaagatgatgaagatgaagaagatggagaagaagagaatcagaagcgatattatcttagacagagaaaagctactgtttactatcaggctccattggaaaaacctcgtcaccagagaaagcccaacatattttatagtggcccagcttctcctgcaagaccaagataccgattatcttccgcaggaccaagaagtccttactgtaaacgaatgaacaggcgaaggcatgcaatccacagtagtgactcgacttcatcttcctcctctgaagatgaacagcactttgagaggcggaggaaaaggagtcgtaatagggctatcaataggtgcctcccactaaattttcggaaagatgaattaaaaggcatttataaagatcgaatgaaaattggagcaagccttgccgatgttgatccaatgcaactagattcttcagtacgatttgatagtgttggtggcctgtctaatcatatagcagctctaaaagagatggtggtgtttccattactttatccagaagtctttgaaaaatttaaaattcaacccccaagaggttgtttgttttatgggccacctggaactggaaagactctggttgccagagcacttgccaatgagtgcagtcaaggggataaaagagtagcatttttcatgaggaaaggtgctgattgtctaagtaaatgggtaggagaatctgaaagacagctacgattgctgtttgatcaggcctatcagatgcgcccatcaattattttttttgacgaaattgatggtctggctccagtacggtcaagcaggcaagatcagattcacagttctattgtttccaccctgctagctcttatggatggattggacagcagaggggaaattgtggtcattggtgctacgaacaggctagattctatagatcctgctttacgaaggcctggtcgctttgatagagaattcctctttagcctgcctgataaagaggctcgaaaagagattctaaagattcacaccagggattggaatcccaaaccactggacacatttttagaagagctagcagaaaactgtgttggatactgtggagcagatattaaatcaatatgtgctgaagctgctttatgtgctttacgacgacgctacccacagatctataccactagtgagaaactgcagttggatctctcttcaattaatatctcagctaaggatttcgaggtagctatgcaaaagatgataccagcctcccaaagagctgtgacatcacctgggcaggcactgtccaccgttgtgaaaccactcctgcaaaacactgttgacaagattttagaagccctgcagagagtatttccacatgcagaattcagaacaaataaaacattagactcagatatttcttgtcctctgctagaaagtgacttggcttacagtgatgatgatgttccatcagtttatgaaaatggactttctcagaaatcttctcataaggcaaaagacaattttaattttcttcatttgaatagaaatgcttgttaccaacctatgtcttttcgaccaagaatattgatagtaggagaaccaggatttgggcaaggttctcacttggcaccagctgtcattcatgctttggaaaagtttactgtatatacattagacattcctgttctttttggagttagtactacatcccctgaagaaacatgtgcccaggtgattcgtgaagctaagagaacagcaccaagtatagtgtatgttcctcatatccacgtgtggtgggaaatagttggaccgacacttaaagccacatttaccacattattacagaatattccttcatttgctccagttttactacttgcaacttctgacaaaccccattccgctttgccagaagaggtaatttatgtggggcggtatcattatactttcaaaaagagttgtttctaccacaataatcataacttattgaaaaaattcaaatgctgtagaagtgaataaaaggataagttttcttatcaaatataccattggtaactatttggtatatgtgctcattgggcaagatggtatatgtatatgtgtatgtatatattaaggatacataaattttttctcttgaaaaatggtattatatgccgggtgcagtggctcacgcctgtaatcccagcactttgggaggccgaggtgggtggatcatgaggtcaggagattgagaccatcctggctagcagggtgaaaccctgtccctactaaaaatacaaaaaaaattagctggacgtggtggctggcgcctgcagtcccagctactcgggagactgaagcaggagaatggcatgaaccctggaggcagagcttgcagtgagccgagtgagccactgcactccagcctgggcgacagagcgagactctgtctcaaaa

SEQ ID NO: 277458 - DNA, 5580 bp, Homo sapiens
gcggccgctggcgcggagcttgtggcgccagaattcggagcgcggaagagccagagctgcgagcgcctggagctggatctctctccggtcgcgcacgccgaggccagtagggagagaagatggtggttctccgcagcagcttggagctgcacaaccactccgcggcctcggccacgggctccttggacctgtccagtgacttcctcagtctggagcacatcggccggaggcggctccgctcggccggcgcggcgcagaagaaacccgcggcgaccacagccaaagcgggcgatgggtcatcagttaaggaagttgaaacctaccaccggacacgtgctttaagatctttgagaaaagatgcacagaattcttcagattctagttttgagaagaatgtggaaataacggagcaacttgctaatggcaggcattttacaaggcagttggccagacagcaggctgataaaaaaaaagaagagcacagagaagacaaagtgattccagttactcggtcattgagggctagaaacatcgttcaaagtacagaacacttacatgaagataatggtgatgttgaagtgcgtcgaagttgtaggattagaagtcgttatagtggtgtaaaccagtccatgctgtttgacaaacttataactaacactgctgaagctgtacttcaaaaaatggatgacatgaagaagatgcgtagacagcgaatgagagaacttgaagacttgggagtgtttaatgaaacagaagaaagcaatcttaatatgtacacaagaggaaaacagaaagatattcaaagaactgatgaagaaacaactgataatcaagaaggcagtgtggagtcatctgaagagggtgaagaccaagaacatgaagatgatggtgaagatgaagatgatgaagatgatgatgatgatgacgatgatgatgatgatgatgatgatgaagatgatgaagatgaagaagatggagaagaagagaatcagaagcgatattatcttagacagagaaaagctactgtttactatcaggctccattggaaaaacctcgtcaccagagaaagcccaacatattttatagtggcccagcttctcctgcaagaccaagataccgattatcttccgcaggaccaagaagtccttactgtaaacgaatgaacaggcgaaggcatgcaatccacagtagtgactcgacttcatcttcctcctctgaagatgaacagcactttgagaggcggaggaaaaggagtcgtaatagggctatcaataggtgcctcccactaaattttcggaaagatgaattaaaaggcatttataaagatcgaatgaaaattggagcaagccttgccgatgttgatccaatgcaactagattcttcagtacgatttgatagtgttggtggcctgtctaatcatatagcagctctaaaagagatggtggtgtttccattactttatccagaagtctttgaaaaatttaaaattcaacccccaagaggttgtttgttttatgggccacctggaactggaaagactctggttgccagagcacttgccaatgagtgcagtcaaggggataaaagagtagcatttttcatgaggaaaggtgctgattgtctaagtaaatgggtaggagaatctgaaagacagctacgattgctgtttgatcaggcctatcagatgcgcccatcaattattttttttgacgaaattgatggtctggctccagtacggtcaagcaggcaagatcagattcacagttctattgtttccaccctgctagctcttatggatggattggacagcagaggggaaattgtggtcattggtgctacgaacaggctagattctatagatcctgctttacgaaggcctggtcgctttgatagagaattcctctttagcctgcctgataaagaggctcgaaaagagattctaaagattcacaccagggattggaatcccaaaccactggacacatttttagaagagctagcagaaaactgtgttggatactgtggagcagatattaaatcaatatgtgctgaagctgctttatgtgctttacgacgacgctacccacagatctataccactagtgagaaactgcagttggatctctcttcaattaatatctcagctaaggatttcgaggtagctatgcaaaagatgataccagcctcccaaagagctgtgacatcacctgggcaggcactgtccaccgttgtgaaaccactcctgcaaaacactgttgacaagattttagaagccctgcagagagtatttccacatgcagaattcagaacaaataaaacattagactcagatatttcttgtcctctgctagaaagtgacttggcttacagtgatgatgatgttccatcagtttatgaaaatggactttctcagaaatcttctcataaggcaaaagacaattttaattttcttcatttgaatagaaatgcttgttaccaacctatgtcttttcgaccaagaatattgatagtaggagaaccaggatttgggcaaggttctcacttggcaccagctgtcattcatgctttggaaaagtttactgtatatacattagacattcctgttctttttggagttagtactacatcccctgaagaaacatgtgcccaggtgattcgtgaagctaagagaacagcaccaagtatagtgtatgttcctcatatccacgtgtggtgggaaatagttggaccgacacttaaagccacatttaccacattattacagaatattccttcatttgctccagttttactacttgcaacttctgacaaaccccattccgctttgccagaagaggtgcaagaattgtttatccgtgattatggagagatttttaatgtccagttaccggataaagaagaacggacaaaattttttgaagatttaattctaaaacaagctgctaagcctcctatatcaaaaaagaaagcagttttgcaggctttggaggtactcccagtagcaccaccacctgagccaagatcactgacagcagaagaagtgaaacgactagaagaacaagaagaagatacatttagagaactgaggattttcttaagaaatgttacacataggcttgctattgacaagcgattccgagtgtttactaagcctgttgaccctgatgaggttcctgattatgtcactgtaataaagcaaccaatggacctttcatctgtaatcagtaaaattgatctacacaagtatctgactgtgaaagactatttgagagatattgatctaatctgtagtaatgccttagaatacaatccagatagagatcctggagatcgtcttattaggcatagagcctgtgctttaagagatactgcctatgccataattaaagaagaacttgatgaagactttgagcagctctgtgaagaaattcaggaatctagaaagaaaagaggttgtagctcctccaaatatgccccgtcttactaccatgtgatgccaaagcaaaattccactcttgttggtgataaaagatcagacccagagcagaatgaaaagctaaagacaccgagtactcctgtggcttgcagcactcctgctcagttgaagaggaaaattcgcaaaaagtcaaactggtacttaggcaccataaaaaagcgaaggaagatttcacaggcaaaggatgatagccagaatgccatagatcacaaaattgagagtgatacagaggaaactcaagacacaagtgtagatcataatgagaccggaaacacaggagagtcttcggtggaagaaaatgaaaaacagcaaaatgcctctgaaagcaaactggaattgagaaataattcaaatacttgtaatatagagaatgagcttgaagactctaggaagactacagcatgtacagaattgagagacaagattgcttgtaatggagatgcttctagctctcagataatacatatttctgatgaaaatgaaggaaaagaaatgtgtgttctgcgaatgactcgagctagacgttcccaggtagaacagcagcagctcatcactgttgaaaaggctttggcaattctttctcagcctacaccctcacttgttgtggatcatgagcgattaaaaaatcttttgaagactgttgttaaaaaaagtcaaaactacaacatatttcagttggaaaatttgtatgcagtaatcagccaatgtatttatcggcatcgcaaggaccatgataaaacatcacttattcagaaaatggagcaagaggtagaaaacttcagttgttccagatgatgatgtcatggtatcgagtattctttatattcagttcctatttaagtcatttttgtcatgtccgcctaattgatgtagtatgaaaccctgcatctttaaggaaaagattaaaatagtaaaataaaagtatttaaactttcctgatatttatgtacatattaagataaatgtcatgtgtaagataactgataaatattggaactttgctagaacaagaccctgtagtaatagtaataatagttgaagtttggccaactcttaataaagttattttggtaactaatgttttatggcacttaagaataattagcagcgttaaattttgtttgtattaagcacttttaattttatccttcctaaaaatagtttattgtatctgacaagaaacttacttaaccattgtgtccttcccatcttttttgtcatctttgttttcttcaaatgccctcctcccatctgccttgagattcccttgtcttcacttaaaagccagagtgcaagtcatgatttgcgggagggctcttgaaccacttctggctgcaccacaattctgtacttgagtatcacagtcattgtttttgagacaaacatttttataattctaatttgggttaataaagattttaaatatttcttggtttacttttgtaattatatacacaacaaatgtattaataactaccttgttaaacaccttttaatagcacaaggtttttatatttgcaagctgttgatatctttctaaaactgtttaggttatagtctattgatactttttatatacaattttataaatataaatattataattttatattaatggtaccaaaaatacatttcttaaggttaaaagcatgcacttccatgcatacttgcttttggggagagtggggagaagacattctaataatcagtttgtgaaatagcttctgttggaaaccttttgaggggaataaggaatggtcatctaaaatgagagattctggattttaatgcagttcaaagttgagctgtatttttgttgttgatttatctggattttttttaaagccttctaaaacccagtgaattcaataccttaattagtacatactatcttatgtaatgcataaagcaatgccagtcactgagaacatttaaatatatttatattcctggagatacacattctcatttttgttggtttattataaattattcttctagatgcatcttttataactaggatttcattttgtgtgtatagcttatgtaataaattttaaaggtgaaaactctcttaaaattg

SEQ ID NO: 277459 - DNA, 4924 bp, Homo sapiens
gcggccgctggcgcggagcttgtggcgccagaattcggagcgcggaagagccagagctgcgagcgcctggagctggatctctctccggtcgcgcacgccgaggccagtagggagagaagatggtggttctccgcagcagcttggagctgcacaaccactccgcggcctcggccacgggctccttggacctgtccagtgacttcctcagtctggagcacatcggccggaggcggctccgctcggccggcgcggcgcagaagaaacccgcggcgaccacagccaaagcgggcgatgggtcatcagttaaggaagttgaaacctaccaccggacacgtgctttaagatctttgagaaaagatgcacagaattcttcagattctagttttgagaagaatgtggaaataacggagcaacttgctaatggcaggcattttacaaggcagttggccagacagcaggctgataaaaaaaaagaagagcacagagaagacaaagtgattccagttactcggtcattgagggctagaaacatcgttcaaagtacagaacacttacatgaagataatggtgatgttgaagtgcgtcgaagttgtaggattagaagtcgttatagtggtgtaaaccagtccatgctgtttgacaaacttataactaacactgctgaagctgtacttcaaaaaatggatgacatgaagaagatgcgtagacagcgaatgagagaacttgaagacttgggagtgtttaatgaaacagaagaaagcaatcttaatatgtacacaagaggaaaacagaaagatattcaaagaactgatgaagaaacaactgataatcaagaaggcagtgtggagtcatctgaagagggtgaagaccaagaacatgaagatgatggtgaagatgaagatgatgaagatgatgatgatgatgacgatgatgatgatgatgatgatgatgaagatgatgaagatgaagaagatggagaagaagagaatcagaagcgatattatcttagacagagaaaagctactgtttactatcaggctccattggaaaaacctcgtcaccagagaaagcccaacatattttatagtggcccagcttctcctgcaagaccaagataccgattatcttccgcaggaccaagaagtccttactgtaaacgaatgaacaggcgaaggcatgcaatccacagtagtgactcgacttcatcttcctcctctgaagatgaacagcactttgagaggcggaggaaaaggagtcgtaatagggctatcaataggtgcctcccactaaattttcggaaagatgaattaaaaggcatttataaagatcgaatgaaaattggagcaagccttgccgatgttgatccaatgcaactagattcttcagtacgatttgatagtgttggtggcctgtctaatcatatagcagctctaaaagagatggtggtgtttccattactttatccagaagtctttgaaaaatttaaaattcaacccccaagaggttgtttgttttatgggccacctggaactggaaagactctggttgccagagcacttgccaatgagtgcagtcaaggggataaaagagtagcatttttcatgaggaaaggtgctgattgtctaagtaaatgggtaggagaatctgaaagacagctacgattgctgtttgatcaggcctatcagatgcgcccatcaattattttttttgacgaaattgatggtctggctccagtacggtcaagcaggcaagatcagattcacagttctattgtttccaccctgctagctcttatggatggattggacagcagaggggaaattgtggtcattggtgctacgaacaggctagattctatagatcctgctttacgaaggcctggtcgctttgatagagaattcctctttagcctgcctgataaagaggctcgaaaagagattctaaagattcacaccagggattggaatcccaaaccactggacacatttttagaagagctagcagaaaactgtgttggatactgtggagcagatattaaatcaatatgtgctgaagctgctttatgtgctttacgacgacgctacccacagatctataccactagtgagaaactgcagttggatctctcttcaattaatatctcagctaaggatttcgaggtagctatgcaaaagatgataccagcctcccaaagagctgtgacatcacctgggcaggcactgtccaccgttgtgaaaccactcctgcaaaacactgttgacaagattttagaagccctgcagagagtatttccacatgcagaattcagaacaaataaaacattagactcagatatttcttgtcctctgctagaaagtgacttggcttacagtgatgatgatgttccatcagtttatgaaaatggactttctcagaaatcttctcataaggcaaaagacaattttaattttcttcatttgaatagaaatgcttgttaccaacctatgtcttttcgaccaagaatattgatagtaggagaaccaggatttgggcaaggttctcacttggcaccagctgtcattcatgctttggaaaagtttactgtatatacattagacattcctgttctttttggagttagtactacatcccctgaagaaacatgtgcccaggtgattcgtgaagctaagagaacagcaccaagtatagtgtatgttcctcatatccacgtgtggtgggaaatagttggaccgacacttaaagccacatttaccacattattacagaatattccttcatttgctccagttttactacttgcaacttctgacaaaccccattccgctttgccagaagaggtgcaagaattgtttatccgtgattatggagagatttttaatgtccagttaccggataaagaagaacggacaaaattttttgaagatttaattctaaaacaagctgctaagcctcctatatcaaaaaagaaagcagttttgcaggctttggaggtactcccagtagcaccaccacctgagccaagatcactgacagcagaagaagtgaaacgactagaagaacaagaagaagatacatttagagaactgaggattttcttaagaaatgttacacataggcttgctattgacaagcgattccgagtgtttactaagcctgttgaccctgatgaggttcctgattatgtcactgtaataaagcaaccaatggacctttcatctgtaatcagtaaaattgatctacacaagtatctgactgtgaaagactatttgagagatattgatctaatctgtagtaatgccttagaatacaatccagatagagatcctggagatcgtcttattaggcatagagcctgtgctttaagagatactgcctatgccataattaaagaagaacttgatgaagactttgagcagctctgtgaagaaattcaggaatctagaaagaaaagaggttgtagctcctccaaatatgccccgtcttactaccatgtgatgccaaagcaaaattccactcttgttggtgataaaagatcagacccagagcagaatgaaaagctaaagacaccgagtactcctgtggcttgcagcactcctgctcagttgaagaggaaaattcgcaaaaagtcaaactggtacttaggcaccataaaaaagcgaaggaagatttcacaggcaaaggatgatagccagaatgccatagatcacaaaattgagagtgatacagaggaaactcaagacacaagtgtagatcataatgagaccggaaacacaggagagtcttcggtggaagaaaatgaaaaacagcaaaatgcctctgaaagcaaactggaattgagaaataattcaaatacttgtaatatagagaatgagcttgaagactctaggaagactacagcatgtacagaattgagagacaagattgcttgtaatggagatgcttctagctctcagataatacatatttctgatgaaaatgaaggaaaagaaatgtgtgttctgcgaatgactcgagctagacgttcccaggtagaacagcagcagctcatcactgttgaaaaggctttggcaattctttctcagcctacaccctcacttgttgtggatcatgagcgattaaaaaatcttttgaagactgttgttaaaaaaagtcaaaactacaacatatttcagttggaaaatttgtatgcagtaatcagccaatgtatttatcggcatcgcaaggaccatgataaaacatcacttattcagaaaatggagcaagaggtagaaaacttcagttgttccagatgatgatgtcatggtatcgagtattctttatattcagttcctatttaagtcatttttgtcatgtccgcctaattgatgtagtatgaaaccctgcatctttaaggaaaagattaaaatagtaaaataaaagtatttaaactttcctgatatttatgtacatattaagataaatgtcatgtgtaagataactgataaatattggaactttgctagaacaagaccctgtagtaatagtaataatagttgaagtttggccaactcttaataaagttattttggtaactaatgttttatggcacttaagaataattagcagcgttaaattttgtttgtattaagcacttttaattttatccttcctaaaaatagtttattgtatctgacaagaaacttacttaaccattgtgtccttcccatcttttttgtcatctttgttttcttcaaatgccctcctcccatctgccttgagattcccttgtcttcacttaaaagccagagtgcaagtcatgatttgcgggagggctcttgaaccacttctggctgcaccacaattctgtacttgagtatcacagtcattgtttttgagacaaacatttttataattctaatttgggttaataaagattttaaatatt

SEQ ID NO: 277460 - DNA, 2670 bp, Homo sapiens
aggaaagaatataggctgtactggagaatacagctgcccaagaataagaaacaattactggaggatacagctgcccaaggaatagaaacaaatacaaaacaaaaacagccttaaatcaagtgaaaggttttatgttaaatatattatcataatctcttacgtatttattctctatctcctatattgcctggcatcgaaacttgactcacatgttatgtttagagttaattttgtgatttgatcatttgcttgaattttaggttcctgattatgtcactgtaataaagcaaccaatggacctttcatctgtaatcagtaaaattgatctacacaagtatctgactgtgaaagactatttgagagatattgatctaatctgtagtaatgccttagaatacaatccagatagagatcctggagatcgtcttattaggcatagagcctgtgctttaagagatactgcctatgccataattaaagaagaacttgatgaagactttgagcagctctgtgaagaaattcaggaatctagaaagaaaagaggttgtagctcctccaaatatgccccgtcttactaccatgtgatgccaaagcaaaattccactcttgttggtgataaaagatcagacccagagcagaatgaaaagctaaagacaccgagtactcctgtggcttgcagcactcctgctcagttgaagaggaaaattcgcaaaaagtcaaactggtacttaggcaccataaaaaagcgaaggaagatttcacaggcaaaggatgatagccagaatgccatagatcacaaaattgagagtgatacagaggaaactcaagacacaagtgtagatcataatgagaccggaaacacaggagagtcttcggtggaagaaaatgaaaaacagcaaaatgcctctgaaagcaaactggaattgagaaataattcaaatacttgtaatatagagaatgagcttgaagactctaggaagactacagcatgtacagaattgagagacaagattgcttgtaatggagatgcttctagctctcagataatacatatttctgatgaaaatgaaggaaaagaaatgtgtgttctgcgaatgactcgagctagacgttcccaggtagaacagcagcagctcatcactgttgaaaaggctttggcaattctttctcagcctacaccctcacttgttgtggatcatgagcgattaaaaaatcttttgaagactgttgttaaaaaaagtcaaaactacaacatatttcagttggaaaatttgtatgcagtaatcagccaatgtatttatcggcatcgcaaggaccatgataaaacatcacttattcagaaaatggagcaagaggtagaaaacttcagttgttccagatgatgatgtcatggtatcgagtattctttatattcagttcctatttaagtcatttttgtcatgtccgcctaattgatgtagtatgaaaccctgcatctttaaggaaaagattaaaatagtaaaataaaagtatttaaactttcctgatatttatgtacatattaagataaatgtcatgtgtaagataactgataaatattggaactttgctagaacaagaccctgtagtaatagtaataatagttgaagtttggccaactcttaataaagttattttggtaactaatgttttatggcacttaagaataattagcagcgttaaattttgtttgtattaagcacttttaattttatccttcctaaaaatagtttattgtatctgacaagaaacttacttaaccattgtgtccttcccatcttttttgtcatctttgttttcttcaaatgccctcctcccatctgccttgagattcccttgtcttcacttaaaagccagagtgcaagtcatgatttgcgggagggctcttgaaccacttctggctgcaccacaattctgtacttgagtatcacagtcattgtttttgagacaaacatttttataattctaatttgggttaataaagattttaaatatttcttggtttacttttgtaattatatacacaacaaatgtattaataactaccttgttaaacaccttttaatagcacaaggtttttatatttgcaagctgttgatatctttctaaaactgtttaggttatagtctattgatactttttatatacaattttataaatataaatattataattttatattaatggtaccaaaaatacatttcttaaggttaaaagcatgcacttccatgcatacttgcttttggggagagtggggagaagacattctaataatcagtttgtgaaatagcttctgttggaaaccttttgaggggaataaggaatggtcatctaaaatgagagattctggattttaatgcagttcaaagttgagctgtatttttgttgttgatttatctggattttttttaaagccttctaaaacccagtgaattcaataccttaattagtacatactatcttatgtaatgcataaagcaatgccagtcactgagaacatttaaatatatttatattcctggagatacacattctcatttttgttggtttattataaattattcttctagatgcatcttttataactaggatttcattttgtgtgtatagcttatgtaataaattttaaaggtgaaaactctcttaaaattg

SEQ ID NO: 277461 - DNA, 4408 bp, Homo sapiens
gcggccgctggcgcggagcttgtggcgccagaattcggagcgcggaagagccagagctgcgagcgcctggagctggatctctctccggtcgcgcacgccgaggccagtagggagagaagatggtggttctccgcagcagcttggagctgcacaaccactccgcggcctcggccacgggctccttggacctgtccagtgacttcctcagtctggagcacatcggccggaggcggctccgctcggccggcgcggcgcagaagaaacccgcggcgaccacagccaaagcgggcgatgggtcatcagttaaggaagttgaaacctaccaccggacacgtgctttaagatctttgagaaaagatgcacagaattcttcagattctagttttgagaagaatgtggaaataacggagcaacttgctaatggcaggcattttacaaggcagttggccagacagcaggctgataaaaaaaaagaagagcacagagaagacaaagtgattccagttactcggtcattgagggctagaaacatcgttcaaagtacagaacacttacatgaagataatggtgatgttgaagtgcgtcgaagttgtaggattagaagtcgttatagtggtgtaaaccagtccatgctgtttgacaaacttataactaacactgctgaagctgtacttcaaaaaatggatgacatgaagaagatgcgtagacagcgaatgagagaacttgaagacttgggagtgtttaatgaaacagaagaaagcaatcttaatatgtacacaagaggaaaacagaaagatattcaaagaactgatgaagaaacaactgataatcaagaaggcagtgtggagtcatctgaagagggtgaagaccaagaacatgaagatgatggtgaagatgaagatgatgaagatgatgatgatgatgacgatgatgatgatgatgatgatgatgaagatgatgaagatgaagaagatggagaagaagagaatcagaagcgatattatcttagacagagaaaagctactgtttactatcaggctccattggaaaaacctcgtcaccagagaaagcccaacatattttatagtggcccagcttctcctgcaagaccaagataccgattatcttccgcaggaccaagaagtccttactgtaaacgaatgaacaggcgaaggcatgcaatccacagtagtgactcgacttcatcttcctcctctgaagatgaacagcactttgagaggcggaggaaaaggagtcgtaatagggctatcaataggtgcctcccactaaattttcggaaagatgaattaaaaggcatttataaagatcgaatgaaaattggagcaagccttgccgatgttgatccaatgcaactagattcttcagtacgatttgatagtgttggtggcctgtctaatcatatagcagctctaaaagagatggtggtgtttccattactttatccagaagtctttgaaaaatttaaaattcaacccccaagaggttgtttgttttatgggccacctggaactggaaagactctggttgccagagcacttgccaatgagtgcagtcaaggggataaaagagtagcatttttcatgaggaaaggtgctgattgtctaagtaaatgggtaggagaatctgaaagacagctacgattgctgtttgatcaggcctatcagatgcgcccatcaattattttttttgacgaaattgatggtctggctccagtacggtcaagcaggcaagatcagattcacagttctattgtttccaccctgctagctcttatggatggattggacagcagaggggaaattgtggtcattggtgctacgaacaggctagattctatagatcctgctttacgaaggcctggtcgctttgatagagaattcctctttagcctgcctgataaagaggctcgaaaagagattctaaagattcacaccagggattggaatcccaaaccactggacacatttttagaagagctagcagaaaactgtgttggatactgtggagcagatattaaatcaatatgtgctgaagctgctttatgtgctttacgacgacgctacccacagatctataccactagtgagaaactgcagttggatctctcttcaattaatatctcagctaaggatttcgaggtagctatgcaaaagatgataccagcctcccaaagagctgtgacatcacctgggcaggcactgtccaccgttgtgaaaccactcctgcaaaacactgttgacaagattttagaagccctgcagagagtatttccacatgcagaattcagaacaaataaaacattagactcagatatttcttgtcctctgctagaaagtgacttggcttacagtgatgatgatgttccatcagtttatgaaaatggactttctcagaaatcttctcataaggcaaaagacaattttaattttcttcatttgaatagaaatgcttgttaccaacctatgtcttttcgaccaagaatattgatagtaggagaaccaggatttgggcaaggttctcacttggcaccagctgtcattcatgctttggaaaagtttactgtatatacattagacattcctgttctttttggagttagtactacatcccctgaagaaacatgtgcccaggtgattcgtgaagctaagagaacagcaccaagtatagtgtatgttcctcatatccacgtgtggtgggaaatagttggaccgacacttaaagccacatttaccacattattacagaatattccttcatttgctccagttttactacttgcaacttctgacaaaccccattccgctttgccagaagaggtgcaagaattgtttatccgtgattatggagagatttttaatgtccagttaccggataaagaagaacggacaaaattttttgaagatttaattctaaaacaagctgctaagcctcctatatcaaaaaagaaagcagttttgcaggctttggaggtactcccagtagcaccaccacctgagccaagatcactgacagcagaagaagtgaaacgactagaagaacaagaagaagatacatttagagaactgaggattttcttaagaaatgttacacataggcttgctattgacaagcgattccgagtgtttactaagcctgttgaccctgatgaggttcctgattatgtcactgtaataaagcaaccaatggacctttcatctgtaatcagtaaaattgatctacacaagtatctgactgtgaaagactatttgagagatattgatctaatctgtagtaatgccttagaatacaatccagatagagatcctggagatcgtcttattaggcatagagcctgtgctttaagagatactgcctatgccataattaaagaagaacttgatgaagactttgagcagctctgtgaagaaattcaggaatctagaaagaaaagaggttgtagctcctccaaatatgccccgtcttactaccatgtgatgccaaagcaaaattccactcttgttggtgataaaagatcagacccagagcagaatgaaaagctaaagacaccgagtactcctgtggcttgcagcactcctgctcagttgaagaggaaaattcgcaaaaagtcaaactggtacttaggcaccataaaaaagcgaaggaagatttcacaggcaaaggatgatagccagaatgccatagatcacaaaattgagagtgatacagaggaaactcaagacacaagtgtagatcataatgagaccggaaacacaggagagtcttcggtggaagaaaatgaaaaacagcaaaatgcctctgaaagcaaactggaattgagaaataattcaaatacttgtaatatagagaatgagcttgaagactctaggaagactacagcatgtacagaattgagagacaagattgcttgtaatggagatgcttctagctctcagataatacatatttctgatgaaaatgaaggaaaagaaatgtgtgttctgcgaatgactcgagctagacgttcccaggtagaacagcagcagctcatcactgttgaaaaggctttggcaattctttctcagcctacaccctcacttgttgtggatcatgagcgattaaaaaatcttttgaagactgttgttaaaaaaagtcaaaactacaacatatttcagttggaaaatttgtatgcagtaatcagccaatgtatttatcggcatcgcaaggaccatgataaaacatcacttattcagaaaatggagcaagaggtagaaaacttcagttgttccagatgatgatgtcatggtatcgagtattctttatattcagttcctatttaagtcatttttgtcatgtccgcctaattgatgtagtatgaatcctgcctgcgacctatgaggtccgcctactt

SEQ ID NO: 277462 - DNA, 581 bp, Homo sapiens
gacacatcttctacctgacttcagcaccagcggctccgtcacaagcttcccattcacatatgtctcagctccttcacaaggctccagagtgaccaccactgaatggaggggcagaggaaggggaaagattagaccctggaggaagatgtccattcctacctttcccactgacattatccctggtggggcctgggctcctccagcaggcttgtagcccacccctctgcctcatgcatcttgcaaactgccacctgactcatcttctcaagccacagctgacatgtgacaagagaaagtcaacccaacccaaacatccatctagctgctcctcagtacaaatcactgagcctgccagtttctggggacgcgaagatgcacgaggcagctccctgtcctcgaggagcagtggccattgccgcagaggaaccctggtatcccaaaggcccaggctctgcagctccttagccagggatgctgaacaagtcaatttaacttctgtgatattctataagatgggataatgaagtctgaatgaagagtggttagaaggcccaaaaaagtaaaccataaaataacatgca

SEQ ID NO: 277463 - DNA, 232 bp, Homo sapiens
ctgttgcgaggaatgctgagcatgggagaacatagggaactaacggtactgaaggcccaaaaaagtaaaccataaaataacatgcaaacatgtgttttattattataatacttatactggaagtaatagagaaacacagaaactgggatgaactataatatcaggcagggatggggacaacggatgctgctgggagacaaggagagcagaggactcagcattcctcgcagag

SEQ ID NO: 277464 - DNA, 753 bp, Homo sapiens
tcagggtcctcctctaggatgcacccagaaggacctcccttgagacttcctacacacagccacgccccagaaccctcaatctgcgacacatcttctacctgacttcagcaccagcggctccgtcacaagcttcccattcacatatgtctcagctccttcacaaggctccagagtgaccaccactgaatggaggggcagaggaaggggaaagattagaccctggaggaaggtgggtcatggtcacagattcccaccttgccttaccccaaaaaaccacacatgcaccaccagtcccacccccagtacctgtagggggtgccatggcccctctggtggcaggcagcacgggaaaggaagagcagaaggagggttagagccccaactacaattcccagaagcctctgcagtggctcctgactcacccacctctatcctccccagcagcagcttagaaaaccagtaattgtcaaaaggattcattcctcatgtttaactgctcagaggccctgtcatttctgccttccagatgtccattcctacctttcccactgacattatccctggtggggcctgggctcctccagcaggcttgtagcccacccctctgcctcatgcatcttgcaaactgccacctgactcatcttctcaagccacagctgacatgtgacaagagaaagtcaacccaacccaaacatccatctagctgctcctcagtacaaatcactgagcctgccagtttctggggacgcgaag

SEQ ID NO: 277465 - DNA, 344 bp, Homo sapiens
tatgggtccctgctggagaagctgtagcatcgggccgctcaccatggcagccggctccatcaccgccagccagcgagagggcaagacaagagggctgacgagggacgctaccatcacagagaaacagggtttcattgtgttagccaggatggtctcgatctcctgacctcgtgatccaccgcgcccggccaagtctgaacttttgcatggcctgttgccctggtgataaactgatgccttgtttcctaaaaggaataaagccatgagttgcctttgttcagctcatgggcattcacccatgcacagaggaaaaataaaatctacgactcgggtaaaaaaaaatc

SEQ ID NO: 277466 - DNA, 333 bp, Homo sapiens
agtgaacaggtagcatcaggtgtgccatttcagtgactgggcacagcccaggcacccacatctctctgcacaccaccatgcccagctaattttttgtatttttttagtagaaacagggtttcattgtgttagccaggatggtctcgatctcctgacctcgtgatccaccgcgcccggccaagtctgaacttttgcatggcctgttgccctggtgataaactgatgccttgtttcctaaaaggaataaagccatgagttgcctttgttcagctcatgggcattcacccatgcacagaggaaaaataaaatctacgactcgggtaaaaaaaaatc

SEQ ID NO: 277467 - DNA, 1257 bp, Homo sapiens
taacatatttgtacacagtgttcatagcagctttattcacaatagccaaaaggtgaaaccacccacatgtccatcaacaacaatggataaacaacatgtggtatatacacacaaggtaatatcaaccagccttaactaaaagaataaaaatcagccaggcacagtatatggggccagcccctgtgccaccgaagaggggggatattgaaaacatgttacagccaggagcggtgcccccttggtatttacaccctggagtggtccgctcctcttgggctgaacctgtaacttgctcccaagcaagagcacacagcaagctcacgcacgtggttgttggtgtgattctgtttctccagattgtctccattcctccctggcttctccacagggccgctcaccatggcagccggctccatcaccgccagccagcgagagggcaagacaagagggctgacgagggacgctaccatcacagaggtcagttttgtaacctaaccacaagactaacctactgtcacttctgccctatcctactgctagaagccagtcgctacatctcccccacactcaaagggaggtggtcgcactgtggggtccactggaagttgcctaccagactcaggtcatcccaaacacaccctctagccatttggtgtggcatcggaaagaaaactaaggccaggtacggtggctcatgcctgtaatcccaacaatttgggaggccatggcggaagggtcacttgagcccaggagtttgagaccagcctgggcaacatagcaaatgttatgttgccacctctacaaataattagccaagtgtggtggcatgcacctgtagtcccagatactcaggaggctgaggcaggagaatcacaggtcgaggttgtagtgagctgtgacggcactgcactccagccttggcaacacagtaagacctcgtctctaaaaaagcaaaaagggctgggtgcactggctcacacctataatcccagcacaccaccatgcccagctaattttttgtatttttttagtagaaacagggtttcattgtgttagccaggatggtctcgatctcctgacctcgtgatccaccgcgcccggccaagtctgaacttttgcatggcctgttgccctggtgataaactgatgccttgtttcctaaaaggaataaagccatgagttgcctttgttcagctcatgggcattcacccatgcacagaggaaaaataaaatctacgactcgggtaaaaaaaaatc

SEQ ID NO: 277468 - DNA, 388 bp, Homo sapiens
ccagtggcttgagagttgggagctgaagggcctggtctcttgggaggtgtccctggcacaggctgatttgaatctctaactgaatggaaatcctcccagtccaagagtatacctcccactccctccccacggtttttgcttagcggtatgacctccagagaatttctgatttcctcctgtgatgtggctgtcagcccctttcttcactcccctgtgctgtgccccaggaggctccatggacctctgttttggtcccagcttctctgggaaacaggcaacgtgttgtcggctgggctgtggccgggcatctgctaactcaggcagactctgctgcaacctctgcccggcgtgtctttctgcagagcggggatgatgaggagtaccagcg

SEQ ID NO: 277469 - DNA, 1318 bp, Homo sapiens
gagccccggcccggaggtctgtcatgctgttcccgctccaggtggccgctgtaacctcttcggtccgcgacgatcctctagagcactgtgtgtctccccggacgcgagcccgctcccctgaaatctgcaaaatggctgataatttggatgaatttattgaagagcaaaaagccagattggccgaagacaaagcagagttggaaagtgatccaccttacatggaaatgaagggaaagttgtcagcgaagctttctgaaaacagtaagatactgatctctatggctaaggaaaacataccaccaaatagtcaacagaccaggggttccttaggaattgattatggattaagtttaccacttggagaagactatgaacggaagaaacataaattaaaagaagaattgcggcaagattacagacgttatcttactcaggaaaggttgaaacttgaacgtaacaaagaatacaatcagtttctcaggggtaaggaagaatccagtgaaaagttcaggcaggtggaaaagagtactgagcccaagagtcagagaaataaaaaacctattggtcaagttaagcctgatctaacttcacaaatacagacatcttgtgaaaattcagagggtcctagaaaagatgtcttaactccttcagaggcatatgaagaacttctgaaccaaagacgactagaggaggacagataccgacaactagatgatgaaatcgaattaaggaatagaagaattattaaaaaagcaaatgaagaagtgggcatttccaacctaaaacatcaaaggtttgcaagcaaggctggcattccagatagaagatttcacagatttaatgaggatcgtgttttgatagacggtatcatagaccagaccaagatcctgaagtaagtgaagaaatggatgagaggtttagatatgaaagtgattttgatagaagactttcgagagtgtatacaaatgacggattgcccttcgcctcactccctatacactttggtactaatatcgaactccttatgatgatgcatactattttatgggtcaggaataactttcgatcccagtcttgctattatggtcaggaatgatggcgtaagctggaactatgtaatgtctgttaccacaataaaaaactgtgggatacgtggcgaagaccgagatacacggaacgaaacaggggatttgagagaacgcacctctaagttcttcaaagttcgactccacacaaacagcaaccacacatactacagaaccccgagggccgcaaaattggcaacacgcaagggatacagttggagttggcaaaaggg

SEQ ID NO: 277470 - DNA, 1417 bp, Homo sapiens
gagccccggcccggaggtctgtcatgctgttcccgctccaggtggccgctgtaacctcttcggtccgcgacgatcctctagagcactgtgtgtctccccggacgcgagcccgctcccctgaaatctgcaaaatggctgataatttggatgaatttattgaagagcaaaaagccagattggccgaagacaaagcagagttggaaagtgatccaccttacatggaaatgaagggaaagttgtcagcgaagctttctgaaaacagtaagatactgatctctatggctaaggaaaacataccaccaaatagtcaacagaccaggggttccttaggaattgattatggattaagtttaccacttggagaagactatgaacggaagaaacataaattaaaagaagaattgcggcaagattacagacgttatcttactcagtaatgtgtatatatacagaaaaattttctatctacgagtgaaacagatccatctactttgggagtttctcttcctattggtgagaggttatctgctaaggaaaggttgaaacttgaacgtaacaaagaatacaatcagtttctcaggggtaaggaagaatccagtgaaaagttcaggcaggtggaaaagagtactgagcccaagagtcagagaaataaaaaacctattggtcaagttaagcctgatctaacttcacaaatacagacatcttgtgaaaattcagagggtcctagaaaagatgtcttaactccttcagaggcatatgaagaacttctgaaccaaagacgactagaggaggacagataccgacaactagatgatgaaatcgaattaaggaatagaagaattattaaaaaagcaaatgaagaagtgggcatttccaacctaaaacatcaaaggtttgcaagcaaggctggcattccagatagaagatttcacagatttaatgaggatcgtgttttgatagacggtatcatagaccagaccaagatcctgaagtaagtgaagaaatggatgagaggtttagatatgaaagtgattttgatagaagactttcgagagtgtatacaaatgacggattgcccttcgcctcactccctatacactttggtactaatatcgaactccttatgatgatgcatactattttatgggtcaggaataactttcgatcccagtcttgctattatggtcaggaatgatggcgtaagctggaactatgtaatgtctgttaccacaataaaaaactgtgggatacgtggcgaagaccgagatacacggaacgaaacaggggatttgagagaacgcacctctaagttcttcaaagttcgactccacacaaacagcaaccacacatactacagaaccccgagggccgcaaaattggcaacacgcaagggatacagttggagttggcaaaaggg

SEQ ID NO: 277471 - DNA, 1399 bp, Homo sapiens
gagccccggcccggaggtctgtcatgctgttcccgctccaggtggccgctgtaacctcttcggtccgcgacgatcctctagagcactgtgtgtctccccggacgcgagcccgctcccctgaaatctgcaaaatggctgataatttggatgaatttattgaagagcaaaaagccagattggccgaagacaaagcagagttggaaagtgatccaccttacatggaaatgaagggaaagttgtcagcgaagctttctgaaaacagtaagatactgatctctatggctaaggaaaacataccaccaaatagtcaacagaccaggggttccttaggaattgattatggattaagtttaccacttggagaagactatgaacggaagaaacataaattaaaagaagaattgcggcaagattacagacgttatcttactcagaaaaattttctatctacgagtgaaacagatccatctactttgggagtttctcttcctattggtgagaggttatctgctaaggaaaggttgaaacttgaacgtaacaaagaatacaatcagtttctcaggggtaaggaagaatccagtgaaaagttcaggcaggtggaaaagagtactgagcccaagagtcagagaaataaaaaacctattggtcaagttaagcctgatctaacttcacaaatacagacatcttgtgaaaattcagagggtcctagaaaagatgtcttaactccttcagaggcatatgaagaacttctgaaccaaagacgactagaggaggacagataccgacaactagatgatgaaatcgaattaaggaatagaagaattattaaaaaagcaaatgaagaagtgggcatttccaacctaaaacatcaaaggtttgcaagcaaggctggcattccagatagaagatttcacagatttaatgaggatcgtgttttgatagacggtatcatagaccagaccaagatcctgaagtaagtgaagaaatggatgagaggtttagatatgaaagtgattttgatagaagactttcgagagtgtatacaaatgacggattgcccttcgcctcactccctatacactttggtactaatatcgaactccttatgatgatgcatactattttatgggtcaggaataactttcgatcccagtcttgctattatggtcaggaatgatggcgtaagctggaactatgtaatgtctgttaccacaataaaaaactgtgggatacgtggcgaagaccgagatacacggaacgaaacaggggatttgagagaacgcacctctaagttcttcaaagttcgactccacacaaacagcaaccacacatactacagaaccccgagggccgcaaaattggcaacacgcaagggatacagttggagttggcaaaaggg

SEQ ID NO: 277472 - DNA, 8791 bp, Homo sapiens
ggcacgaggtttggggcatctccgcggtccggcccggggccccgggatctcggctgtccttcctcccggcataagatgcacatttttctgctctggagccgggaatgaaatattcttgagttcttacaactttatgacgagacccatgtgtggtgctattgagaaattcattgggaagttggaagacatttcaaacaacaggttgttttggtttctatagtacaattggggtggcattctgttttgtgaaaggaggaaggacttaggccagaaaactcatatgctatggttaactggttcccagcctccgagaatcttgttttccatggtgtaaaacttactcagcatcaggataagggataacgactctatggatatacagaatccttcaccatggtaaaactcgcaaacccgctttatactgagtggattttggaggccatcaaaaaagtgaaaaagcagaaacagcgtccttcagaagaaaggatatgcaatgctgtgtcttcatcccatggcttggatcgtaaaactgttttagaacaattggagttgagtgttaaagatggaacaattttaaaagtctcaaataaaggactcaattcctataaagatcctgataatcctgggcgaatagcacttcctaagcctcggaaccatggaaaattggataataaacaaaatgtggattggaataaactgataaagcgggcagttgagggcttggcagagtctggtggctcaactttgaaaagcattgaacgttttttgaaaggtcagaaggatgtgtctgcattattcggaggcagtgctgcctctggctttcaccagcagttacgattggctatcaaacgtgccattggccacggcagactccttaaagatggacctctttatcggctcaacactaaagcaaccaacgtggatgggaaagagagttgtgagtctctttcctgtttacctccagtgtcccttcttccacatgaaaaggataagccggttgctgaaccaatccccatctgtagtttctgtcttggtacaaaagaacaaaaccgagaaaagaagccagaggaactcatctcctgtgccgactgtggcaacagtggccatccatcctgtttaaagttttcccctgaactaacggttcgagtgaaggccttacggtggcagtgcatcgagtgtaaaacatgcagctcctgtcgagatcaaggcaaaaatgcggataacatgctcttttgtgattcatgtgaccgaggttttcacatggagtgttgtgatccgccactcacccgtatgccaaaaggcatgtggatatgtcaaatatgtcgacctaggaaaaaaggacgaaaacttctacaaaagaaggcagcacagataaaacggcgctatactaatccaataggacgtccaaaaaacaggttaaagaaacaaaacacggtatcaaaaggtcccttcagcaaagttcgaactggccctggaaggggtaggaaacgaaaaatcactctttccagccaatcagcatcatcatcatcagaagaaggatatttagagcggatagatggcttggacttctgcagagatagcaatgtctccttgaagttcaacaagaaaaccaaagggctcattgatggccttaccaaattttttaccccttcccctgatgggcggaaagctcggggggaagtggtggactactctgagcaatatcgaatcagaaagaggggcaacaggaaatcaagcacttcagattggcccacagacaatcaggatggctgggatggcaaacaagaaaatgaggagcgactttttgggagccaggaaatcatgactgagaaagatatggaattatttcgtgatatccaagaacaagcactgcagaaagttggagtgactggtccccctgatccacaagtccgctgtccctctgtcattgagtttgggaagtatgaaattcacacctggtactcctccccatatcctcaagaatactcaaggctgcccaaattgtatctttgtgaattttgtctaaaatatatgaaaagtagaactattctgcagcagcacatgaagaaatgtggttggttccatcctcctgccaatgagatttacagaaagaataatatttctgtctttgaggttgatgggaatgtgagtaccatttattgtcaaaacctgtgtcttttggcaaagttgtttcttgaccacaaaaccctctattacgatgtggagccatttcttttttatgtactaacacagaatgatgtcaagggctgccaccttgttggctacttttctaaggaaaagcactgccaacagaagtacaatgtttcctgtataatgattcttcctcaataccagcgtaagggctatggcaggtttctcatcgatttcagttatttgttatcaaagcgtgaaggccaagcagggtctccagagaaaccgttatctgatctgggtcgtctttcctacatggcatattggaaaagtgtaatattggagtgcctttatcaccaaaatgacaagcagatcagcattaagaagttaagcaagttgactggaatctgccctcaagacatcacttccacactccaccacctacgaatgctggacttccgtagtgaccaatttgtgattatccgccgggaaaaacttatccaggatcacatggcaaagcttcagctgaatttgcgacctgtagatgtagatccagaatgtttgcgctggactccagtcatagtgtccaactctgtggtctcagaggaggaagaagaggaggctgaggaaggagaaaacgaagagccacagtgccaggaaagagaattagagatcagtgtgggaaagtctgtgtctcatgagaacaaagaacaagattcttattcagtagaaagtgaaaagaaaccagaagttatggctccagtcagttctacacgtttgagcaaacaagtccttcctcatgatagtcttcctgcaaatagccagccatctcggaggggccgctgggggaggaagaacagaaaaacccaggaacgttttggtgataaagattctaaactgctcttggaagagacgtcttcagctcctcaggaacaatatggagaatgtggggagaaatcagaagccacccaggaacaatacactgaaagtgaagaacagctggtggcttctgaggagcagccaagccaggacgggaaacctgaccttcccaagagaagactcagtgagggggttgagccctggcgaggacagctcaagaaaagccctgaggctctgaagtgcagattaacagaaggaagtgagaggctgccccgtcgctacagtgagggtgacagggctgtcctcaggggcttcagtgagagcagcgaggaggaggaggagccggaaagccctcggtcaagctcgccaccaattctcacaaagcccacgctgaagcgaaagaaaccatttctccaccgaaggaggagagtccgaaagcgcaaacaccacaatagcagtgtagtcacagaaactatttctgagaccactgaagtgttagatgaaccttttgaagattctgactccgagaggccaatgccaagattagaacccacgtttgagatcgatgaagaagaggaggaagaggatgaaaatgaacttttccctagagaatacttccgtcgtttgtcttcgcaggatgtactcaggtgtcagtcctcttctaagaggaagtctaaagatgaagaagaagatgaagagtcagatgatgctgatgacactcctatcttaaagccagtatctcttttgcgaaaacgtgatgtgaagaattctcctcttgagccagatacatccacacctttgaaaaagaaaaagggatggcccaaaggcaagagccgcaaaccaatccactggaagaaaagacctggtcgaaaaccaggatttaagttgagtcgggaaatcatgccagtttctactcaagcatgcgtcattgagcccatcgtttccattcctaaagctggacgtaaacccaagatccaggagagtgaagaaactgttgagccaaaagaagacatgcccctacccgaggagaggaaggaggaggaggagatgcaagcagaggcagaagaggctgaagagggtgaggaagaggatgcagccagcagtgaagtcccagcagcctctccagcagacagcagcaatagtcctgagaccgaaaccaaggagcctgaggtggaggaggaagaagagaagccccgtgtctcagaggagcagaggcagtcagaggaggagcagcaggaattagaggagccagagccagaggaggaggaagatgcagctgcagagactgcccagaatgacgaccacgacgctgatgatgaggatgatggccacctggagtccacaaagaaaaaggagctagaggaacagcccacgagggaagatgtcaaggaggagcctggtgttcaagagtcttttttagatgctaatatgcagaagagtagggaaaagataaaggataaagaggaaaccgagctggattccgaagaggagcagccttcccatgacacgtccgtggtgtcagagcagatggctgggtctgaggacgaccacgaagaagactcccacactaaggaagagttaatcgaattaaaagaggaggaagagattcctcatagtgagctggatctggaaactgtacaggcagtgcagtctttgactcaagaagaaagcagtgagcatgagggcgcctaccaggactgtgaggaaactcttgcggcgtgtcagaccctgcagagttacacccaggctgacgaggaccctcagatgtccatggttgaagactgtcatgcgtcagaacataatagccctatctcctccgttcagtctcaccccagccagtcagtccgttcggtcagcagtcccaacgtgcctgcccttgagagtggctacacccagatcagcccagaacaaggatccctgtccgcaccctctatgcagaacatggagaccagccccatgatggatgtgccttccgtatcagaccactctcagcaggtggtggacagcggcttcagtgacctgggcagcattgagagcaccactgaaaactatgagaacccaagcagttacgactccacgatgggcggcagcatctgtgggaacagctcttcccagagcagctgctcctacggtgggctgtcgtcctccagcagcctcacccagagcagctgtgtggtcactcagcagatggccagcatgggcagcagctgcagcatgatgcagcagagcagcgtccagcctgctgccaactgcagcatcaagtcacctcagagctgcgtggtggagaggcctcccagtaaccagcagcagcagccgccaccaccgcctccacagcagccacagccgccgccgccacaaccacaaccagcaccacagcctccaccaccccagcagcagccgcaacagcagccgcagcctcagccccagcagcctccacccccaccccctccccagcagcagcccccgctgtcacagtgtagtatgaataacagtttcaccccagctcctatgatcatggagataccagaatctggaagcactgggaacataagtatctatgagaggattccaggggattttggtgccggcagctactctcaaccatcagccaccttcagcctagccaagctgcagcagctgaccaacaccattatggaccctcatgccatgccttatagccattctcctgctgtgacttcctatgcaaccagtgtttctctgtccaatacaggactggctcagctggctccatctcatcccttagctgggactcctcaagcacaagccaccatgacgccacccccaaacttggcatccactaccatgaacctcacatctcctctgcttcagtgcaacatgtctgccaccaacattggcattcctcacacgcagagattgcaagggcaaatgccagtgaaggggcacatttccatccgctccaagtctgcgccactgccctctgcggctgctcaccagcagcagctgtatggccgtagcccatcggcagttgccatgcaggctggccctcgcgcactggctgttcagcgtggcatgaacatgggggttaatctgatgcctactcccgcctataatgtcaattccatgaatatgaacaccttgaatgccatgaacagctatcgaatgacacagcccatgatgaacagcagttaccatagtaaccctgcctacatgaaccagacagcacagtatcctatgcagatgcagatgggaatgatggggagccaggcctatacccagcagcctatgcagcctaaccctcatgggaacatgatgtacacaggcccctcccatcacagctacatgaacgctgctggcgtgcccaagcagtcactcaacggaccttacatgagaagatgagcaagatgaacttgcaatcaaaaacttaaatatatataaataaaggaaccttttatactgacaaaccagagaaaaatggacctttttccagttaaaatattgctgtagatttagaggaatttttctttggtttattttattttttagaaaacctgatcttctctttttttgggttcattttgttctgggttttggttttcttcacaatcttgaacattttacagtagaactcatctaaaaatggatttggggatggggaaacatgcacaaaatcttttcataattaaaaagagccttactttctttacataccacatggacagaatttgtgtaaaagtgaattatctttattttaaaatgtatgtttcccctcactgtttgcagctcccaatgttgtcatttttaaatgttatatacatctcaagggttaaccagaccctttcctccaaacccaacctttcatttcctacttcattccagcaggaggcacttaggggagactcggatggggacatggagaacaacccaagctccttaaacttattattattgttaatattattattattattattaataaagtgaggcaggaaaatgcttctccttttaaaatcccctccactcctcacacacacacacctcttgaaacccttccccaagaatgtttctttatagacggacttcattgaaatctttgttgttcttgaatcaagtgtaatataatttttttcttcttttttaaaatattcccactcagcactcagagacacaaaaatactgtaagtctcaattaacagcagaatctcagagaaaagctgtttgcaatccaaatccagcctttggaggaatagagatggtcaattaacaatcaaaaagaggagattaacctcttgtttttttaccacctggtgaatcagccataacgcacacacacgccacccagcctcttgtttctagtatgtactttgaaatgctaactgagggtcttgatgcttgagcctttgactgataaaactcaaatagcagtccccagtgatttgcctcttaggttctttcttaaattgttggtggatgactgtacattttagtgatttgaaaaataactgacaaaccattgaaacagtttattttatgttggaagagatggcgcagatgtgtgtcagaagggagatcacggtgtgagtttcgtagctatttaagtgatacatacctctagtttttgtatgtcttttgagatcctgagttcatcccctgtgaatcagagtgcacaagcacctctcctgtgagtggctaatgagaagagggacagaccgaccaccagcacagtagggcagatctggacagcagaatgttataacgcaagttcatgtgttgctcccaactccattctcttttctctcgtgcaaccagtttgcccattctcttcctattacttgctccagggataggtaaaaaaaaaaaaaaaaaaaaaaatatatatatatatatatatatacacacacacacacacacacacacacatatatatatatatatattccatcattagaagatggaaactattataccacttggtatgtgcagtcaaatatccaaaagggggaagtactgcttagagaaatatctgtaagcattaaattctctcctttatttgtacattttatatagataaatttttaaagtactaattaggcattaacttttttcaaatgcacaggtttgttggtttttttaatacactttaattgactttctcaagcgtgctaggtagaaacgcagaattccacatcttcccgctctcagctctgagcatgtgcaaggctgtgtaggacccagtttctctgtatatactattccagttcccagtcatctatgtagaaagtgcactgtgctgccatcgccctacatcttcagctgtgtcattgcttcctggttggggtggggacggggtgggtcgggagggaggtatattgggaggagggtgggtcaaggcagaaggagaagctgttgaaatgagggccgtgaaatcagtttctgttggtttgcggttgtgtttggttttgtttgtttctttataaaaaattcaatcgggcagctcccttttccacaagcctctttgtgactgtagaactattgtagaaaaaaaaagttcttttctatattataaaagaaattatccaacacagtaatattggtacctgtcattttttcacttctgtttaaaaaaaatgtatttttagcaagataacttgggtaatcttctaaaaaagaaatttaaaaactcactgttagtgactttgatgccttttaaaataagagctttttcatttcattccatctttaaaattttttatctttgttgtagaatattaaaaactatttt

SEQ ID NO: 277473 - DNA, 7990 bp, Homo sapiens
tgtttcccggttcgacactagcaggattcctcaagatagaatatcaaacgtgccattggccacggcagactccttaaagatggacctctttatcggctcaacactaaagcaaccaacgtggatgggaaagagagttgtgagtctctttcctgtttacctccagtgtcccttcttccacatgaaaaggataagccggttgctgaaccaatccccatctgtagtttctgtcttggtacaaaagaacaaaaccgagaaaagaagccagaggaactcatctcctgtgccgactgtggcaacagtggccatccatcctgtttaaagttttcccctgaactaacggttcgagtgaaggccttacggtggcagtgcatcgagtgtaaaacatgcagctcctgtcgagatcaaggcaaaaatgcggataacatgctcttttgtgattcatgtgaccgaggttttcacatggagtgttgtgatccgccactcacccgtatgccaaaaggcatgtggatatgtcaaatatgtcgacctaggaaaaaaggacgaaaacttctacaaaagaaggcagcacagataaaacggcgctatactaatccaataggacgtccaaaaaacaggttaaagaaacaaaacacggtatcaaaaggtcccttcagcaaagttcgaactggccctggaaggggtaggaaacgaaaaatcactctttccagccaatcagcatcatcatcatcagaagaaggatatttagagcggatagatggcttggacttctgcagagatagcaatgtctccttgaagttcaacaagaaaaccaaagggctcattgatggccttaccaaattttttaccccttcccctgatgggcggaaagctcggggggaagtggtggactactctgagcaatatcgaatcagaaagaggggcaacaggaaatcaagcacttcagattggcccacagacaatcaggatggctgggatggcaaacaagaaaatgaggagcgactttttgggagccaggaaatcatgactgagaaagatatggaattatttcgtgatatccaagaacaagcactgcagaaagttggagtgactggtccccctgatccacaagtccgctgtccctctgtcattgagtttgggaagtatgaaattcacacctggtactcctccccatatcctcaagaatactcaaggctgcccaaattgtatctttgtgaattttgtctaaaatatatgaaaagtagaactattctgcagcagcacatgaagaaatgtggttggttccatcctcctgccaatgagatttacagaaagaataatatttctgtctttgaggttgatgggaatgtgagtaccatttattgtcaaaacctgtgtcttttggcaaagttgtttcttgaccacaaaaccctctattacgatgtggagccatttcttttttatgtactaacacagaatgatgtcaagggctgccaccttgttggctacttttctaaggaaaagcactgccaacagaagtacaatgtttcctgtataatgattcttcctcaataccagcgtaagggctatggcaggtttctcatcgatttcagttatttgttatcaaagcgtgaaggccaagcagggtctccagagaaaccgttatctgatctgggtcgtctttcctacatggcatattggaaaagtgtaatattggagtgcctttatcaccaaaatgacaagcagatcagcattaagaagttaagcaagttgactggaatctgccctcaagacatcacttccacactccaccacctacgaatgctggacttccgtagtgaccaatttgtgattatccgccgggaaaaacttatccaggatcacatggcaaagcttcagctgaatttgcgacctgtagatgtagatccagaatgtttgcgctggactccagtcatagtgtccaactctgtggtctcagaggaggaagaagaggaggctgaggaaggagaaaacgaagagccacagtgccaggaaagagaattagagatcagtgtgggaaagtctgtgtctcatgagaacaaagaacaagattcttattcagtagaaagtgaaaagaaaccagaagttatggctccagtcagttctacacgtttgagcaaacaagtccttcctcatgatagtcttcctgcaaatagccagccatctcggaggggccgctgggggaggaagaacagaaaaacccaggaacgttttggtgataaagattctaaactgctcttggaagagacgtcttcagctcctcaggaacaatatggagaatgtggggagaaatcagaagccacccaggaacaatacactgaaagtgaagaacagctggtggcttctgaggagcagccaagccaggacgggaaacctgaccttcccaagagaagactcagtgagggggttgagccctggcgaggacagctcaagaaaagccctgaggctctgaagtgcagattaacagaaggaagtgagaggctgccccgtcgctacagtgagggtgacagggctgtcctcaggggcttcagtgagagcagcgaggaggaggaggagccggaaagccctcggtcaagctcgccaccaattctcacaaagcccacgctgaagcgaaagaaaccatttctccaccgaaggaggagagtccgaaagcgcaaacaccacaatagcagtgtagtcacagaaactatttctgagaccactgaagtgttagatgaaccttttgaagattctgactccgagaggccaatgccaagattagaacccacgtttgagatcgatgaagaagaggaggaagaggatgaaaatgaacttttccctagagaatacttccgtcgtttgtcttcgcaggatgtactcaggtgtcagtcctcttctaagaggaagtctaaagatgaagaagaagatgaagagtcagatgatgctgatgacactcctatcttaaagccagtatctcttttgcgaaaacgtgatgtgaagaattctcctcttgagccagatacatccacacctttgaaaaagaaaaagggatggcccaaaggcaagagccgcaaaccaatccactggaagaaaagacctggtcgaaaaccaggatttaagttgagtcgggaaatcatgccagtttctactcaagcatgcgtcattgagcccatcgtttccattcctaaagctggacgtaaacccaagatccaggagagtgaagaaactgttgagccaaaagaagacatgcccctacccgaggagaggaaggaggaggaggagatgcaagcagaggcagaagaggctgaagagggtgaggaagaggatgcagccagcagtgaagtcccagcagcctctccagcagacagcagcaatagtcctgagaccgaaaccaaggagcctgaggtggaggaggaagaagagaagccccgtgtctcagaggagcagaggcagtcagaggaggagcagcaggaattagaggagccagagccagaggaggaggaagatgcagctgcagagactgcccagaatgacgaccacgacgctgatgatgaggatgatggccacctggagtccacaaagaaaaaggagctagaggaacagcccacgagggaagatgtcaaggaggagcctggtgttcaagagtcttttttagatgctaatatgcagaagagtagggaaaagataaaggataaagaggaaaccgagctggattccgaagaggagcagccttcccatgacacgtccgtggtgtcagagcagatggctgggtctgaggacgaccacgaagaagactcccacactaaggaagagttaatcgaattaaaagaggaggaagagattcctcatagtgagctggatctggaaactgtacaggcagtgcagtctttgactcaagaagaaagcagtgagcatgagggcgcctaccaggactgtgaggaaactcttgcggcgtgtcagaccctgcagagttacacccaggctgacgaggaccctcagatgtccatggttgaagactgtcatgcgtcagaacataatagccctatctcctccgttcagtctcaccccagccagtcagtccgttcggtcagcagtcccaacgtgcctgcccttgagagtggctacacccagatcagcccagaacaaggatccctgtccgcaccctctatgcagaacatggagaccagccccatgatggatgtgccttccgtatcagaccactctcagcaggtggtggacagcggcttcagtgacctgggcagcattgagagcaccactgaaaactatgagaacccaagcagttacgactccacgatgggcggcagcatctgtgggaacagctcttcccagagcagctgctcctacggtgggctgtcgtcctccagcagcctcacccagagcagctgtgtggtcactcagcagatggccagcatgggcagcagctgcagcatgatgcagcagagcagcgtccagcctgctgccaactgcagcatcaagtcacctcagagctgcgtggtggagaggcctcccagtaaccagcagcagcagccgccaccaccgcctccacagcagccacagccgccgccgccacaaccacaaccagcaccacagcctccaccaccccagcagcagccgcaacagcagccgcagcctcagccccagcagcctccacccccaccccctccccagcagcagcccccgctgtcacagtgtagtatgaataacagtttcaccccagctcctatgatcatggagataccagaatctggaagcactgggaacataagtatctatgagaggattccaggggattttggtgccggcagctactctcaaccatcagccaccttcagcctagccaagctgcagcagctgaccaacaccattatggaccctcatgccatgccttatagccattctcctgctgtgacttcctatgcaaccagtgtttctctgtccaatacaggactggctcagctggctccatctcatcccttagctgggactcctcaagcacaagccaccatgacgccacccccaaacttggcatccactaccatgaacctcacatctcctctgcttcagtgcaacatgtctgccaccaacattggcattcctcacacgcagagattgcaagggcaaatgccagtgaaggggcacatttccatccgctccaagtctgcgccactgccctctgcggctgctcaccagcagcagctgtatggccgtagcccatcggcagttgccatgcaggctggccctcgcgcactggctgttcagcgtggcatgaacatgggggttaatctgatgcctactcccgcctataatgtcaattccatgaatatgaacaccttgaatgccatgaacagctatcgaatgacacagcccatgatgaacagcagttaccatagtaaccctgcctacatgaaccagacagcacagtatcctatgcagatgcagatgggaatgatggggagccaggcctatacccagcagcctatgcagcctaaccctcatgggaacatgatgtacacaggcccctcccatcacagctacatgaacgctgctggcgtgcccaagcagtcactcaacggaccttacatgagaagatgagcaagatgaacttgcaatcaaaaacttaaatatatataaataaaggaaccttttatactgacaaaccagagaaaaatggacctttttccagttaaaatattgctgtagatttagaggaatttttctttggtttattttattttttagaaaacctgatcttctctttttttgggttcattttgttctgggttttggttttcttcacaatcttgaacattttacagtagaactcatctaaaaatggatttggggatggggaaacatgcacaaaatcttttcataattaaaaagagccttactttctttacataccacatggacagaatttgtgtaaaagtgaattatctttattttaaaatgtatgtttcccctcactgtttgcagctcccaatgttgtcatttttaaatgttatatacatctcaagggttaaccagaccctttcctccaaacccaacctttcatttcctacttcattccagcaggaggcacttaggggagactcggatggggacatggagaacaacccaagctccttaaacttattattattgttaatattattattattattattaataaagtgaggcaggaaaatgcttctccttttaaaatcccctccactcctcacacacacacacctcttgaaacccttccccaagaatgtttctttatagacggacttcattgaaatctttgttgttcttgaatcaagtgtaatataatttttttcttcttttttaaaatattcccactcagcactcagagacacaaaaatactgtaagtctcaattaacagcagaatctcagagaaaagctgtttgcaatccaaatccagcctttggaggaatagagatggtcaattaacaatcaaaaagaggagattaacctcttgtttttttaccacctggtgaatcagccataacgcacacacacgccacccagcctcttgtttctagtatgtactttgaaatgctaactgagggtcttgatgcttgagcctttgactgataaaactcaaatagcagtccccagtgatttgcctcttaggttctttcttaaattgttggtggatgactgtacattttagtgatttgaaaaataactgacaaaccattgaaacagtttattttatgttggaagagatggcgcagatgtgtgtcagaagggagatcacggtgtgagtttcgtagctatttaagtgatacatacctctagtttttgtatgtcttttgagatcctgagttcatcccctgtgaatcagagtgcacaagcacctctcctgtgagtggctaatgagaagagggacagaccgaccaccagcacagtagggcagatctggacagcagaatgttataacgcaagttcatgtgttgctcccaactccattctcttttctctcgtgcaaccagtttgcccattctcttcctattacttgctccagggataggtaaaaaaaaaaaaaaaaaaaaaaatatatatatatatatatatatacacacacacacacacacacacacacatatatatatatatatattccatcattagaagatggaaactattataccacttggtatgtgcagtcaaatatccaaaagggggaagtactgcttagagaaatatctgtaagcattaaattctctcctttatttgtacattttatatagataaatttttaaagtactaattaggcattaacttttttcaaatgcacaggtttgttggtttttttaatacactttaattgactttctcaagcgtgctaggtagaaacgcagaattccacatcttcccgctctcagctctgagcatgtgcaaggctgtgtaggacccagtttctctgtatatactattccagttcccagtcatctatgtagaaagtgcactgtgctgccatcgccctacatcttcagctgtgtcattgcttcctggttggggtggggacggggtgggtcgggagggaggtatattgggaggagggtgggtcaaggcagaaggagaagctgttgaaatgagggccgtgaaatcagtttctgttggtttgcggttgtgtttggttttgtttgtttctttataaaaaattcaatcgggcagctcccttttccacaagcctctttgtgactgtagaactattgtagaaaaaaaaagttcttttctatattataaaagaaattatccaacacagtaatattggtacctgtcattttttcacttctgtttaaaaaaaatgtatttttagcaagataacttgggtaatcttctaaaaaagaaatttaaaaactcactgttagtgactttgatgccttttaaaataagagctttttcatttcattccatctttaaaattttttatctttgttgtagaatattaaaaactatttt

SEQ ID NO: 277474 - DNA, 6390 bp, Homo sapiens
tagaggatcccgtgtcatcccccttcgtagagaaaccgttatctgatctgggtcgtctttcctacatggcatattggaaaagtgtaatattggagtgcctttatcaccaaaatgacaagcagatcagcattaagaagttaagcaagttgactggaatctgccctcaagacatcacttccacactccaccacctacgaatgctggacttccgtagtgaccaatttgtgattatccgccgggaaaaacttatccaggatcacatggcaaagcttcagctgaatttgcgacctgtagatgtagatccagaatgtttgcgctggactccagtcatagtgtccaactctgtggtctcagaggaggaagaagaggaggctgaggaaggagaaaacgaagagccacagtgccaggaaagagaattagagatcagtgtgggaaagtctgtgtctcatgagaacaaagaacaagattcttattcagtagaaagtgaaaagaaaccagaagttatggctccagtcagttctacacgtttgagcaaacaagtccttcctcatgatagtcttcctgcaaatagccagccatctcggaggggccgctgggggaggaagaacagaaaaacccaggaacgttttggtgataaagattctaaactgctcttggaagagacgtcttcagctcctcaggaacaatatggagaatgtggggagaaatcagaagccacccaggaacaatacactgaaagtgaagaacagctggtggcttctgaggagcagccaagccaggacgggaaacctgaccttcccaagagaagactcagtgagggggttgagccctggcgaggacagctcaagaaaagccctgaggctctgaagtgcagattaacagaaggaagtgagaggctgccccgtcgctacagtgagggtgacagggctgtcctcaggggcttcagtgagagcagcgaggaggaggaggagccggaaagccctcggtcaagctcgccaccaattctcacaaagcccacgctgaagcgaaagaaaccatttctccaccgaaggaggagagtccgaaagcgcaaacaccacaatagcagtgtagtcacagaaactatttctgagaccactgaagtgttagatgaaccttttgaagattctgactccgagaggccaatgccaagattagaacccacgtttgagatcgatgaagaagaggaggaagaggatgaaaatgaacttttccctagagaatacttccgtcgtttgtcttcgcaggatgtactcaggtgtcagtcctcttctaagaggaagtctaaagatgaagaagaagatgaagagtcagatgatgctgatgacactcctatcttaaagccagtatctcttttgcgaaaacgtgatgtgaagaattctcctcttgagccagatacatccacacctttgaaaaagaaaaagggatggcccaaaggcaagagccgcaaaccaatccactggaagaaaagacctggtcgaaaaccaggatttaagttgagtcgggaaatcatgccagtttctactcaagcatgcgtcattgagcccatcgtttccattcctaaagctggacgtaaacccaagatccaggagagtgaagaaactgttgagccaaaagaagacatgcccctacccgaggagaggaaggaggaggaggagatgcaagcagaggcagaagaggctgaagagggtgaggaagaggatgcagccagcagtgaagtcccagcagcctctccagcagacagcagcaatagtcctgagaccgaaaccaaggagcctgaggtggaggaggaagaagagaagccccgtgtctcagaggagcagaggcagtcagaggaggagcagcaggaattagaggagccagagccagaggaggaggaagatgcagctgcagagactgcccagaatgacgaccacgacgctgatgatgaggatgatggccacctggagtccacaaagaaaaaggagctagaggaacagcccacgagggaagatgtcaaggaggagcctggtgttcaagagtcttttttagatgctaatatgcagaagagtagggaaaagataaaggataaagaggaaaccgagctggattccgaagaggagcagccttcccatgacacgtccgtggtgtcagagcagatggctgggtctgaggacgaccacgaagaagactcccacactaaggaagagttaatcgaattaaaagaggaggaagagattcctcatagtgagctggatctggaaactgtacaggcagtgcagtctttgactcaagaagaaagcagtgagcatgagggcgcctaccaggactgtgaggaaactcttgcggcgtgtcagaccctgcagagttacacccaggctgacgaggaccctcagatgtccatggttgaagactgtcatgcgtcagaacataatagccctatctcctccgttcagtctcaccccagccagtcagtccgttcggtcagcagtcccaacgtgcctgcccttgagagtggctacacccagatcagcccagaacaaggatccctgtccgcaccctctatgcagaacatggagaccagccccatgatggatgtgccttccgtatcagaccactctcagcaggtggtggacagcggcttcagtgacctgggcagcattgagagcaccactgaaaactatgagaacccaagcagttacgactccacgatgggcggcagcatctgtgggaacagctcttcccagagcagctgctcctacggtgggctgtcgtcctccagcagcctcacccagagcagctgtgtggtcactcagcagatggccagcatgggcagcagctgcagcatgatgcagcagagcagcgtccagcctgctgccaactgcagcatcaagtcacctcagagctgcgtggtggagaggcctcccagtaaccagcagcagcagccgccaccaccgcctccacagcagccacagccgccgccgccacaaccacaaccagcaccacagcctccaccaccccagcagcagccgcaacagcagccgcagcctcagccccagcagcctccacccccaccccctccccagcagcagcccccgctgtcacagtgtagtatgaataacagtttcaccccagctcctatgatcatggagataccagaatctggaagcactgggaacataagtatctatgagaggattccaggggattttggtgccggcagctactctcaaccatcagccaccttcagcctagccaagctgcagcagctgaccaacaccattatggaccctcatgccatgccttatagccattctcctgctgtgacttcctatgcaaccagtgtttctctgtccaatacaggactggctcagctggctccatctcatcccttagctgggactcctcaagcacaagccaccatgacgccacccccaaacttggcatccactaccatgaacctcacatctcctctgcttcagtgcaacatgtctgccaccaacattggcattcctcacacgcagagattgcaagggcaaatgccagtgaaggggcacatttccatccgctccaagtctgcgccactgccctctgcggctgctcaccagcagcagctgtatggccgtagcccatcggcagttgccatgcaggctggccctcgcgcactggctgttcagcgtggcatgaacatgggggttaatctgatgcctactcccgcctataatgtcaattccatgaatatgaacaccttgaatgccatgaacagctatcgaatgacacagcccatgatgaacagcagttaccatagtaaccctgcctacatgaaccagacagcacagtatcctatgcagatgcagatgggaatgatggggagccaggcctatacccagcagcctatgcagcctaaccctcatgggaacatgatgtacacaggcccctcccatcacagctacatgaacgctgctggcgtgcccaagcagtcactcaacggaccttacatgagaagatgagcaagatgaacttgcaatcaaaaacttaaatatatataaataaaggaaccttttatactgacaaaccagagaaaaatggacctttttccagttaaaatattgctgtagatttagaggaatttttctttggtttattttattttttagaaaacctgatcttctctttttttgggttcattttgttctgggttttggttttcttcacaatcttgaacattttacagtagaactcatctaaaaatggatttggggatggggaaacatgcacaaaatcttttcataattaaaaagagccttactttctttacataccacatggacagaatttgtgtaaaagtgaattatctttattttaaaatgtatgtttcccctcactgtttgcagctcccaatgttgtcatttttaaatgttatatacatctcaagggttaaccagaccctttcctccaaacccaacctttcatttcctacttcattccagcaggaggcacttaggggagactcggatggggacatggagaacaacccaagctccttaaacttattattattgttaatattattattattattattaataaagtgaggcaggaaaatgcttctccttttaaaatcccctccactcctcacacacacacacctcttgaaacccttccccaagaatgtttctttatagacggacttcattgaaatctttgttgttcttgaatcaagtgtaatataatttttttcttcttttttaaaatattcccactcagcactcagagacacaaaaatactgtaagtctcaattaacagcagaatctcagagaaaagctgtttgcaatccaaatccagcctttggaggaatagagatggtcaattaacaatcaaaaagaggagattaacctcttgtttttttaccacctggtgaatcagccataacgcacacacacgccacccagcctcttgtttctagtatgtactttgaaatgctaactgagggtcttgatgcttgagcctttgactgataaaactcaaatagcagtccccagtgatttgcctcttaggttctttcttaaattgttggtggatgactgtacattttagtgatttgaaaaataactgacaaaccattgaaacagtttattttatgttggaagagatggcgcagatgtgtgtcagaagggagatcacggtgtgagtttcgtagctatttaagtgatacatacctctagtttttgtatgtcttttgagatcctgagttcatcccctgtgaatcagagtgcacaagcacctctcctgtgagtggctaatgagaagagggacagaccgaccaccagcacagtagggcagatctggacagcagaatgttataacgcaagttcatgtgttgctcccaactccattctcttttctctcgtgcaaccagtttgcccattctcttcctattacttgctccagggataggtaaaaaaaaaaaaaaaaaaaaaaatatatatatatatatatatatacacacacacacacacacacacacacatatatatatatatatattccatcattagaagatggaaactattataccacttggtatgtgcagtcaaatatccaaaagggggaagtactgcttagagaaatatctgtaagcattaaattctctcctttatttgtacattttatatagataaatttttaaagtactaattaggcattaacttttttcaaatgcacaggtttgttggtttttttaatacactttaattgactttctcaagcgtgctaggtagaaacgcagaattccacatcttcccgctctcagctctgagcatgtgcaaggctgtgtaggacccagtttctctgtatatactattccagttcccagtcatctatgtagaaagtgcactgtgctgccatcgccctacatcttcagctgtgtcattgcttcctggttggggtggggacggggtgggtcgggagggaggtatattgggaggagggtgggtcaaggcagaaggagaagctgttgaaatgagggccgtgaaatcagtttctgttggtttgcggttgtgtttggttttgtttgtttctttataaaaaattcaatcgggcagctcccttttccacaagcctctttgtgactgtagaactattgtagaaaaaaaaagttcttttctatattataaaagaaattatccaacacagtaatattggtacctgtcattttttcacttctgtttaaaaaaaatgtatttttagcaagataacttgggtaatcttctaaaaaagaaatttaaaaactcactgttagtgactttgatgccttttaaaataagagctttttcatttcattccatctttaaaattttttatctttgttgtagaatattaaaaactatttt

SEQ ID NO: 277475 - DNA, 3725 bp, Homo sapiens
tgactcagggcgagctgcagctcgcctctgacgttatctcacgggagcgagctgcatctgtgggaacagctcttcccagagcagctgctcctacggtgggctgtcgtcctccagcagcctcacccagagcagctgtgtggtcactcagcagatggccagcatgggcagcagctgcagcatgatgcagcagagcagcgtccagcctgctgccaactgcagcatcaagtcacctcagagctgcgtggtggagaggcctcccagtaaccagcagcagcagccgccaccaccgcctccacagcagccacagccgccgccgccacaaccacaaccagcaccacagcctccaccaccccagcagcagccgcaacagcagccgcagcctcagccccagcagcctccacccccaccccctccccagcagcagcccccgctgtcacagtgtagtatgaataacagtttcaccccagctcctatgatcatggagataccagaatctggaagcactgggaacataagtatctatgagaggattccaggggattttggtgccggcagctactctcaaccatcagccaccttcagcctagccaagctgcagcagctgaccaacaccattatggaccctcatgccatgccttatagccattctcctgctgtgacttcctatgcaaccagtgtttctctgtccaatacaggactggctcagctggctccatctcatcccttagctgggactcctcaagcacaagccaccatgacgccacccccaaacttggcatccactaccatgaacctcacatctcctctgcttcagtgcaacatgtctgccaccaacattggcattcctcacacgcagagattgcaagggcaaatgccagtgaaggggcacatttccatccgctccaagtctgcgccactgccctctgcggctgctcaccagcagcagctgtatggccgtagcccatcggcagttgccatgcaggctggccctcgcgcactggctgttcagcgtggcatgaacatgggggttaatctgatgcctactcccgcctataatgtcaattccatgaatatgaacaccttgaatgccatgaacagctatcgaatgacacagcccatgatgaacagcagttaccatagtaaccctgcctacatgaaccagacagcacagtatcctatgcagatgcagatgggaatgatggggagccaggcctatacccagcagcctatgcagcctaaccctcatgggaacatgatgtacacaggcccctcccatcacagctacatgaacgctgctggcgtgcccaagcagtcactcaacggaccttacatgagaagatgagcaagatgaacttgcaatcaaaaacttaaatatatataaataaaggaaccttttatactgacaaaccagagaaaaatggacctttttccagttaaaatattgctgtagatttagaggaatttttctttggtttattttattttttagaaaacctgatcttctctttttttgggttcattttgttctgggttttggttttcttcacaatcttgaacattttacagtagaactcatctaaaaatggatttggggatggggaaacatgcacaaaatcttttcataattaaaaagagccttactttctttacataccacatggacagaatttgtgtaaaagtgaattatctttattttaaaatgtatgtttcccctcactgtttgcagctcccaatgttgtcatttttaaatgttatatacatctcaagggttaaccagaccctttcctccaaacccaacctttcatttcctacttcattccagcaggaggcacttaggggagactcggatggggacatggagaacaacccaagctccttaaacttattattattgttaatattattattattattattaataaagtgaggcaggaaaatgcttctccttttaaaatcccctccactcctcacacacacacacctcttgaaacccttccccaagaatgtttctttatagacggacttcattgaaatctttgttgttcttgaatcaagtgtaatataatttttttcttcttttttaaaatattcccactcagcactcagagacacaaaaatactgtaagtctcaattaacagcagaatctcagagaaaagctgtttgcaatccaaatccagcctttggaggaatagagatggtcaattaacaatcaaaaagaggagattaacctcttgtttttttaccacctggtgaatcagccataacgcacacacacgccacccagcctcttgtttctagtatgtactttgaaatgctaactgagggtcttgatgcttgagcctttgactgataaaactcaaatagcagtccccagtgatttgcctcttaggttctttcttaaattgttggtggatgactgtacattttagtgatttgaaaaataactgacaaaccattgaaacagtttattttatgttggaagagatggcgcagatgtgtgtcagaagggagatcacggtgtgagtttcgtagctatttaagtgatacatacctctagtttttgtatgtcttttgagatcctgagttcatcccctgtgaatcagagtgcacaagcacctctcctgtgagtggctaatgagaagagggacagaccgaccaccagcacagtagggcagatctggacagcagaatgttataacgcaagttcatgtgttgctcccaactccattctcttttctctcgtgcaaccagtttgcccattctcttcctattacttgctccagggataggtaaaaaaaaaaaaaaaaaaaaaaatatatatatatatatatatatacacacacacacacacacacacacacatatatatatatatatattccatcattagaagatggaaactattataccacttggtatgtgcagtcaaatatccaaaagggggaagtactgcttagagaaatatctgtaagcattaaattctctcctttatttgtacattttatatagataaatttttaaagtactaattaggcattaacttttttcaaatgcacaggtttgttggtttttttaatacactttaattgactttctcaagcgtgctaggtagaaacgcagaattccacatcttcccgctctcagctctgagcatgtgcaaggctgtgtaggacccagtttctctgtatatactattccagttcccagtcatctatgtagaaagtgcactgtgctgccatcgccctacatcttcagctgtgtcattgcttcctggttggggtggggacggggtgggtcgggagggaggtatattgggaggagggtgggtcaaggcagaaggagaagctgttgaaatgagggccgtgaaatcagtttctgttggtttgcggttgtgtttggttttgtttgtttctttataaaaaattcaatcgggcagctcccttttccacaagcctctttgtgactgtagaactattgtagaaaaaaaaagttcttttctatattataaaagaaattatccaacacagtaatattggtacctgtcattttttcacttctgtttaaaaaaaatgtatttttagcaagataacttgggtaatcttctaaaaaagaaatttaaaaactcactgttagtgactttgatgccttttaaaataagagctttttcatttcattccatctttaaaattttttatctttgttgtagaatattaaaaactatttt

SEQ ID NO: 277476 - DNA, 4304 bp, Homo sapiens
ggcacgaggtttggggcatctccgcggtccggcccggggccccgggatctcggctgtccttcctcccggcataagatgcacatttttctgctctggagccgggaatgaaatattcttgagttcttacaactttatgacgagacccatgtgtggtgctattgagaaattcattgggaagttggaagacatttcaaacaacaggttgttttggtttctatagtacaattggggtggcattctgttttgtgaaaggaggaaggacttaggccagaaaactcatatgctatggttaactggttcccagcctccgagaatcttgttttccatggtgtaaaacttactcagcatcaggataagggataacgactctatggatatacagaatccttcaccatggtaaaactcgcaaacccgctttatactgagtggattttggaggccatcaaaaaagtgaaaaagcagaaacagcgtccttcagaagaaaggatatgcaatgctgtgtcttcatcccatggcttggatcgtaaaactgttttagaacaattggagttgagtgttaaagatggaacaattttaaaagtctcaaataaaggactcaattcctataaagatcctgataatcctgggcgaatagcacttcctaagcctcggaaccatggaaaattggataataaacaaaatgtggattggaataaactgataaagcgggcagttgagggcttggcagagtctggtggctcaactttgaaaagcattgaacgttttttgaaaggtcagaaggatgtgtctgcattattcggaggcagtgctgcctctggctttcaccagcagttacgattggctatcaaacgtgccattggccacggcagactccttaaagatggacctctttatcggctcaacactaaagcaaccaacgtggatgggaaagagagttgtgagtctctttcctgtttacctccagtgtcccttcttccacatgaaaaggataagccggttgctgaaccaatccccatctgtagtttctgtcttggtacaaaagaacaaaaccgagaaaagaagccagaggaactcatctcctgtgccgactgtggcaacagtggccatccatcctgtttaaagttttcccctgaactaacggttcgagtgaaggccttacggtggcagtgcatcgagtgtaaaacatgcagctcctgtcgagatcaaggcaaaaatgcggataacatgctcttttgtgattcatgtgaccgaggttttcacatggagtgttgtgatccgccactcacccgtatgccaaaaggcatgtggatatgtcaaatatgtcgacctaggaaaaaaggacgaaaacttctacaaaagaaggcagcacagataaaacggcgctatactaatccaataggacgtccaaaaaacaggttaaagaaacaaaacacggtatcaaaaggtcccttcagcaaagttcgaactggccctggaaggggtaggaaacgaaaaatcactctttccagccaatcagcatcatcatcatcagaagaaggatatttagagcggatagatggcttggacttctgcagagatagcaatgtctccttgaagttcaacaagaaaaccaaagggctcattgatggccttaccaaattttttaccccttcccctgatgggcggaaagctcggggggaagtggtggactactctgagcaatatcgaatcagaaagaggggcaacaggaaatcaagcacttcagattggcccacagacaatcaggatggctgggatggcaaacaagaaaatgaggagcgactttttgggagccaggaaatcatgactgagaaagatatggaattatttcgtgatatccaagaacaagcactgcagaaagttggagtgactggtccccctgatccacaagtccgctgtccctctgtcattgagtttgggaagtatgaaattcacacctggtactcctccccatatcctcaagaatactcaaggctgcccaaattgtatctttgtgaattttgtctaaaatatatgaaaagtagaactattctgcagcagcacatgaagaaatgtggttggttccatcctcctgccaatgagatttacagaaagaataatatttctgtctttgaggttgatgggaatgtgagtaccatttattgtcaaaacctgtgtcttttggcaaagttgtttcttgaccacaaaaccctctattacgatgtggagccatttcttttttatgtactaacacagaatgatgtcaagggctgccaccttgttggctacttttctaaggaaaagcactgccaacagaagtacaatgtttcctgtataatgattcttcctcaataccagcgtaagggctatggcaggtttctcatcgatttcagttatttgttatcaaagcgtgaaggccaagcagggtctccagagaaaccgttatctgatctgggtcgtctttcctacatggcatattggaaaagtgtaatattggagtgcctttatcaccaaaatgacaagcagatcagcattaagaagttaagcaagttgactggaatctgccctcaagacatcacttccacactccaccacctacgaatgctggacttccgtagtgaccaatttgtgattatccgccgggaaaaacttatccaggatcacatggcaaagcttcagctgaatttgcgacctgtagatgtagatccagaatgtttgcgctggactccagtcatagtgtccaactctgtggtctcagaggaggaagaagaggaggctgaggaaggagaaaacgaagagccacagtgccaggaaagagaattagagatcagtgtgggaaagtctgtgtctcatgagaacaaagaacaagattcttattcagtagaaagtgaaaagaaaccagaagttatggctccagtcagttctacacgtttgagcaaacaagtccttcctcatgatagtcttcctgcaaatagccagccatctcggaggggccgctgggggaggaagaacagaaaaacccaggaacgttttggtgataaagattctaaactgctcttggaagagacgtcttcagctcctcaggaacaatatggagaatgtggggagaaatcagaagccacccaggaacaatacactgaaagtgaagaacagctggtggcttctgaggagcagccaagccaggacgggaaacctgaccttcccaagagaagactcagtgagggggttgagccctggcgaggacagctcaagaaaagccctgaggctctgaagtgcagattaacagaaggaagtgagaggctgccccgtcgctacagtgagggtgacagggctgtcctcaggggcttcagtgagagcagcgaggaggaggaggagccggaaagccctcggtcaagctcgccaccaattctcacaaagcccacgctgaagcgaaagaaaccatttctccaccgaaggaggagagtccgaaagcgcaaacaccacaatagcagtgtagtcacagaaactatttctgagaccactgaagtgttagatgaaccttttgaagattctgactccgagaggccaatgccaagattagaacccacgtttgagatcgatgaagaagaggaggaagaggatgaaaatgaacttttccctagagaatacttccgtcgtttgtcttcgcaggatgtactcaggtgtcagtcctcttctaagaggaagtctaaagatgaagaagaagatgaagagtcagatgatgctgatgacactcctatcttaaagccagtatctcttttgcgaaaacgtgatgtgaagaattctcctcttgagccagatacatccacacctttgaaaaagaaaaagggatggcccaaaggcaagagccgcaaaccaatccactggaagaaaagacctggtcgaaaaccaggatttaagttgagtcgggaaatcatgccagtttctactcaagcatgcgtcattgagcccatcgtttccattcctaaagctggacgtaaacccaagatccaggagagtgaagaaactgttgagccaaaagaagacatgcccctacccgaggagaggaaggaggaggaggagatgcaagcagaggcagaagaggctgaagagggtgaggaagaggatgcagccagcagtgaagtcccagcagcctctccagcagacagcagcaatagtcctgagaccgaaaccaaggagcctgaggtggaggaggaagaagagaagccccgtgtctcagaggagcagaggcagtcagaggaggagcagcaggaattagagagtcgccctgtcgtcggaccggctcatgt

SEQ ID NO: 277477 - DNA, 3113 bp, Homo sapiens
ggcacgaggtttggggcatctccgcggtccggcccggggccccgggatctcggctgtccttcctcccggcataagatgcacatttttctgctctggagccgggaatgaaatattcttgagttcttacaactttatgacgagacccatgtgtggtgctattgagaaattcattgggaagttggaagacatttcaaacaacaggttgttttggtttctatagtacaattggggtggcattctgttttgtgaaaggaggaaggacttaggccagaaaactcatatgctatggttaactggttcccagcctccgagaatcttgttttccatggtgtaaaacttactcagcatcaggataagggataacgactctatggatatacagaatccttcaccatggtaaaactcgcaaacccgctttatactgagtggattttggaggccatcaaaaaagtgaaaaagcagaaacagcgtccttcagaagaaaggatatgcaatgctgtgtcttcatcccatggcttggatcgtaaaactgttttagaacaattggagttgagtgttaaagatggaacaattttaaaagtctcaaataaaggactcaattcctataaagatcctgataatcctgggcgaatagcacttcctaagcctcggaaccatggaaaattggataataaacaaaatgtggattggaataaactgataaagcgggcagttgagggcttggcagagtctggtggctcaactttgaaaagcattgaacgttttttgaaaggtcagaaggatgtgtctgcattattcggaggcagtgctgcctctggctttcaccagcagttacgattggctatcaaacgtgccattggccacggcagactccttaaagatggacctctttatcggctcaacactaaagcaaccaacgtggatgggaaagagagttgtgagtctctttcctgtttacctccagtgtcccttcttccacatgaaaaggataagccggttgctgaaccaatccccatctgtagtttctgtcttggtacaaaagaacaaaaccgagaaaagaagccagaggaactcatctcctgtgccgactgtggcaacagtggccatccatcctgtttaaagttttcccctgaactaacggttcgagtgaaggccttacggtggcagtgcatcgagtgtaaaacatgcagctcctgtcgagatcaaggcaaaaatgcggataacatgctcttttgtgattcatgtgaccgaggttttcacatggagtgttgtgatccgccactcacccgtatgccaaaaggcatgtggatatgtcaaatatgtcgacctaggaaaaaaggacgaaaacttctacaaaagaaggcagcacagataaaacggcgctatactaatccaataggacgtccaaaaaacaggttaaagaaacaaaacacggtatcaaaaggtcccttcagcaaagttcgaactggccctggaaggggtaggaaacgaaaaatcactctttccagccaatcagcatcatcatcatcagaagaaggatatttagagcggatagatggcttggacttctgcagagatagcaatgtctccttgaagttcaacaagaaaaccaaagggctcattgatggccttaccaaattttttaccccttcccctgatgggcggaaagctcggggggaagtggtggactactctgagcaatatcgaatcagaaagaggggcaacaggaaatcaagcacttcagattggcccacagacaatcaggatggctgggatggcaaacaagaaaatgaggagcgactttttgggagccaggaaatcatgactgagaaagatatggaattatttcgtgatatccaagaacaagcactgcagaaagttggagtgactggtccccctgatccacaagtccgctgtccctctgtcattgagtttgggaagtatgaaattcacacctggtactcctccccatatcctcaagaatactcaaggctgcccaaattgtatctttgtgaattttgtctaaaatatatgaaaagtagaactattctgcagcagcacatgaagaaatgtggttggttccatcctcctgccaatgagatttacagaaagaataatatttctgtctttgaggttgatgggaatgtgagtaccatttattgtcaaaacctgtgtcttttggcaaagttgtttcttgaccacaaaaccctctattacgatgtggagccatttcttttttatgtactaacacagaatgatgtcaagggctgccaccttgttggctacttttctaaggaaaagcactgccaacagaagtacaatgtttcctgtataatgattcttcctcaataccagcgtaagggctatggcaggtttctcatcgatttcagttatttgttatcaaagcgtgaaggccaagcagggtctccagagaaaccgttatctgatctgggtcgtctttcctacatggcatattggaaaagtgtaatattggagtgcctttatcaccaaaatgacaagcagatcagcattaagaagttaagcaagttgactggaatctgccctcaagacatcacttccacactccaccacctacgaatgctggacttccgtagtgaccaatttgtgattatccgccgggaaaaacttatccaggatcacatggcaaagcttcagctgaatttgcgacctgtagatgtagatccagaatgtttgcgctggactccagtcatagtgtccaactctgtggtctcagaggaggaagaagaggaggctgaggaaggagaaaacgaagagccacagtgccaggaaagagaattagagatcagtgtgggaaagtctgtgtctcatgagaacaaagaacaagattcttattcagtagaaagtgaaaagaaaccagaagttatggctccagtcagttctacacgtttgagcaaacaagtccttcctcatgatagtcttcctgcaaatagccagccatctcggaggggccgctgggggaggaagaacagaaaaacccaggaacgttttggtgataaagattctaaactgctcttggaagagacgtcttcagctcctcaggaacaatatgattcagaagataaacgggccgg

SEQ ID NO: 277478 - DNA, 7131 bp, Homo sapiens
ggcacgaggtttggggcatctccgcggtccggcccggggccccgggatctcggctgtccttcctcccggcataagatgcacatttttctgctctggagccgggaatgaaatattcttgagttcttacaactttatgacgagacccatgtgtggtgctattgagaaattcattgggaagttggaagacatttcaaacaacaggttgttttggtttctatagtacaattggggtggcattctgttttgtgaaaggaggaaggacttaggccagaaaactcatatgctatggttaactggttcccagcctccgagaatcttgttttccatggtgtaaaacttactcagcatcaggataagggataacgactctatggatatacagaatccttcaccatggtaaaactcgcaaacccgctttatactgagtggattttggaggccatcaaaaaagtgaaaaagcagaaacagcgtccttcagaagaaaggatatgcaatgctgtgtcttcatcccatggcttggatcgtaaaactgttttagaacaattggagttgagtgttaaagatggaacaattttaaaagtctcaaataaaggactcaattcctataaagatcctgataatcctgggcgaatagcacttcctaagcctcggaaccatggaaaattggataataaacaaaatgtggattggaataaactgataaagcgggcagttgagggcttggcagagtctggtggctcaactttgaaaagcattgaacgttttttgaaaggtcagaaggatgtgtctgcattattcggaggcagtgctgcctctggctttcaccagcagttacgattggctatcaaacgtgccattggccacggcagactccttaaagatggacctctttatcggctcaacactaaagcaaccaacgtggatgggaaagagagttgtgagtctctttcctgtttacctccagtgtcccttcttccacatgaaaaggataagccggttgctgaaccaatccccatctgtagtttctgtcttggtacaaaagaacaaaaccgagaaaagaagccagaggaactcatctcctgtgccgactgtggcaacagtggccatccatcctgtttaaagttttcccctgaactaacggttcgagtgaaggccttacggtggcagtgcatcgagtgtaaaacatgcagctcctgtcgagatcaaggcaaaaatgcggataacatgctcttttgtgattcatgtgaccgaggttttcacatggagtgttgtgatccgccactcacccgtatgccaaaaggcatgtggatatgtcaaatatgtcgacctaggaaaaaaggacgaaaacttctacaaaagaaggcagcacagataaaacggcgctatactaatccaataggacgtccaaaaaacaggttaaagaaacaaaacacggtatcaaaaggtcccttcagcaaagttcgaactggccctggaaggggtaggaaacgaaaaatcactctttccagccaatcagcatcatcatcatcagaagaaggatatttagagcggatagatggcttggacttctgcagagatagcaatgtctccttgaagttcaacaagaaaaccaaagggctcattgatggccttaccaaattttttaccccttcccctgatgggcggaaagctcggggggaagtggtggactactctgagcaatatcgaatcagaaagaggggcaacaggaaatcaagcacttcagattggcccacagacaatcaggatggctgggatggcaaacaagaaaatgaggagcgactttttgggagccaggaaatcatgactgagaaagatatggaattatttcgtgatatccaagaacaagcactgcagaaagttggagtgactggtccccctgatccacaagtccgctgtccctctgtcattgagtttgggaagtatgaaattcacacctggtactcctccccatatcctcaagaatactcaaggctgcccaaattgtatctttgtgaattttgtctaaaatatatgaaaagtagaactattctgcagcagcacatgaagaaatgtggttggttccatcctcctgccaatgagatttacagaaagaataatatttctgtctttgaggttgatgggaatgtgagtaccatttattgtcaaaacctgtgtcttttggcaaagttgtttcttgaccacaaaaccctctattacgatgtggagccatttcttttttatgtactaacacagaatgatgtcaagggctgccaccttgttggctacttttctaaggaaaagcactgccaacagaagtacaatgtttcctgtataatgattcttcctcaataccagcgtaagggctatggcaggtttctcatcgatttcagttatttgttatcaaagcgtgaaggccaagcagggtctccagagaaaccgttatctgatctgggtcgtctttcctacatggcatattggaaaagtgtaatattggagtgcctttatcaccaaaatgacaagcagatcagcattaagaagttaagcaagttgactggaatctgccctcaagacatcacttccacactccaccacctacgaatgctggacttccgtagtgaccaatttgtgattatccgccgggaaaaacttatccaggatcacatggcaaagcttcagctgaatttgcgacctgtagatgtagatccagaatgtttgcgctggactccagtcatagtgtccaactctgtggtctcagaggaggaagaagaggaggctgaggaaggagaaaacgaagagccacagtgccaggaaagagaattagagatcagtgtgggaaagtctgtgtctcatgagaacaaagaacaagattcttattcagtagaaagtgaaaagaaaccagaagttatggctccagtcagttctacacgtttgagcaaacaagtccttcctcatgatagtcttcctgcaaatagccagccatctcggaggggccgctgggggaggaagaacagaaaaacccaggaacgttttggtgataaagattctaaactgctcttggaagagacgtcttcagctcctcaggaacaatatggagaatgtggggagaaatcagaagccacccaggaacaatacactgaaagtgaagaacagctggtggcttctgaggagcagccaagccaggacgggaaacctgaccttcccaagagaagactcagtgagggggttgagccctggcgaggacagctcaagaaaagccctgaggctctgaagtgcagattaacagaaggaagtgagaggctgccccgtcgctacagtgagggtgacagggctgtcctcaggggcttcagtgagagcagcgaggaggaggaggagccggaaagccctcggtcaagctcgccaccaattctcacaaagcccacgctgaagcgaaagaaaccatttctccaccgaaggaggagagtccgaaagcgcaaacaccacaatagcagtgtagtcacagaaactatttctgagaccactgaagtgttagatgaaccttttgaagattctgactccgagaggccaatgccaagattagaacccacgtttgagatcgatgaagaagaggaggaagaggatgaaaatgaacttttccctagagaatacttccgtcgtttgtcttcgcaggatgtactcaggtgtcagtcctcttctaagaggaagtctaaagatgaagaagaagatgaagagtcagatgatgctgatgacactcctatcttaaagccagtatctcttttgcgaaaacgtgatgtgaagaattctcctcttgagccagatacatccacacctttgaaaaagaaaaagggatggcccaaaggcaagagccgcaaaccaatccactggaagaaaagacctggtcgaaaaccaggatttaagttgagtcgggaaatcatgccagtttctactcaagcatgcgtcattgagcccatcgtttccattcctaaagctggacgtaaacccaagatccaggagagtgaagaaactgttgagccaaaagaagacatgcccctacccgaggagaggaaggaggaggaggagatgcaagcagaggcagaagaggctgaagagggtgaggaagaggatgcagccagcagtgaagtcccagcagcctctccagcagacagcagcaatagtcctgagaccgaaaccaaggagcctgaggtggaggaggaagaagagaagccccgtgtctcagaggagcagaggcagtcagaggaggagcagcaggaattagaggagccagagccagaggaggaggaagatgcagctgcagagactgcccagaatgacgaccacgacgctgatgatgaggatgatggccacctggagtccacaaagaaaaaggagctagaggaacagcccacgagggaagatgtcaaggaggagcctggtgttcaagagtcttttttagatgctaatatgcagaagagtagggaaaagataaaggataaagaggaaaccgagctggattccgaagaggagcagccttcccatgacacgtccgtggtgtcagagcagatggctgggtctgaggacgaccacgaagaagactcccacactaaggaagagttaatcgaattaaaagaggaggaagagattcctcatagtgagctggatctggaaactgtacaggcagtgcagtctttgactcaagaagaaagcagtgagcatgagggcgcctaccaggactgtgaggaaactcttgcggcgtgtcagaccctgcagagttacacccaggctgacgaggaccctcagatgtccatggttgaagactgtcatgcgtcagaacataatagccctatctcctccgttcagtctcaccccagccagtcagtccgttcggtcagcagtcccaacgtgcctgcccttgagagtggctacacccagatcagcccagaacaaggatccctgtccgcaccctctatgcagaacatggagaccagccccatgatggatgtgccttccgtatcagaccactctcagcaggtggtggacagcggcttcagtgacctgggcagcattgagagcaccactgaaaactatgagaacccaagcagttacgactccacgatgggcggcagcatctgtgggaacagctcttcccagagcagctgctcctacggtgggctgtcgtcctccagcagcctcacccagagcagctgtgtggtcactcagcagatggccagcatgggcagcagctgcagcatgatgcagcagagcagcgtccagcctgctgccaactgcagcatcaagtcacctcagagctgcgtggtggagaggcctcccagtaaccagcagcagcagccgccaccaccgcctccacagcagccacagccgccgccgccacaaccacaaccagcaccacagcctccaccaccccagcagcagccgcaacagcagccgcagcctcagccccagcagcctccacccccaccccctccccagcagcagcccccgctgtcacagtgtagtatgaataacagtttcaccccagctcctatgatcatggagataccagaatctggaagcactgggaacataagtatctatgagaggattccaggggattttggtgccggcagctactctcaaccatcagccaccttcagcctagccaagctgcagcagctgaccaacaccattatggaccctcatgccatgccttatagccattctcctgctgtgacttcctatgcaaccagtgtttctctgtccaatacaggactggctcagctggctccatctcatcccttagctgggactcctcaagcacaagccaccatgacgccacccccaaacttggcatccactaccatgaacctcacatctcctctgcttcagtgcaacatgtctgccaccaacattggcattcctcacacgcagagattgcaagggcaaatgccagtgaaggggcacatttccatccgctccaagtctgcgccactgccctctgcggctgctcaccagcagcagctgtatggccgtagcccatcggcagttgccatgcaggctggccctcgcgcactggctgttcagcgtggcatgaacatgggggttaatctgatgcctactcccgcctataatgtcaattccatgaatatgaacaccttgaatgccatgaacagctatcgaatgacacagcccatgatgaacagcagttaccatagtaaccctgcctacatgaaccagacccccgaaaccagacgagctacctaaaaaaaaaaaaaaaaaaaaaaaaaaaaaaaaaaaaaaaaaaaaaaaaaaaaaaaaaaaaaaaaaaaaaaaaaaaaaaaaaaaaaaaaaaaaaaaaaaaaaaaaaaaaagagagagaggggcgcgcgcgccccaaaactctctccccggggggggcccacacacagagagaacccaccccttgttttttataaaaggggggcgacaaaaaaagaggggcgttattataatacagagagaagagagagggtctctcataaaaaacagtgtaggtgaagagacacacaaacagaagcagagaagaacaatacgagacgcagcacaccaacaaacacacgtgagatgaacaaatcaacgaaaacaacaccacacaacaaaacacactccccaccggaaaaacaaacccctacacacccctatactttatcttcaacaaacaccaacccacacactctcctcccgtcacaaacaacatcccctccaaaccatatacatctcacacaacattatacacacacacaacaaaaacaccacacccacctagtagaccgagtatagaaggaacacccacgcaaccaccagcaccccaaggagcccgccagaggcaccggcacgcaacccgaccagagccggaagggaacgacggcgaaataggcgagaggacaaagcacaggaacaaaaaaaaaacaaccatacagacaccaaatcaaaacaaacaacaagaaaccacaagaagaagagaaaagagcaagaagaacaaagcaaacaccaaaagagaagaaaaagagggaacaatagacaacacaagcagaaaaacgcgcgaagcacctacacgaacagacactcagagcacagatcaacaaaacagaacgcagaacc

SEQ ID NO: 277479 - DNA, 2218 bp, Homo sapiens
ggcacgaggtttggggcatctccgcggtccggcccggggccccgggatctcggctgtccttcctcccggcataagatgcacatttttctgctctggagccgggaatgaaatattcttgagttcttacaactttatgacgagacccatgtgtggtgctattgagaaattcattgggaagttggaagacatttcaaacaacaggttgttttggtttctatagtacaattggggtggcattctgttttgtgaaaggaggaaggacttaggccagaaaactcatatgctatggttaactggttcccagcctccgagaatcttgttttccatggtgtaaaacttactcagcatcaggataagggataacgactctatggatatacagaatccttcaccatggtaaaactcgcaaacccgctttatactgagtggattttggaggccatcaaaaaagtgaaaaagcagaaacagcgtccttcagaagaaaggatatgcaatgctgtgtcttcatcccatggcttggatcgtaaaactgttttagaacaattggagttgagtgttaaagatggaacaattttaaaagtctcaaataaaggactcaattcctataaagatcctgataatcctgggcgaatagcacttcctaagcctcggaaccatggaaaattggataataaacaaaatgtggattggaataaactgataaagcgggcagttgagggcttggcagagtctggtggctcaactttgaaaagcattgaacgttttttgaaaggtcagaaggatgtgtctgcattattcggaggcagtgctgcctctggctttcaccagcagttacgattggctatcaaacgtgccattggccacggcagactccttaaagatggacctctttatcggctcaacactaaagcaaccaacgtggatgggaaagagagttgtgagtctctttcctgtttacctccagtgtcccttcttccacatgaaaaggataagccggttgctgaaccaatccccatctgtagtttctgtcttggtacaaaagaacaaaaccgagaaaagaagccagaggaactcatctcctgtgccgactgtggcaacagtggccatccatcctgtttaaagttttcccctgaactaacggttcgagtgaaggccttacggtggcagtgcatcgagtgtaaaacatgcagctcctgtcgagatcaaggcaaaaatgcggataacatgctcttttgtgattcatgtgaccgaggttttcacatggagtgttgtgatccgccactcacccgtatgccaaaaggcatgtggatatgtcaaatatgtcgacctaggaaaaaaggacgaaaacttctacaaaagaaggcagcacagataaaacggcgctatactaatccaataggacgtccaaaaaacaggttaaagaaacaaaacacggtatcaaaaggtcccttcagcaaagttcgaactggccctggaaggggtaggaaacgaaaaatcactctttccagccaatcagcatcatcatcatcagaagaaggatatttagagcggatagatggcttggacttctgcagagatagcaatgtctccttgaagttcaacaagaaaaccaaagggctcattgatggccttaccaaattttttaccccttcccctgatgggcggaaagctcggggggaagtggtggactactctgagcaatatcgaatcagaaagaggggcaacaggaaatcaagcacttcagattggcccacagacaatcaggatggctgggatggcaaacaagaaaatgaggagcgactttttgggagccaggaaatcatgactgagaaagatatggaattatttcgtgatatccaagaacaagcactgcaggtaaagttggatattcaggttagacaatcaagcaacttgttcatggctgagaaacagcagattaattacattgtgggttaagcagtaacagcagtttgcctaatctcagaatagttgtggttatgtgtgtatatgtagttctgctgtttataatattcctttcaaacccatgataactgctttggttttgcagataagcacatggctttgactatcaatattaaataagcttggtttattttttgtcttactgtatgaagaagaatttgggatttgaccaaaaacaaacaaaaaacaagcttctcatgagtgataaaacacctatatttattaattcaagaag

SEQ ID NO: 277480 - DNA, 1320 bp, Homo sapiens
ctcagaatggaggtgtccccggctgcccttccagatggcaccaagtccagccacaggtcagctacacacatagcacactgggacaatgctgggctccattcagggtattttattttcttaaagtagacaacctttgactttcatccaatccccagcttctctttcccccgtacatctcttcacgtccttggctgtgattccgcacactgacctcggacacacagctactgcacggagagagggagggagatctggcaagggctccggcagtgcctctcctctccatggcgcagttcgtatttacacacggcccttggcgaacgtcctttcaacgcagttgcccataggccctgggacaggaaggcccagatcagggtcccagcagggcctccctcaggccacaacgctggctgtgccttcacaggagtcagagcatttccagccagtctcaggcgcggggcatgctgggaccaggggcaccaccccttgctccccttccttcactcagcaaagccacaaataatttactctttaaataccaagacacttagctattgttcatttgctcccaggtgaaagaaccttctttaaatatgtcgtgtttattttcttaaataaaaacaaagcagaaaaccccaccattaacaagaggacactgcagaggcttatgtacaacacgtgtcccgcgaggctggcgcaggactgccactcactccaaaatttctttggagcagagagacagatcgtccagataacaacttttacactcagcaagccagacacaaaaaagaccacctgaaaaaaaatatgttttgaaaatctgcatttaaaaaagaatactcaactgcatttgaaattttctggatttttttctgcgaaacaccacgagatttggccaaaaaaaaaaaaaaaccaaaaaacaaaacaaaaaaaaaatgtcagagaaggaaaaccaggttttgatttataaaacatcagactagtagaagaaaagctggaatcccagctggcctagtttgaaataaatcgtgccactcgttttgttgtattggtttttgctgcatattttgaagctgttttttaaaaagagctgtgagtggctggaggtctggttagtgctgtcacccggctcctaaggtcccaggtccagaatgaaagtggtgctgagcagctgtgtgcaggccagcagggaaggtgcacagaccctgcactggtcctccctcttggtcagcggcaaggtccctaggccagagctcgggcagcgagctggccctcctccaggcgacaggggtgcagttggcctaccttgcctcagccctg

SEQ ID NO: 277481 - DNA, 790 bp, Homo sapiens
ggcgccgcggacgctgctggagtcgcctggcaacgatgtcgcctggcaactgaataggttggccagtggcgcgggctactggaagcagaaagggctgcggaggcagtgagtggtttctgcagagcttcatttggaaaggcctctgtagttggggaaagatggcccattcccagaactccttggagcttcccattaacatcaatgccacccagattaccactgcctatggccatcgggccctgcccaagctgaaggaggagctgcagtcagaggacctccagacgaggcagaaagccctcatggccctgtgtgacctcatgcatgaccccgagtgtatctacaaggccatgaacataggctgtatggagaacctgaaagctttgctgaaggatagcaacagtatggtgcgcataaagaccaccgaggtgctccacatcacggcaagccatagcgtgggcagtagtgacaggaagggggaatgaggatagcagccctgggcttggcatcttgtcaccttgaggagttaatttgcatgacatcccacggacaagagagcttcctggcagcctgttccctgccctcttgcttgcctctggtgaggaggcacacaggcaaacacaactgactatcaaagcatgagagacatggagtgggtgactagacacggaccaaggaagcccccgtggtcagggaagacccctgcaacttgtgtgtccaacggtgactttctttttccagacgattcaaaacacaccataagtgaaaataaataaataaataaaataaataa

SEQ ID NO: 277482 - DNA, 1252 bp, Homo sapiens
ggcgccgcggacgctgctggagtcgcctggcaacgatgtcgcctggcaactgaataggttggccagtggcgcgggctactggaagcagaaagggctgcggaggcagtgagtggtttctgcagagcttcatttggaaaggcctctgtagttggggaaagatggcccattcccagaactccttggagcttcccattaacatcaatgccacccagattaccactgcctatggccatcgggccctgcccaagctgaaggaggagctgcagtcagaggacctccagacgaggcagaaagccctcatggccctgtgtgacctcatgcatgaccccgagtgtatctacaaggccatgaacataggctgtatggagaacctgaaagctttgctgaaggatagcaacagtatggtgcgcataaagaccaccgaggtgctccacatcacggcaagccatagcgtgggcagatacgcctttctagagcacgacatcgtccttgccctgtccttcctgctgaatgaccccagcccagtctgccgggggaacctgtacaaggcatacatgcagctggtccaggtgcctagaggggcccaagagatcatcagcaaaggtctgatttcctcactggtatggaagctgcaggtggaggtggaggaggaggagttccaggagttcatcctggacacactggtcctctgcctgcaggaggatgccaccgaggccctgggcagcaatgtggtgcttgtcctgaagcagaagctcctcagcgccaaccagaacatccgcagcaaggccgcccgtgcgctccttaatgtcagcatatctcgagagggcaagaaacaggtgtgtcattttgacgtcatccccatcctggtccatctgctgaaagacccagtggagcatgtgaagtctaacgctgccggtgccctgatgttcgccacagtgatcactgaagggaagtatgcggccctggaggcacaagccatcggcctgctcctggagctgctgcactcccccatgaccatagcgcgcctgaatgccaccaaggcccttaccatgctggcagaggcccccgagggccgcaaggccctgcagacgcacgtgcccactttccgtgccatggaggtggagacttacgaaaagcctcaagtggccgaagccttacagcgggcagcccggatcgccatcagtgtcatcgagttcaaaccctgagcccttcattcacctctgtgagtgaataaatgtgctaagtctcttta

SEQ ID NO: 277483 - DNA, 1273 bp, Homo sapiens
ggcgccgcggacgctgctggagtcgcctggcaacgatgtcgcctggcaactgaataggttggccagtggcgcgggctactggaagcagaaagggctgcggaggcagtgagtggtttctgcagagcttcatttggaaaggcctctgtagttggggaaagatggcccattcccagaactccttggagcttcccattaacatcaatgccacccagattaccactgcctatggccatcgggccctgcccaagctgaaggaggagctgcagtcagaggacctccagacgaggcagaaagccctcatggccctgtgtgacctcatgcatgaccccgagtgtatctacaaggccatgaacataggctgtatggagaacctgaaagctttgctgaaggatagcaacagtatggtgcgcataaagaccaccgaggtgctccacatcacggcaagccatagcgtgggcagatacgcctttctagagcacgacatcgtccttgccctgtccttcctgctgaatgaccccagcccagtctgccgggggaacctgtacaaggcatacatgcagctggtccaggtgcctagagcagaaaaccccaccattaacaagaggacactgcagaggcttatgtacaacacgtgtcccgcgaggctggcgcaggactgccactcactccaaaatttctttggagcagagagacagatcgtccagataacaacttttacactcagcaagccagacacaaaaaagaccacctgaaaaaaaatatgttttgaaaatctgcatttaaaaaagaatactcaactgcatttgaaattttctggatttttttctgcgaaacaccacgagatttggccaaaaaaaaaaaaaaaccaaaaaacaaaacaaaaaaaaaatgtcagagaaggaaaaccaggttttgatttataaaacatcagactagtagaagaaaagctggaatcccagctggcctagtttgaaataaatcgtgccactcgttttgttgtattggtttttgctgcatattttgaagctgttttttaaaaagagctgtgagtggctggaggtctggttagtgctgtcacccggctcctaaggtcccaggtccagaatgaaagtggtgctgagcagctgtgtgcaggccagcagggaaggtgcacagaccctgcactggtcctccctcttggtcagcggcaaggtccctaggccagagctcgggcagcgagctggccctcctccaggcgacaggggtgcagttggcctaccttgcctcagccctg

SEQ ID NO: 277484 - DNA, 1971 bp, Homo sapiens
gggattccaactcgggactccccgcttctggggagaccggtgaggcccccgcgacatggccctcccatccccaagcctctcgtgcagatctccgctctgtgggacttgattgcgggctgcgggcccgtggctcctgcaggcagagagaggacgggagaggagacggctacgaggcttggccgcaggtagctacggtgctcccccaacaaggaaccggaaaccctcttcgtttgttgatctaaatatacaaaaataaaactagttgctgggttctcagacggagtctctgcggcattaggaggcccacccttattttctcttttcttcacgcaggaatcaggtccctggcctgggggcggcaaaaggagatggcggtgggtcaagtgggcgcgcaggctcagacctggggcttctgagcccacgcccaggcatctcggacctctcacttctgaggccacctcctgccctttagaatgaagggctggcacagttctgccaggatgcacgtttagcgacttctgtcagactgaagcatcccctctccgcaagcgcctgaagtgtgagaggcactgttctaagtgctttaatttgcacttgtttaatcctcacaggagtcaacttgaatgggcacacttattcccactttacagaagaggaaactggggcacagaaagactgagtaattgctcagggggcatgctccaagaaagagggagagacaggatttggacccagacaggctggctccctagtgctctggactttggtgtggatgatccaactcaagccttctcctttttccctcctatgtgatcttgcatgcgtttgtgcagagaatgagaaggcagatcaaagttacagatgctgcgagaacatcgccaagcagaatcttgggtgctgtccccacctctctgtacctgctccctcccagagaagccagcctccacttgctgtcccgggccttctctatctgagaaaagttgaaggagcacatgtccttgcgcaggaagaggctgttcagcgtgaccgccccgatcaagaagaagagctgcttcaccgcctgcctcacaagctcggggtccaggccgttctggcacatggtggtgtaaaagtagctcagctgttgcaggacggaggtcatggtgtagccgtccgtgtcgtctatgctagaggagcgcttccggaagcctgtgggcttcaggccggaaatgccctgcaggctctcatactccagcattcccggaactgcggagagacagggaggctgtgctgacacgccaggagacacacgcggaacgttcccgacgctcttcggtttgtttcaggagatgggacatttttctacaagagtcagtggatgtacttatgatagagaaagcaaaagaatcaagggtttgggacaccagggtgtgtgtcagggttagggatggacggctgtttccagcggggctgcagctcctcttgtaggtttgaagcagcacgtttttcagcttcacaggaaagaaagctgcttagcatgacaaatcatggcctgggcattaaagcctaaagtatttaaatttcaggaaattaaggaaagtatacaagaattcgaatggggctttaggatttcaaaaatacttggctacgccaagaagtagaagtaccacataaatagcagtagtagaagtttccccaagttttttccttcaggataaatcatccttatataaagaaaactaccaacagcgtactattatttatggaatcattataagcaagcaaagaattaaaaggcagatatctacatgattatatttccttggctttttaaacaatgttacacataatcacacattacacataccaagtttatgttttaaaaagtcttaatgttactataaatattttttggtcatccattctcttcttacctattatcggttggatattcttttccattatgataataaattgatgatatattcgtat

SEQ ID NO: 277485 - DNA, 421 bp, Homo sapiens
gaatcctccagtgagtaaggcaagtatcactctgggctcccatggcctctgggttcctgtggcaccctctgtcctggcattatattgaaatgtgattatatagaaatgtgactgcattatattgaaattacttatttaacacatgtctaaatattgcttactctatgctaggcactgttctaagtgctctactaatatttaaccctaataacaattatttgagataagtactattattatccccagttctaggtgaggaagctggggcacagtgaagtcagtactttgttcagcgttacacagttcataatggtggagctgaggtctgaactaaggctgtagagctccaggatctgtgtgccttttacactgtgggtatccctcccccgctggctagccagttcctcaagggcaggggcca

SEQ ID NO: 277486 - DNA, 494 bp, Homo sapiens
gctttcatgtttgaagaagagtttattgtgacttcaaacataagctgtaactggtaataagcgacagctatggaattatacaaggcaatccaatcaaacaacatggagcacactgaagcgcaaacatcaaattttacctttttcctcctaaaaactttattccctaattacatccattactttctttctttgtttctttctttttttttttttcttttgagacagagtctggttctgtagcccaggctggagtgcggtggtgtgatctcagcccactgcaacctccacttcccgggttcaagcaattctcctacctcagcctccaaagtagctaggattacaggtgtgcaccaccacccctggctaatttttctatttttagtagaggcgaactttcaccatgttggccaggctggtgtctgtaatctcagctactcgggaggctgaggcaggagaattgctggaacccgggaggcagaggtggcagtgagccg

SEQ ID NO: 277487 - DNA, 412 bp, Homo sapiens
ggcacgagggaggggaagaggcttagatattttctgtagtggaagaggtgtctcatcaaagtagtaggttcccaattagagcatcctcctaggcagtggtgcccattagcatgatttggtaggattctttttatttatttttttgctactgataacttagccatttgccttcttgtcttaactattagggtaattcacttttctttgggaggcactggaacatagcagttgagagattaaacgctgggggagggagagcccagtggtggatccagcctgaagtcctgccctctctcatctgtctggaaaggaggtagcacctttttcgggaaacgggttagggagtaaagactgcaccctacatggtcctggtggtgggggggataacagtaaaggaatttgcaacgtttta

SEQ ID NO: 277488 - DNA, 2182 bp, Homo sapiens
gttgagtcaatgtgtccccctcttgttcctagggtgcgggcttcatggccttctcctccaggaagctccacctgatcatgtcctgggtggatatccagcccccatagttcagggcctactagcagctgctagatcttgaactccaggagcgccccacgccttgggagcttggcatgggctaaatactcccccatttgttaaatggggtcctgaaacctgaccagggaagacgggataaagtagccatgggtcatcgcagcccctttgaagccgggcctggccacccaaaggcaactcaggggtggagactgaggcctcaggagaagcccccactagaatgctctctgcccctcccttccagattaaccaaaacctgctaattgtggaagccctcggcatgctcccctcccccacagcctcttcctcccttccctcccctcccccttccatccgaatgataaaggccccagcccgcctgccccagcccggcctcaggtcccggccctgccttctacactgccccaccgccctgcaccctccacccggccaggcccctgcccacgctgtctaccgtcccgcatggggccctgcagcggctcccgcctggggcccccagaggcagagtcgccctcccagccccctaagaggaggaagaagaggtacctgcgacatgacaagcccccctacacctacttggccatgatcgccttggtgattcaggccgctccctcccgcagactgaagctggcccagatcatccgtcaggtccaggccgtgttccccttcttcagggaagactacgagggctggaaagactccattcgccacaacctttcctccaaccgatgcttccgcaaggtgcccaaggaccctgcaaagccccaggccaagggcaacttctgggcggtcgacgtgagcctgatcccagctgaggcgctccggctgcagaacaccgccctgtgccggcgctggcagaacggaggtgcgcgtggagccttcgccaaggacctgggcccctacgtgctgcacggccggccataccggccgcccagtcccccgccaccacccagtgagggcttcagcatcaagtccctgctaggagggtccggggagggggcaccctggccggggctagctccacagagcagcccagttcctgcaggcacagggaacagtggggaggaggcggtgcccaccccaccccttccctcttctgagaggcctctgtggcccctctgcccccttcctggccccacgagagtggagggggagactgtgcaggggggagccatcgggccctcaaccctctccccagagcctagggcctggcctctccacttactgcagggcaccgcagttcctgggggacggtccagcgggggacacagggcctccctctgggggcagctgcccacctcctacttgcctatctacactcccaatgtggtaatgcccttggcaccaccacccacctcctgtccccagtgtccgtcaaccagccctgcctactggggggtggcccctgaaacccgagggcccccagggctgctctgcgatctagacgccctcttccaaggggtgccacccaacaaaagcatctacgacgtttgggtcagccaccctcgggacctggcggcccctggcccaggctggctgctctcctggtgcagcctgtgaggctcttaagacaggggccgctcctccctcccgctcccacccccaccttgttgacagggagccaaggcgaggcggctgtctgcgaccacagcagcctcgaaacaccaggcagcagccttgctgggagtccacggtgtttattgggccaccccacgcatggccgtggcccagctgggcacaaccctcaccctggtctgtcatgcctgtttttcctacactcagcggcaaagctgcaggagcagggctgagcctggaatagcccttcctagtcccctcttctcagcccactacccatccatcagtcaccagccgtcacctcccctcccgtgctccaggctgggggagggagagcccagtggtggatccagcctgaagtcctgccctctctcatctgtctggaaaggaggtagcacctttttcgggaaacgggttagggagtaaagactgcaccctacatggtcctggtggtgggggggataacagtaaaggaatttgcaacgtttta

SEQ ID NO: 277489 - DNA, 1447 bp, Homo sapiens
gttgagtcaatgtgtccccctcttgttcctagggtgcgggcttcatggccttctcctccaggaagctccacctgatcatgtcctgggtggatatccagcccccatagttcagggcctactagcagctgctagatcttgaactccaggagcgccccacgccttgggagcttggcatgggctaaatactcccccatttgttaaatggggtcctgaaacctgaccagggaagacgggataaagtagccatgggtcatcgcagcccctttgaagccgggcctggccacccaaaggcaactcaggggtggagactgaggcctcaggagaagcccccactagaatgctctctgcccctcccttccagattaaccaaaacctgctaattgtggaagccctcggcatgctcccctcccccacagcctcttcctcccttccctcccctcccccttccatccgaatgataaaggccccagcccgcctgccccagcccggcctcaggtcccggccctgccttctacactgccccaccgccctgcaccctccacccggccaggcccctgcccacgctgtctaccgtcccgcatggggccctgcagcggctcccgcctggggcccccagaggcagagtcgccctcccagccccctaagaggaggaagaagaggtacctgcgacatgacaagcccccctacacctacttggccatgatcgccttggtgattcaggccgctccctcccgcagactgaagctggcccagatcatccgtcaggtccaggccgtgttccccttcttcagggaagactacgagggctggaaagactccattcgccacaacctttcctccaaccgatgcttccgcaaggtgcccaaggaccctgcaaagccccaggccaagggcaacttctgggcggtcgacgtgagcctgatcccagctgaggcgctccggctgcagaacaccgccctgtgccggcgctggcagaacggaggtgcgcgtggagccttcgccaaggacctgggcccctacgtgctgcacggccggccataccggccgcccagtcccccgccaccacccagtgagggcttcagcatcaagtccctgctaggagggtccggggagggggcaccctggccggggctagctccacagagcagcccagttcctgcaggcacagggaacagtggggaggaggcggtgcccaccccaccccttccctcttctgagaggcctctgtggcccctctgcccccttcctggccccacgagagtggagggggagactgtgctgggggagggagagcccagtggtggatccagcctgaagtcctgccctctctcatctgtctggaaaggaggtagcacctttttcgggaaacgggttagggagtaaagactgcaccctacatggtcctggtggtgggggggataacagtaaaggaatttgcaacgtttta

SEQ ID NO: 277490 - DNA, 663 bp, Homo sapiens
ggcacgagggaggggaagaggcttagatattttctgtagtggaagaggtgtctcatcaaagtagtaggttcccaattagagcatcctcctaggcagtggtgcccattagcatgatttggtaggattctttttatttatttttttgctactgataacttagccatttgccttcttgtcttaactattagggtaattcacttttctttgggaggcactggaacatagcagttgagagattaaacgctgggggagggagagcccagtggtggatccagcctgaagtcctgccctctctcatctgtctggaaaggaggtagcacctttttcgggaaacgggttagggagtaaagactgcaccctacatggtcctggtggtgggggggataacagtaaaggaatttgcaacgttttaatgccatgcctgatttttgggtcaggagtggtgacttgggtaaccacttggcgggggggcctgggattccctgctgtgtgccgtgataacagcaaatggtgataaggagaaagccaagacctgtggcctgatgcagggctggcggccaggccggtcagctcggtccacagctctggcgcgggcaggtctgggcgccggcgaccccggggcttgcgggctctctagggagggggcaggggcgcccctgagga

SEQ ID NO: 277491 - DNA, 2433 bp, Homo sapiens
gttgagtcaatgtgtccccctcttgttcctagggtgcgggcttcatggccttctcctccaggaagctccacctgatcatgtcctgggtggatatccagcccccatagttcagggcctactagcagctgctagatcttgaactccaggagcgccccacgccttgggagcttggcatgggctaaatactcccccatttgttaaatggggtcctgaaacctgaccagggaagacgggataaagtagccatgggtcatcgcagcccctttgaagccgggcctggccacccaaaggcaactcaggggtggagactgaggcctcaggagaagcccccactagaatgctctctgcccctcccttccagattaaccaaaacctgctaattgtggaagccctcggcatgctcccctcccccacagcctcttcctcccttccctcccctcccccttccatccgaatgataaaggccccagcccgcctgccccagcccggcctcaggtcccggccctgccttctacactgccccaccgccctgcaccctccacccggccaggcccctgcccacgctgtctaccgtcccgcatggggccctgcagcggctcccgcctggggcccccagaggcagagtcgccctcccagccccctaagaggaggaagaagaggtacctgcgacatgacaagcccccctacacctacttggccatgatcgccttggtgattcaggccgctccctcccgcagactgaagctggcccagatcatccgtcaggtccaggccgtgttccccttcttcagggaagactacgagggctggaaagactccattcgccacaacctttcctccaaccgatgcttccgcaaggtgcccaaggaccctgcaaagccccaggccaagggcaacttctgggcggtcgacgtgagcctgatcccagctgaggcgctccggctgcagaacaccgccctgtgccggcgctggcagaacggaggtgcgcgtggagccttcgccaaggacctgggcccctacgtgctgcacggccggccataccggccgcccagtcccccgccaccacccagtgagggcttcagcatcaagtccctgctaggagggtccggggagggggcaccctggccggggctagctccacagagcagcccagttcctgcaggcacagggaacagtggggaggaggcggtgcccaccccaccccttccctcttctgagaggcctctgtggcccctctgcccccttcctggccccacgagagtggagggggagactgtgcaggggggagccatcgggccctcaaccctctccccagagcctagggcctggcctctccacttactgcagggcaccgcagttcctgggggacggtccagcgggggacacagggcctccctctgggggcagctgcccacctcctacttgcctatctacactcccaatgtggtaatgcccttggcaccaccacccacctcctgtccccagtgtccgtcaaccagccctgcctactggggggtggcccctgaaacccgagggcccccagggctgctctgcgatctagacgccctcttccaaggggtgccacccaacaaaagcatctacgacgtttgggtcagccaccctcgggacctggcggcccctggcccaggctggctgctctcctggtgcagcctgtgaggctcttaagacaggggccgctcctccctcccgctcccacccccaccttgttgacagggagccaaggcgaggcggctgtctgcgaccacagcagcctcgaaacaccaggcagcagccttgctgggagtccacggtgtttattgggccaccccacgcatggccgtggcccagctgggcacaaccctcaccctggtctgtcatgcctgtttttcctacactcagcggcaaagctgcaggagcagggctgagcctggaatagcccttcctagtcccctcttctcagcccactacccatccatcagtcaccagccgtcacctcccctcccgtgctccaggctgggggagggagagcccagtggtggatccagcctgaagtcctgccctctctcatctgtctggaaaggaggtagcacctttttcgggaaacgggttagggagtaaagactgcaccctacatggtcctggtggtgggggggataacagtaaaggaatttgcaacgttttaatgccatgcctgatttttgggtcaggagtggtgacttgggtaaccacttggcgggggggcctgggattccctgctgtgtgccgtgataacagcaaatggtgataaggagaaagccaagacctgtggcctgatgcagggctggcggccaggccggtcagctcggtccacagctctggcgcgggcaggtctgggcgccggcgaccccggggcttgcgggctctctagggagggggcaggggcgcccctgagga

SEQ ID NO: 277492 - DNA, 514 bp, Homo sapiens
aatgctcttcaccagggaggacacgaaggatccctcagccccactgagcacagacaccaggtttccagagggccgcttctggcaggccagctttgagggcaacaaagagaatgagagggagcctgagacctgctgagggagggcagggcaaagaaaagtgttcgctcatcctgctgagattcaaggagagtcacccctggctagaagctacaatcatccaagtgggaagtaatgtctaccgatgttctgatttaagtgaatgaaggtcttctttccacctcgggaaatcttgagggttatgtaacagcagctttgaaaggcttgtgagatgtactttgtgctagtccatctcaaatcttcaccggctgtaccaagaacagaaaaaaaaaggaatttggtgagtactttataaagctaaatttactcaattaatttcacctctgattatgtttttcatgtatcttgggacattagaatgtcctgtatttataaatgatgatgaggatagagagta

SEQ ID NO: 277493 - DNA, 487 bp, Homo sapiens
aactgttgaacctcctgtttggtggcatattattttgatttttggtgactttttcttggaataagtcaacaaatattaaccaagtgcctaccacatgccaagcgctgctctaggtatacagtggtgagcaaagttgggttgagtttttcaatagaaaatccatgtttgggtaatttaagcttaaaatatcatgcaaacaggctggatgcattggctcacacctgtaatcctagtactttgggaggccgaggcagacagatcacttgaggtcaggagttcaagactagcctggccaacatggcgaaacactgtctctactaaaaaaatacaaaaattagccggacgtggtggcgggcgcctgtaatcccagctacccgggaggctgagggatgagaatcgcttgaacccaggagtcggaggttgcagtgagccgagatcccgccactgcactccagtatgggcaacagaatgagactccatctcaaaa

SEQ ID NO: 277494 - DNA, 610 bp, Homo sapiens
ttccagtgattctcctgcctcagcctcctgagtagctgggattacaggcgccagccaccatgcccggctagtttttgtgtttttagtagagacgggatttcaccatgttgcccaggctggtctcaaactcctgatctcaggctcaagctaccttcttgatgaaaaattctggacgtgttctgaaaatcacagtcatccctaacttcagtggaaaagattcatattgtccagctgaacaaggattgatacttaaaaccagggatttcctaaaatgaaaatgtttctgtggataaaactgattacatgcagagactggaatggagttaattctgggtagatatgggattcaagagattggtcttcatgaggcatttatcaaggatctgcaagggatttagaggtgacggaagcacagtccttcctgggcagttgcctctagcctggtgggaggtgttcctcacacccaggactctcatccatggcaaaataaaaagtgagatatcgactgggcatggtggctcatgcctgtaatcccagcactttgggaggtcgaggcgggtggatcacctaggccaggagttcgagaccagcctggccaacatgacgaaac

SEQ ID NO: 277495 - DNA, 448 bp, Homo sapiens
ggtgggttcttggtctcactgacttcaagaatgaagctgcggaccctcgctatgatgatatggaagaaaagcactctttggcctgttgtgactgggacagttgacagcacccaggtgtcctttaatgaaaatgctcttgacaccaatgcatcctagcatcacagcttcaggaagccttctcaagtgtgcatggggagtactatgtctttcatcaataatgaaatcttctgatttgtaagacatgctgccaagagatgtgccattctattataaaagatcagtagcttcctttaccgacgtgtatattctatctagaacattgagctatggaagactcccacctaagggaattagttttacaccttcagataaagactgctgagaagagcaccctctggtgttgtcacagaggcaagtgctaccgcacaggcatgctgcagtgaattta

SEQ ID NO: 277496 - DNA, 1110 bp, Homo sapiens
gatctgtaactgtgaatatcatactacgttggttttatttatctgtatgttgttaaattgaaacataacatatgtggtagattcattaaaaaactgaatgcatttattttcttccctgtacctatgccctcttgcaatgtgacttctcacttttcccgtaaagaagtggaatctattttccttcttcttgaatttggaatgcttttggccaagagaaagaggtggaagtgatggtgtaacagttccaagtctaggcctcaagttgcctgtggacttccactcagactctcagagccctgctggaggatggagagaccacatggaacagagaagggttatcccaccgaggccaccatagaccagccagccctcagcgtacatgccagctaattacagatgcaggagcaaacccctggcccatacatcagtgagtagattagcatagatgctcagcaaactcagactcattaggcaaaaagaaatgtttactgtccattaccactaaggttgtctcgttgttaaagagcattatcagtgtcaatagacaactgataaagcatatataaagaaaagagaacaattttttttgtttgtttgttagatggagtttcgctctttcgcccaggctagagggaagtggtgcgatctcggctcactgcaacctctgtcccccaagttcaagcgattctcctgcctcagcctcccgagtagctgggattacaggcatgtgccaccacgcctggctaatttttgtatatttagtagagatgcgttttcaccatgttggccaggttggtcttgaactcctgacctcagatgatccacccgcctcggcctcccaaagtgctgggattacaggcatgagccaccgtgcctggtccaagaacaaattttaagtgtatatagagctcaatgaattatcacaaagtaaacatatatgttaaactagcacctggatcaagaaacagaacattaattgtattccagaaacacctgtgctatcttccaaccactatcccttcccaccaaggttaactactatctcaaccttttatactatagattagttttttccacctccactaaatcatgtcattatatgacttagcc

SEQ ID NO: 277497 - DNA, 1046 bp, Homo sapiens
aaggtctggccatcttctaaagagtttgaacctactgaagaactatcttgactgtcttgatgagggagctgaagaaatccttcactggagtctgagcggaagtggaatctattttccttcttcttgaatttggaatgcttttggccaagagaaagaggtggaagtgatggtgtaacagttccaagtctaggcctcaagttgcctgtggacttccactcagactctcagagccctgctggaggatggagagaccacatggaacagagaagggttatcccaccgaggccaccatagaccagccagccctcagcgtacatgccagctaattacagatgcaggagcaaacccctggcccatacatcagtgagtagattagcatagatgctcagcaaactcagactcattaggcaaaaagaaatgtttactgtccattaccactaaggttgtctcgttgttaaagagcattatcagtgtcaatagacaactgataaagcatatataaagaaaagagaacaattttttttgtttgtttgttagatggagtttcgctctttcgcccaggctagagggaagtggtgcgatctcggctcactgcaacctctgtcccccaagttcaagcgattctcctgcctcagcctcccgagtagctgggattacaggcatgtgccaccacgcctggctaatttttgtatatttagtagagatgcgttttcaccatgttggccaggttggtcttgaactcctgacctcagatgatccacccgcctcggcctcccaaagtgctgggattacaggcatgagccaccgtgcctggtccaagaacaaattttaagtgtatatagagctcaatgaattatcacaaagtaaacatatatgttaaactagcacctggatcaagaaacagaacattaattgtattccagaaacacctgtgctatcttccaaccactatcccttcccaccaaggttaactactatctcaaccttttatactatagattagttttttccacctccactaaatcatgtcattatatgacttagcc

SEQ ID NO: 277498 - DNA, 656 bp, Homo sapiens
aaggtctggccatcttctaaagagtttgaacctactgaagaactatcttgactgtcttgatgagggagctgaagaaatccttcactggagtctgagcggaagtggaatctattttccttcttcttgaatttggaatgcttttggccaagagaaagaggtggaagtgatggtgtaacagttccaagtctaggcctcaagttgcctgtggacttccactcagactctcagagccctgctggaggatggagagaccacatggaacagagaagggttatcccaccgaggccaccatagaccagccagccctcagcgtacatgccagctaattacagatgcaggagcaaacccctggcccatacatcagattttggaagcattgccttctacagaatccacagtagtccgaagctcttctacggtttttgtcaaactttgattttccatctctagcttcaataatctacttgatgtcaactcattcacctcatggcccagggatttctggggtgctataatattgaaaaatacaccattgtatttactctttactgtttttactatgtttactctttactatttaaaaagttgagtgtatatgcattgcatcatctgatccttaactttattaaaaattcaatgaggttatataagataaa

SEQ ID NO: 277499 - DNA, 773 bp, Homo sapiens
tccctagacagggattgggagacatgcaagttgcttggcttcctattaccttgtgttgaaaacacaataggctttgggatcaggagttcattccagttattttaatgttatttactagcagtgtgccctcgtgcacattatcaaactcctctgactcttggaatcctcatttttcaataataactcacaaagctgtcaagcctaagggttctaacagctcgaacagcacctggaacagaagcaatagccgccactcagaggttacttcttccttctccgccttctctggatcacctccctacctcatcctcaatctaacgctggaaatattggatatggggttcttcaatctcaaataaatcatctgtagagtcccctccagttccgaaattctctctatgtcttggagtgtgtggaatagccaggaaaccagcccaggagctttgactcccagccattctacaatgtactgaagatacagcagtaaacagagtggacatggtctccccactatggagcatatttgatgaagaccgatgttaccatacgctataaaaccagagatgccctgcccagtaaggaggaatctagagaagcagtctgtccacagccactttgccacactgtgctcctctgggaggacatttcccttcttcgccatgagtggggattgcagcaacttgttctggcccctgtgcatggctcagcactagcaggacaggaggtagcctcagcggagccctagagaacatcagaagaggcggcgaagcccc

SEQ ID NO: 277500 - DNA, 628 bp, Homo sapiens
cagtggacacagcccgtggtccccgaagccgaaggttgattggagctcttccagggcttccttcctgggccatggacccctctgaggccattcgcctctgttccagtttggctctcctggacccctctggatggctaggttgttcctcctcagtctgcattgattggagctgggaccgaagcccccattccagaaaccggaccaggagataggcaaacaagaagaagccacccaatgtgagaaagaaataagcaacgggggtgatgtccgtctttatgcccagcaaagccagccccagtaggaaggaggcgcagcacaggaggagaagcggcttctccagtctccccagttcttcaatctcaaataaatcatctgtagagtcccctccagttccgaaattctctctatgtcttggagtgtgtggaatagccaggaaaccagcccaggagctttgactcccagccattctgcaccttaagcaaaaaggaagttagccacacatggtggctcatgactgtagtctcagctacatgggaggcaaggcgagaggatctcttgagcccaggagttcgaggccagcctaggcaatgtagtaagaccctgttcttaaatttttttaaaaagcaat

SEQ ID NO: 277501 - DNA, 723 bp, Homo sapiens
gcagtggacacagcccgtggtccccgaagccgaaggttgattggagctcttccagggcttccttcctgggccatggacccctctgaggccattcgcctctgttccagtttggctctcctggacccctctggatggctaggttgttcctcctcaggtgctgggggtatcacaacagtgctgtaggggggtggttggtccaactcttgggggcggcactgggattctagtcccaccacggcctcttcatagactggcacttcaaaggcttcattgtccctgagggaagagaaataaggccattggtggcttccatgaaagaagccctttttcccttttttttgtctgctgtgggcaaaagatcctctgttggcctctgacccctcctcccgctgatgccaatgacaggaaaccagagactctctgcctcagagactacagggagagagggaggatgggcccaaggtgtattcctcttacgatgcccacccttaactcaccgtgcattgcctgagggccctgggctctcagtctgcattgattggagctgggaccgaagcccccattccagaaaccggaccaggagataggcaaacaagaagaagccacccaatgtgagaaagaaataagcaacgggggtgatgtccgtctttatgcccagcaaagccagccccagtaggaaggaggcgcagcacaggaggagaagcggcttctccagtctcccca

SEQ ID NO: 277502 - DNA, 400 bp, Homo sapiens
accttttcagagtttccctttaagcactacttttgcctcatcctacaaattttgctcatccagcgctcacagctgtctgtgtctggaaaaggccaaagagaaaccctctcaccgcgtgtacaaccggcccacaggaggtgcttcaaggagcatgtgacaccaggctgctcctgagggcccgcaggaggacactaaagtcaacaactccctgaagtcaacaactcctgtcctagagccagacacccctgcagccccctggcaccatcagaagtggatggccgttctcacgtcccttgaacttgggaacttcattattcacaagacttcctccaaatgccccactttatattatgaaattttcagacacacagaaaagtagagaatattcttatacaatgac

SEQ ID NO: 277503 - DNA, 757 bp, Homo sapiens
aaggagctctgcagatggcgagggcggcttcacaaggcagtcccctgggcgtggcacacgcccctagcgtaatgtatgagaaatactcatgtggtatatacaaatatacacgaccgcagctatgaaggtctcggcgccagtcggcacgtcagtgcagcacgtgtgtgctccagaaccagaggcagcgtcctccacctcatcccagtctctttaatattccctggcctcttggaactgcttgatgtagtcctcgtccgaggggctctctgtgcacttctgtccgttgttgggaggccgggcctcgttatacctgctccagtcacccttgcagataatccagggcaggacgtccaccttgtagtggagctccgcggagaactcggtgctgatgaggttgggcgtgcccgcccccttgcccctggtgatgagctgcatgttgtcgccgtagcagcagtgctgtgccgccagcgtggtgctctccagggacagcatggagcggatgcagtaccgggcagtgggcttgtagatctccagcttctccttgggcccgctggcgtccttccagcggaagtccttgcgcttgatgcggtcgaagatgtcggccgtgctgtaggccacctcagtggggtaggagcaggggcagctgggcaggtcattcatcaccttgtgcatgtacttctttaagaactcgcttttgcagctcatccagcgctcacagctgtctgtgtcaacttcaaacagtttggtggcattaaac

SEQ ID NO: 277504 - DNA, 444 bp, Homo sapiens
gggaccggcaggctcttgcaaagggctggcgacctccagctgagaccggcggtgttattcccacaccagcataggcccgccatcagacctaaaaagtctaagggtcgccttctagcctggggtttcaactcccagccaagacttccttacagaatgcccaccagaacggctgtgcagacaacaccagccctctggactagagaggagctaccttcctagctgccactgtgacagctggccctggaccctggaagggcagaccaacccacagtcaggaggtcctggcccggccccggccccggcaccagcacccaaaggcaaaaaggcaactcagaaaaacagaggttaataacttgtgagttaaaataaggtacatacaaacatatttggatgtaaacatttgttttaatttatattaataaaaggaaatgctctacttaaaca

SEQ ID NO: 277505 - DNA, 345 bp, Homo sapiens
agagaactgagcatgtcactgttgtttaaaacccctcagtgaccccttctgcatatggcaatgatttcccaaccatattctgccttacaggtgggagggcagggccaatgggatgggatactggtcccccacacctgttgcaatcagagcaatctccttttttaggttttatagaagtggtcgcagagcacctgaaacacacaggcaaggctcccctggtcgggttctgctaacctttctggccccacaggctgcctttctttgtcgtacctcctgtgtctggctctgtcactccttcagtgaagccttcagagagccctcacctgtcgccaacagtcttccctc

SEQ ID NO: 277506 - DNA, 2018 bp, Homo sapiens
ggcacgagggccggctgagctgagtctcgctgctcggtgcgaggcggcggagagcgaggcctggtgagcaccgccgaggcgcgggccagctcttcgaggttgtgcgcgggagtggcacggcgggcgggcgagcgaggggctaacttcagcggtggcaccgggatcggttgccttgagcctgaaatcatgaccaccccaggaaaagagaactttcgcctgaaaagttacaagaacaaatctctgaatcccgatgagatgcgcaggaggagggaggaagaaggactgcagttacgaaagcagaaaagagaagagcagttattcaagcggagaaatgttgctacagcagaagaagaaacagaagaagaagttatgtcagatggaggctttcatgaggctcagattaataacatggagatggcaccaggtggtgtcatcacttctgacatgattgaaatgatattttccaaaagcccagagcaacagctttcagcaacacagaaattcaggaagctgctttcaaaagaacctaaccctcctattgatgaagttatcagcacaccaggagtagtggccaggtttgtggagttcctcaaacgaaaagagaattgtacactgcagtttgaatcagcttgggtactgacaaatattgcttcaggaaattctcttcagacccgaattgtgattcaggcaggagctgtgcccatcttcatagagttgctcagctcagagtttgaagatgtccaggaacaggcagtctgggctcttggcaacattgctggagatagtaccatgtgcagggactatgtcttagactgcaatatccttccccctcttttgcagttattttcaaagcaaaaccgcctgaccatgacccggaatgcagtatgggctttgtctaatctctgtagagggaaaagtccacctccagaatttgcaaaggtttctccatgtctgaatgtgctttcctggttgctgtttgtcagtgacactgatgtactggctgatgcctgctgggccctctcatatctatcagatggacccaatgataaaattcaagcggtcatcgatgcgggagtatgtaggagacttgtggaactgctgatgcataatgattataaagtggtttctcctgctttgcgagctgtgggaaacattgtcacaggggatgatattcagacacaggtaattctgaattgctcagctctgcagagtttattgcatttgctgagtagcccaaaggaatctatcaaaaaggaagcatgttggacgatatctaatattacagctggaaatagggcacagatccagactgtgatagatgccaacattttcccagccctcattagtattttacaaactgctgaatttcggacaagaaaagaagcagcttgggccatcacaaatgcaacttctggaggatcagctgaacagatcaagtacctagtagaactgggttgtatcaagccgctctgtgatctcctcacggtcatggactctaagattgtacaggttgccctaaatggcttggaaaatatcctgaggcttggagaacaggaagccaaaaggaatggcactggcattaacccttactgtgctttgattgaagaagcttatggtctggataaaattgagttcttacagagtcatgaaaaccaggagatctaccaaaaggcctttgatcttattgagcattacttcgggaccgaagatgaagacagcagcattgcaccccaggttgaccttaaccagcagcagtacatcttccaacagtgtgaggctcctatggaaggtttccagctttgaagcaatactctgctttcacgttcctgtgtcagaccaggctacccagtcgagtcctcttgtggagcccacagtcctcatggagctaacttctcaaatgttttccataatactgtttgcgctcatttgcttgccttgcgcacctgctctcttacacacatctggaaaacctccggctctctgtggtggaatacccttctaataaaagggtaaccaga

SEQ ID NO: 277507 - DNA, 305 bp, Homo sapiens
tactactactaaattcgcggccgcgtctgatgtctgtttgttattgatggcgcagccactgcaaaactagtcaactcccatctataactgttactttttctagtgctgctttgtgctgagagaacattttagtttactgcacttgacctgtaaaagactgattctttgtaattttagggataaattaggtggttaatttaaagaagaaatttcaatgttgcctttacatcacattaaaatataacttctttcagaaggataatagaagcactgattcatagtaaaaatcttgtttttagctttga

SEQ ID NO: 277508 - DNA, 523 bp, Homo sapiens
gagagagagagagagagagagagagagagagagagagagagagagagagagagagaaagtattgacacggaaggaaaggctttgaagaattactgcctcaggaagcagtgccatggatgcgaatttaacacagtctacttcttcctaaaggaatatcatcccaaggaatgtcaaaaattaaaatcaccttttaatgtactggttgttgagtgtttctgctttacctcaagtcattctgaccactctacatcctgcttcaaagtgttctgacacttagatttggaatggctctaatgattctttgtacttgaatgtggtctgtcaggccatgggtgagtgccttgcacatagtagacattcaataaatactaaatgaaggaatatgcatgcatctttgtgatgttagtaaagggtgcttgataaaagaaaattcaaaggaattcccttatgctgttacttgaaacacaggatcagacatcttaagcaaatgtctcaacgtgtattatatgcagatactattcag

SEQ ID NO: 277509 - DNA, 6982 bp, Homo sapiens
ggcacgagggccggctgagctgagtctcgctgctcggtgcgaggcggcggagagcgaggcctggtgagcaccgccgaggcgcgggccagctcttcgaggttgtgcgcgggagtggcacggcgggcgggcgagcgaggggctaacttcagcggtggcaccgggatcggttgccttgagcctgaaatcatgaccaccccaggaaaagagaactttcgcctgaaaagttacaagaacaaatctctgaatcccgatgagatgcgcaggaggagggaggaagaaggactgcagttacgaaagcagaaaagagaagagcagttattcaagcggagaaatgttgctacagcagaagaagaaacagaagaagaagttatgtcagatggaggctttcatgaggctcagattaataacatggagatggcaccaggtggtgtcatcacttctgacatgattgaaatgatattttccaaaagcccagagcaacagctttcagcaacacagaaattcaggaagctgctttcaaaagaacctaaccctcctattgatgaagttatcagcacaccaggagtagtggccaggtttgtggagttcctcaaacgaaaagagaattgtacactgcagtttgaatcagcttgggtactgacaaatattgcttcaggaaattctcttcagacccgaattgtgattcaggcaggagctgtgcccatcttcatagagttgctcagctcagagtttgaagatgtccaggaacaggcagtctgggctcttggcaacattgctggagatagtaccatgtgcagggactatgtcttagactgcaatatccttccccctcttttgcagttattttcaaagcaaaaccgcctgaccatgacccggaatgcagtatgggctttgtctaatctctgtagagggaaaagtccacctccagaatttgcaaaggtttctccatgtctgaatgtgctttcctggttgctgtttgtcagtgacactgatgtactggctgatgcctgctgggccctctcatatctatcagatggacccaatgataaaattcaagcggtcatcgatgcgggagtatgtaggagacttgtggaactgctgatgcataatgattataaagtggtttctcctgctttgcgagctgtgggaaacattgtcacaggggatgatattcagacacaggtaattctgaattgctcagctctgcagagtttattgcatttgctgagtagcccaaaggaatctatcaaaaaggaagcatgttggacgatatctaatattacagctggaaatagggcacagatccagactgtgatagatgccaacattttcccagccctcattagtattttacaaactgctgaatttcggacaagaaaagaagcagcttgggccatcacaaatgcaacttctggaggatcagctgaacagatcaagtacctagtagaactgggttgtatcaagccgctctgtgatctcctcacggtcatggactctaagattgtacaggttgccctaaatggcttggaaaatatcctgaggcttggagaacaggaagccaaaaggaatggcactggcattaacccttactgtgctttgattgaagaagcttatggtctggataaaattgagttcttacagagtcatgaaaaccaggagatctaccaaaaggcctttgatcttattgagcattacttcgggaccgaagatgaagacagcagcattgcaccccaggttgaccttaaccagcagcagtacatcttccaacagtgtgaggctcctatggaaggtttccagctttgaagcaatactctgctttcacgttcctgtgtcagaccaggctacccagtcgagtcctcttgtggagcccacagtcctcatggagctaacttctcaaatgttttccataatactgtttgcgctcatttgcttgccttgcgcacctgctctcttacacacatctggaaaacctccggctctctgtggtggaatacccttctaataaaagggtaaccagaacggcccactctcttttacggaaaaatccctaggctttggagatccgcacttacattagagttatgggaatatacacatattaatgtggctccctttttcttgtgggggaataaaagaggactcctcctcattccctttaacatgggggaaaaaactgacattaaaagatgagactaaatctttatcttgaattttacacaactacttacgacaagggagatgtttagacctgttgtgtatacttcagagtacttttcatgagttcttccacagtgaacccttggattacctggtggctttttctagccagatttgcattaatccttactgagattggatggttttctttcctctattggcgccattcttcagatattaaagttaaaccatccactccctcaccttcagccttcagtgaatgtgctttctagttgtcaggaatgctgaagaattaacactttgactcctaaatgtgatactggtttgtagattcccttagagcagaaaggagaggggcacatattaatttgtatcgcttttgcttctctttggtcttttgtgtcttagaatttggaagtggttcatttctgttgctggtatgaggatttcgaatacttagtaatcgaaaaccatatcctgtaatttaataaaaaaaactaaggacgaaaaaaccctccaattttcccaaatgcaatcagtgtaactaggggctgtgtttctgcattaaaataaatgtttcaggctttgtggtcctgatcaaggtcctcattaaaaaattggagttcaccctaggtgcttttcccctctgtgactggcagataacacatacttttgaaagtaactttgggatttttttcttaggtgcagctcgattctaatcttttcatgctgcacacgattcctttaatgtagcatccttatctgaaagaaataaccatcttctcaacatgacctgcttaacccaaataagaacagtgatcttataacctcattgtttcctaatcattttatttcatctcctgctagtactgtgccgcttccccctccccccacacaaaataaaaacagtatctgccttctggctcatttaatgatgactgcaatctgtacctgcaaatggcgcttccagtactgtgttcagtgatccacatttgtgcttggactggaatgaaaaaatacgcttaattgccaagacaactgcaaatgagttcaatacgacttctcggtgctagttggccatcttgactcaatgttgggatacactaccagagaagatttttttgttgatgtgctgttcaaagtgaattctgaaggaaaaggttgctcacctctgtttcagagcatacccttttaaacctttttagacttgtcctcttctagaattcattataaccccaaagtgtaaaaactatttggaagttgcccctgacaagctattatacatctctggtaaatcctgctgaatgtaagggatattcagagcttttcatacctcatcatgatgttatttaagcagccaacttatgtgacctgatttaaacttttaaaaaatccacttcattcaaactagaaagagtcaaagacaaaggacatttatcagccaagagtgtgacgcattcttcgcatctagtctgtagtagtgtctgtgctctgggatggataccgtctgatgtctgtttgttattgatggcgcagccactgcaaaactagtcaactcccatctataactgttactttttctagtgctgctttgtgctgagagaacattttagtttactgcacttgacctgtaaaagactgattctttgtaattttagggataaattaggtggttaatttaaagaagaaatttcaatgttgcctttacatcacattaaaatataacttctttcagaaggataatagaagcactgattcatagtaaaaatcttgtttttagctttgacttttttgtggctgttttttaaaattgtaaattactagtaacatgtcatttctataggatgttttaaattatgtaccttccattggatagttaaaataatttcattttataagccaatttgagtgggaaagatacaaagcacacagttgtctccccacattaggaagagtagtgtgcattcagacattcggaatttttgctagtagttggagatgtttcagtgagtgaattaaaacaaagtctatttaactgacgtgatctattttgtgtctaaaacagaggaatttatcttgtcctagaagttcatgaactataagatctaagtttttttttcttttttaacaataaaatgattttttcttaaagtatcaaagttggaattggctaaaagtgaagtagcataactcagatatgttggaacttggtactgaagcaggctttttggtaacagaaatgacattttaaggggtaactgtatatcctgtttttagttctttgcctctcagattctgttaacttagtttaaattcactgaataccctaccactaaggcgttgctcattacaaaagcatgttaatttcaatacaggaaaactcttttgtagttttatatatggattggggaaagtgactttgttttacttttcctttttattcccctccatcctccaaacttccaatctatattatttgtaatgagaactttggtgggggaaaaaaagcattaagagaattttggatgtaaaggcatctggtatctgatggaccagcaggtagatgtggttggattgagaaattttgggtaaggtagatgatagaagaaagagattttaggagacacagttctctgtggaacactttctttcatgttcctgtaactaattgatcaagacccttttaaacgcttatctttgtcagttccgcttttgaaaaaactattgccctaggattgtttcttccatatgacagatgaaggttattggctctgagtcatttttggcattatcgtcacagataaaaagattggcaattaatctcataaaaaatctgaattattccagattgctgccgatttttgcctaagaaacaatatgtaagtatattttataaaccaaactttgtcaaccaattctattgtacgtctacccacaggcaactttgaatttacttctctagtgctaaataaacatttcagcgatttaatcccccaacttgggggatgcattatgaaaaggttttcctgggagtcaaggggtttttctttctcgctagttttgtgaaaatttttatatcaataggcaaatcattataactttttaggggttgatggtttttaagtatattgggaaattgtgggtgtctaagggatgatgttcagtgaagaaaagggatccacttttagaaaccagcattgtttgctttcaactttcatactgtatgctaactcctacgttccaaaatgtgctcatttgcagacacaggtatgcctatatacatggaagtctcaaatctgaatttttatccatctcaatatgaccatttctctctgttgtgagctgaacagattaagtatatatctgccaggttgggaaatattttggtctatcttttcctgtcatcagaacttaatttaaaaaaattatcaaaggtcagatgtgactactacagtaagttggctatcataaagaatattccataaaatgttttatctgccatacaaaattactgggtttatggccggatgtggtggctcatgcctgtaatcccagcagttcaggattacaggttatatacaggttataacaatggataccaggacatcagaatatctgataaagcaaatatttatatgctaatttaaaatatcaaattgctactggacataaaatacatctggaagcttggggtaagaagaaagaaaagaagtgttccgttctgttttcaactaagggtaaacgaagtcccagagtgttttccctgtaggtcaaattaaggtaacatgtctttatttgatcatctattgtacaccagatacctggctaagggctttccttttttctcatgtagtcttccaaatgttctttgataattgtcactatattatagatgacaaagtgaagacttacgagaaattactttgccccaaggttacaacacttagatggctgtccaagggcggggaagagccctgcaaattctgtgtcttgaagaaagcagtggccacgcagtagttccgtgcccaggatctcccagaactagacttggcaaccacagctgggccagccttttttgttagaccattcttcctgactcctgcttaccatcagcacccttaaaatgacgaaatcaggcttaagttgcttttaggttacacagactggagtgtaggccctctcaggccaaacatctttcctcttctgtggtgctaaaattctgtatgaccagacaagtatggtaataggtttttttttttttttttttgtgcaaatgattttgtgtttagtaaaataatggctaaacacatggatccattcaaacgcacaaatgtggaaagtattgacacggaaggaaaggctttgaagaattactgcctcaggaagcagtgccatggatgcgaatttaacacagtctacttcttcctaaaggaatatcatcccaaggaatgtcaaaaattaaaatcaccttttaatgtactggttgttgagtgtttctgctttacctcaagtcattctgaccactctacatcctgcttcaaagtgttctgacacttagatttggaatggctctaatgattctttgtacttgaatgtggtctgtcaggccatgggtgagtgccttgcacatagtagacattcaataaatactaaatgaaggaatatgcatgcatctttgtgatgttagtaaagggtgcttgataaaagaaaattcaaaggaattcccttatgctgttacttgaaacacaggatcagacatcttaagcaaatgtctcaacgtgtattatatgcagatactattcag

SEQ ID NO: 277510 - DNA, 6864 bp, Homo sapiens
ggcacgagggccggctgagctgagtctcgctgctcggtgcgaggcggcggagagcgaggcctgaaatcatgaccaccccaggaaaagagaactttcgcctgaaaagttacaagaacaaatctctgaatcccgatgagatgcgcaggaggagggaggaagaaggactgcagttacgaaagcagaaaagagaagagcagttattcaagcggagaaatgttgctacagcagaagaagaaacagaagaagaagttatgtcagatggaggctttcatgaggctcagattaataacatggagatggcaccaggtggtgtcatcacttctgacatgattgaaatgatattttccaaaagcccagagcaacagctttcagcaacacagaaattcaggaagctgctttcaaaagaacctaaccctcctattgatgaagttatcagcacaccaggagtagtggccaggtttgtggagttcctcaaacgaaaagagaattgtacactgcagtttgaatcagcttgggtactgacaaatattgcttcaggaaattctcttcagacccgaattgtgattcaggcaggagctgtgcccatcttcatagagttgctcagctcagagtttgaagatgtccaggaacaggcagtctgggctcttggcaacattgctggagatagtaccatgtgcagggactatgtcttagactgcaatatccttccccctcttttgcagttattttcaaagcaaaaccgcctgaccatgacccggaatgcagtatgggctttgtctaatctctgtagagggaaaagtccacctccagaatttgcaaaggtttctccatgtctgaatgtgctttcctggttgctgtttgtcagtgacactgatgtactggctgatgcctgctgggccctctcatatctatcagatggacccaatgataaaattcaagcggtcatcgatgcgggagtatgtaggagacttgtggaactgctgatgcataatgattataaagtggtttctcctgctttgcgagctgtgggaaacattgtcacaggggatgatattcagacacaggtaattctgaattgctcagctctgcagagtttattgcatttgctgagtagcccaaaggaatctatcaaaaaggaagcatgttggacgatatctaatattacagctggaaatagggcacagatccagactgtgatagatgccaacattttcccagccctcattagtattttacaaactgctgaatttcggacaagaaaagaagcagcttgggccatcacaaatgcaacttctggaggatcagctgaacagatcaagtacctagtagaactgggttgtatcaagccgctctgtgatctcctcacggtcatggactctaagattgtacaggttgccctaaatggcttggaaaatatcctgaggcttggagaacaggaagccaaaaggaatggcactggcattaacccttactgtgctttgattgaagaagcttatggtctggataaaattgagttcttacagagtcatgaaaaccaggagatctaccaaaaggcctttgatcttattgagcattacttcgggaccgaagatgaagacagcagcattgcaccccaggttgaccttaaccagcagcagtacatcttccaacagtgtgaggctcctatggaaggtttccagctttgaagcaatactctgctttcacgttcctgtgtcagaccaggctacccagtcgagtcctcttgtggagcccacagtcctcatggagctaacttctcaaatgttttccataatactgtttgcgctcatttgcttgccttgcgcacctgctctcttacacacatctggaaaacctccggctctctgtggtggaatacccttctaataaaagggtaaccagaacggcccactctcttttacggaaaaatccctaggctttggagatccgcacttacattagagttatgggaatatacacatattaatgtggctccctttttcttgtgggggaataaaagaggactcctcctcattccctttaacatgggggaaaaaactgacattaaaagatgagactaaatctttatcttgaattttacacaactacttacgacaagggagatgtttagacctgttgtgtatacttcagagtacttttcatgagttcttccacagtgaacccttggattacctggtggctttttctagccagatttgcattaatccttactgagattggatggttttctttcctctattggcgccattcttcagatattaaagttaaaccatccactccctcaccttcagccttcagtgaatgtgctttctagttgtcaggaatgctgaagaattaacactttgactcctaaatgtgatactggtttgtagattcccttagagcagaaaggagaggggcacatattaatttgtatcgcttttgcttctctttggtcttttgtgtcttagaatttggaagtggttcatttctgttgctggtatgaggatttcgaatacttagtaatcgaaaaccatatcctgtaatttaataaaaaaaactaaggacgaaaaaaccctccaattttcccaaatgcaatcagtgtaactaggggctgtgtttctgcattaaaataaatgtttcaggctttgtggtcctgatcaaggtcctcattaaaaaattggagttcaccctaggtgcttttcccctctgtgactggcagataacacatacttttgaaagtaactttgggatttttttcttaggtgcagctcgattctaatcttttcatgctgcacacgattcctttaatgtagcatccttatctgaaagaaataaccatcttctcaacatgacctgcttaacccaaataagaacagtgatcttataacctcattgtttcctaatcattttatttcatctcctgctagtactgtgccgcttccccctccccccacacaaaataaaaacagtatctgccttctggctcatttaatgatgactgcaatctgtacctgcaaatggcgcttccagtactgtgttcagtgatccacatttgtgcttggactggaatgaaaaaatacgcttaattgccaagacaactgcaaatgagttcaatacgacttctcggtgctagttggccatcttgactcaatgttgggatacactaccagagaagatttttttgttgatgtgctgttcaaagtgaattctgaaggaaaaggttgctcacctctgtttcagagcatacccttttaaacctttttagacttgtcctcttctagaattcattataaccccaaagtgtaaaaactatttggaagttgcccctgacaagctattatacatctctggtaaatcctgctgaatgtaagggatattcagagcttttcatacctcatcatgatgttatttaagcagccaacttatgtgacctgatttaaacttttaaaaaatccacttcattcaaactagaaagagtcaaagacaaaggacatttatcagccaagagtgtgacgcattcttcgcatctagtctgtagtagtgtctgtgctctgggatggataccgtctgatgtctgtttgttattgatggcgcagccactgcaaaactagtcaactcccatctataactgttactttttctagtgctgctttgtgctgagagaacattttagtttactgcacttgacctgtaaaagactgattctttgtaattttagggataaattaggtggttaatttaaagaagaaatttcaatgttgcctttacatcacattaaaatataacttctttcagaaggataatagaagcactgattcatagtaaaaatcttgtttttagctttgacttttttgtggctgttttttaaaattgtaaattactagtaacatgtcatttctataggatgttttaaattatgtaccttccattggatagttaaaataatttcattttataagccaatttgagtgggaaagatacaaagcacacagttgtctccccacattaggaagagtagtgtgcattcagacattcggaatttttgctagtagttggagatgtttcagtgagtgaattaaaacaaagtctatttaactgacgtgatctattttgtgtctaaaacagaggaatttatcttgtcctagaagttcatgaactataagatctaagtttttttttcttttttaacaataaaatgattttttcttaaagtatcaaagttggaattggctaaaagtgaagtagcataactcagatatgttggaacttggtactgaagcaggctttttggtaacagaaatgacattttaaggggtaactgtatatcctgtttttagttctttgcctctcagattctgttaacttagtttaaattcactgaataccctaccactaaggcgttgctcattacaaaagcatgttaatttcaatacaggaaaactcttttgtagttttatatatggattggggaaagtgactttgttttacttttcctttttattcccctccatcctccaaacttccaatctatattatttgtaatgagaactttggtgggggaaaaaaagcattaagagaattttggatgtaaaggcatctggtatctgatggaccagcaggtagatgtggttggattgagaaattttgggtaaggtagatgatagaagaaagagattttaggagacacagttctctgtggaacactttctttcatgttcctgtaactaattgatcaagacccttttaaacgcttatctttgtcagttccgcttttgaaaaaactattgccctaggattgtttcttccatatgacagatgaaggttattggctctgagtcatttttggcattatcgtcacagataaaaagattggcaattaatctcataaaaaatctgaattattccagattgctgccgatttttgcctaagaaacaatatgtaagtatattttataaaccaaactttgtcaaccaattctattgtacgtctacccacaggcaactttgaatttacttctctagtgctaaataaacatttcagcgatttaatcccccaacttgggggatgcattatgaaaaggttttcctgggagtcaaggggtttttctttctcgctagttttgtgaaaatttttatatcaataggcaaatcattataactttttaggggttgatggtttttaagtatattgggaaattgtgggtgtctaagggatgatgttcagtgaagaaaagggatccacttttagaaaccagcattgtttgctttcaactttcatactgtatgctaactcctacgttccaaaatgtgctcatttgcagacacaggtatgcctatatacatggaagtctcaaatctgaatttttatccatctcaatatgaccatttctctctgttgtgagctgaacagattaagtatatatctgccaggttgggaaatattttggtctatcttttcctgtcatcagaacttaatttaaaaaaattatcaaaggtcagatgtgactactacagtaagttggctatcataaagaatattccataaaatgttttatctgccatacaaaattactgggtttatggccggatgtggtggctcatgcctgtaatcccagcagttcaggattacaggttatatacaggttataacaatggataccaggacatcagaatatctgataaagcaaatatttatatgctaatttaaaatatcaaattgctactggacataaaatacatctggaagcttggggtaagaagaaagaaaagaagtgttccgttctgttttcaactaagggtaaacgaagtcccagagtgttttccctgtaggtcaaattaaggtaacatgtctttatttgatcatctattgtacaccagatacctggctaagggctttccttttttctcatgtagtcttccaaatgttctttgataattgtcactatattatagatgacaaagtgaagacttacgagaaattactttgccccaaggttacaacacttagatggctgtccaagggcggggaagagccctgcaaattctgtgtcttgaagaaagcagtggccacgcagtagttccgtgcccaggatctcccagaactagacttggcaaccacagctgggccagccttttttgttagaccattcttcctgactcctgcttaccatcagcacccttaaaatgacgaaatcaggcttaagttgcttttaggttacacagactggagtgtaggccctctcaggccaaacatctttcctcttctgtggtgctaaaattctgtatgaccagacaagtatggtaataggtttttttttttttttttttgtgcaaatgattttgtgtttagtaaaataatggctaaacacatggatccattcaaacgcacaaatgtggaaagtattgacacggaaggaaaggctttgaagaattactgcctcaggaagcagtgccatggatgcgaatttaacacagtctacttcttcctaaaggaatatcatcccaaggaatgtcaaaaattaaaatcaccttttaatgtactggttgttgagtgtttctgctttacctcaagtcattctgaccactctacatcctgcttcaaagtgttctgacacttagatttggaatggctctaatgattctttgtacttgaatgtggtctgtcaggccatgggtgagtgccttgcacatagtagacattcaataaatactaaatgaaggaatatgcatgcatctttgtgatgttagtaaagggtgcttgataaaagaaaattcaaaggaattcccttatgctgttacttgaaacacaggatcagacatcttaagcaaatgtctcaacgtgtattatatgcagatactattcag

SEQ ID NO: 277511 - DNA, 6883 bp, Homo sapiens
agcggagccctggtgtgatcgccatcgggaacgccggtcgaggctaggcggggcggggcggcgtggcgcggcggcgggcctgaaatcatgaccaccccaggaaaagagaactttcgcctgaaaagttacaagaacaaatctctgaatcccgatgagatgcgcaggaggagggaggaagaaggactgcagttacgaaagcagaaaagagaagagcagttattcaagcggagaaatgttgctacagcagaagaagaaacagaagaagaagttatgtcagatggaggctttcatgaggctcagattaataacatggagatggcaccaggtggtgtcatcacttctgacatgattgaaatgatattttccaaaagcccagagcaacagctttcagcaacacagaaattcaggaagctgctttcaaaagaacctaaccctcctattgatgaagttatcagcacaccaggagtagtggccaggtttgtggagttcctcaaacgaaaagagaattgtacactgcagtttgaatcagcttgggtactgacaaatattgcttcaggaaattctcttcagacccgaattgtgattcaggcaggagctgtgcccatcttcatagagttgctcagctcagagtttgaagatgtccaggaacaggcagtctgggctcttggcaacattgctggagatagtaccatgtgcagggactatgtcttagactgcaatatccttccccctcttttgcagttattttcaaagcaaaaccgcctgaccatgacccggaatgcagtatgggctttgtctaatctctgtagagggaaaagtccacctccagaatttgcaaaggtttctccatgtctgaatgtgctttcctggttgctgtttgtcagtgacactgatgtactggctgatgcctgctgggccctctcatatctatcagatggacccaatgataaaattcaagcggtcatcgatgcgggagtatgtaggagacttgtggaactgctgatgcataatgattataaagtggtttctcctgctttgcgagctgtgggaaacattgtcacaggggatgatattcagacacaggtaattctgaattgctcagctctgcagagtttattgcatttgctgagtagcccaaaggaatctatcaaaaaggaagcatgttggacgatatctaatattacagctggaaatagggcacagatccagactgtgatagatgccaacattttcccagccctcattagtattttacaaactgctgaatttcggacaagaaaagaagcagcttgggccatcacaaatgcaacttctggaggatcagctgaacagatcaagtacctagtagaactgggttgtatcaagccgctctgtgatctcctcacggtcatggactctaagattgtacaggttgccctaaatggcttggaaaatatcctgaggcttggagaacaggaagccaaaaggaatggcactggcattaacccttactgtgctttgattgaagaagcttatggtctggataaaattgagttcttacagagtcatgaaaaccaggagatctaccaaaaggcctttgatcttattgagcattacttcgggaccgaagatgaagacagcagcattgcaccccaggttgaccttaaccagcagcagtacatcttccaacagtgtgaggctcctatggaaggtttccagctttgaagcaatactctgctttcacgttcctgtgtcagaccaggctacccagtcgagtcctcttgtggagcccacagtcctcatggagctaacttctcaaatgttttccataatactgtttgcgctcatttgcttgccttgcgcacctgctctcttacacacatctggaaaacctccggctctctgtggtggaatacccttctaataaaagggtaaccagaacggcccactctcttttacggaaaaatccctaggctttggagatccgcacttacattagagttatgggaatatacacatattaatgtggctccctttttcttgtgggggaataaaagaggactcctcctcattccctttaacatgggggaaaaaactgacattaaaagatgagactaaatctttatcttgaattttacacaactacttacgacaagggagatgtttagacctgttgtgtatacttcagagtacttttcatgagttcttccacagtgaacccttggattacctggtggctttttctagccagatttgcattaatccttactgagattggatggttttctttcctctattggcgccattcttcagatattaaagttaaaccatccactccctcaccttcagccttcagtgaatgtgctttctagttgtcaggaatgctgaagaattaacactttgactcctaaatgtgatactggtttgtagattcccttagagcagaaaggagaggggcacatattaatttgtatcgcttttgcttctctttggtcttttgtgtcttagaatttggaagtggttcatttctgttgctggtatgaggatttcgaatacttagtaatcgaaaaccatatcctgtaatttaataaaaaaaactaaggacgaaaaaaccctccaattttcccaaatgcaatcagtgtaactaggggctgtgtttctgcattaaaataaatgtttcaggctttgtggtcctgatcaaggtcctcattaaaaaattggagttcaccctaggtgcttttcccctctgtgactggcagataacacatacttttgaaagtaactttgggatttttttcttaggtgcagctcgattctaatcttttcatgctgcacacgattcctttaatgtagcatccttatctgaaagaaataaccatcttctcaacatgacctgcttaacccaaataagaacagtgatcttataacctcattgtttcctaatcattttatttcatctcctgctagtactgtgccgcttccccctccccccacacaaaataaaaacagtatctgccttctggctcatttaatgatgactgcaatctgtacctgcaaatggcgcttccagtactgtgttcagtgatccacatttgtgcttggactggaatgaaaaaatacgcttaattgccaagacaactgcaaatgagttcaatacgacttctcggtgctagttggccatcttgactcaatgttgggatacactaccagagaagatttttttgttgatgtgctgttcaaagtgaattctgaaggaaaaggttgctcacctctgtttcagagcatacccttttaaacctttttagacttgtcctcttctagaattcattataaccccaaagtgtaaaaactatttggaagttgcccctgacaagctattatacatctctggtaaatcctgctgaatgtaagggatattcagagcttttcatacctcatcatgatgttatttaagcagccaacttatgtgacctgatttaaacttttaaaaaatccacttcattcaaactagaaagagtcaaagacaaaggacatttatcagccaagagtgtgacgcattcttcgcatctagtctgtagtagtgtctgtgctctgggatggataccgtctgatgtctgtttgttattgatggcgcagccactgcaaaactagtcaactcccatctataactgttactttttctagtgctgctttgtgctgagagaacattttagtttactgcacttgacctgtaaaagactgattctttgtaattttagggataaattaggtggttaatttaaagaagaaatttcaatgttgcctttacatcacattaaaatataacttctttcagaaggataatagaagcactgattcatagtaaaaatcttgtttttagctttgacttttttgtggctgttttttaaaattgtaaattactagtaacatgtcatttctataggatgttttaaattatgtaccttccattggatagttaaaataatttcattttataagccaatttgagtgggaaagatacaaagcacacagttgtctccccacattaggaagagtagtgtgcattcagacattcggaatttttgctagtagttggagatgtttcagtgagtgaattaaaacaaagtctatttaactgacgtgatctattttgtgtctaaaacagaggaatttatcttgtcctagaagttcatgaactataagatctaagtttttttttcttttttaacaataaaatgattttttcttaaagtatcaaagttggaattggctaaaagtgaagtagcataactcagatatgttggaacttggtactgaagcaggctttttggtaacagaaatgacattttaaggggtaactgtatatcctgtttttagttctttgcctctcagattctgttaacttagtttaaattcactgaataccctaccactaaggcgttgctcattacaaaagcatgttaatttcaatacaggaaaactcttttgtagttttatatatggattggggaaagtgactttgttttacttttcctttttattcccctccatcctccaaacttccaatctatattatttgtaatgagaactttggtgggggaaaaaaagcattaagagaattttggatgtaaaggcatctggtatctgatggaccagcaggtagatgtggttggattgagaaattttgggtaaggtagatgatagaagaaagagattttaggagacacagttctctgtggaacactttctttcatgttcctgtaactaattgatcaagacccttttaaacgcttatctttgtcagttccgcttttgaaaaaactattgccctaggattgtttcttccatatgacagatgaaggttattggctctgagtcatttttggcattatcgtcacagataaaaagattggcaattaatctcataaaaaatctgaattattccagattgctgccgatttttgcctaagaaacaatatgtaagtatattttataaaccaaactttgtcaaccaattctattgtacgtctacccacaggcaactttgaatttacttctctagtgctaaataaacatttcagcgatttaatcccccaacttgggggatgcattatgaaaaggttttcctgggagtcaaggggtttttctttctcgctagttttgtgaaaatttttatatcaataggcaaatcattataactttttaggggttgatggtttttaagtatattgggaaattgtgggtgtctaagggatgatgttcagtgaagaaaagggatccacttttagaaaccagcattgtttgctttcaactttcatactgtatgctaactcctacgttccaaaatgtgctcatttgcagacacaggtatgcctatatacatggaagtctcaaatctgaatttttatccatctcaatatgaccatttctctctgttgtgagctgaacagattaagtatatatctgccaggttgggaaatattttggtctatcttttcctgtcatcagaacttaatttaaaaaaattatcaaaggtcagatgtgactactacagtaagttggctatcataaagaatattccataaaatgttttatctgccatacaaaattactgggtttatggccggatgtggtggctcatgcctgtaatcccagcagttcaggattacaggttatatacaggttataacaatggataccaggacatcagaatatctgataaagcaaatatttatatgctaatttaaaatatcaaattgctactggacataaaatacatctggaagcttggggtaagaagaaagaaaagaagtgttccgttctgttttcaactaagggtaaacgaagtcccagagtgttttccctgtaggtcaaattaaggtaacatgtctttatttgatcatctattgtacaccagatacctggctaagggctttccttttttctcatgtagtcttccaaatgttctttgataattgtcactatattatagatgacaaagtgaagacttacgagaaattactttgccccaaggttacaacacttagatggctgtccaagggcggggaagagccctgcaaattctgtgtcttgaagaaagcagtggccacgcagtagttccgtgcccaggatctcccagaactagacttggcaaccacagctgggccagccttttttgttagaccattcttcctgactcctgcttaccatcagcacccttaaaatgacgaaatcaggcttaagttgcttttaggttacacagactggagtgtaggccctctcaggccaaacatctttcctcttctgtggtgctaaaattctgtatgaccagacaagtatggtaataggtttttttttttttttttttgtgcaaatgattttgtgtttagtaaaataatggctaaacacatggatccattcaaacgcacaaatgtggaaagtattgacacggaaggaaaggctttgaagaattactgcctcaggaagcagtgccatggatgcgaatttaacacagtctacttcttcctaaaggaatatcatcccaaggaatgtcaaaaattaaaatcaccttttaatgtactggttgttgagtgtttctgctttacctcaagtcattctgaccactctacatcctgcttcaaagtgttctgacacttagatttggaatggctctaatgattctttgtacttgaatgtggtctgtcaggccatgggtgagtgccttgcacatagtagacattcaataaatactaaatgaaggaatatgcatgcatctttgtgatgttagtaaagggtgcttgataaaagaaaattcaaaggaattcccttatgctgttacttgaaacacaggatcagacatcttaagcaaatgtctcaacgtgtattatatgcagatactattcag

SEQ ID NO: 277512 - DNA, 7441 bp, Homo sapiens
ggcacgagggccggctgagctgagtctcgctgctcggtgcgaggcggcggagagcgaggcctggtgagcaccgccgaggcgcgggccagctcttcgaggttgtgcgcgggagtggcacggcgggcgggcgagcgaggggctaacttcagcggtggcaccgggatcggttgccttgagcctgaaatcatgaccaccccaggaaaagagaactttcgcctgaaaagttacaagaacaaatctctgaatcccgatgagatgcgcaggaggagggaggaagaaggactgcagttacgaaagcagaaaagagaagagcagttattcaagcggagaaatgttgctacagcagaagaagaaacagaagaagaagttatgtcagatggaggctttcatgaggctcagattaataacatggagatggcaccaggtggtgtcatcacttctgacatgattgaaatgatattttccaaaagcccagagcaacagctttcagcaacacagaaattcaggaagctgctttcaaaagaacctaaccctcctattgatgaagttatcagcacaccaggagtagtggccaggtttgtggagttcctcaaacgaaaagagaattgtacactgcagtttgaatcagcttgggtactgacaaatattgcttcaggaaattctcttcagacccgaattgtgattcaggcaggagctgtgcccatcttcatagagttgctcagctcagagtttgaagatgtccaggaacaggcagtctgggctcttggcaacattgctggagatagtaccatgtgcagggactatgtcttagactgcaatatccttccccctcttttgcagttattttcaaagcaaaaccgcctgaccatgacccggaatgcagtatgggctttgtctaatctctgtagagggaaaagtccacctccagaatttgcaaaggtttctccatgtctgaatgtgctttcctggttgctgtttgtcagtgacactgatgtactggctgatgcctgctgggccctctcatatctatcagatggacccaatgataaaattcaagcggtcatcgatgcgggagtatgtaggagacttgtggaactgctgatgcataatgattataaagtggtttctcctgctttgcgagctgtgggaaacattgtcacaggggatgatattcagacacaggtatgaagaagtagtaacttttttttgtcctttaaaaacagtatattgaacttcatgatcatgtttctattatcgtattttactccatattattagggaaacttgatactctgttacactaatgtttaaaaatgttgggccgggggcggtcactcacgcctgtaatcccagcactttgggagactgaggcggacggattgcctgagctcaggagttcgacaccagcctgggcaacatggtgaaacctcatctctactaaaaatacaaaaaattagccgggcgtggttgcacacgcctgtagttccagctaccgggaggctgaggcaggagaatcacttgaacccaggaggtggaagctgcagtgagctgagattgcaccactgcactccagcctgggcaacagagtgagactccatctcaaaaaagaaaaaaaaaggttagagataatgacataactcttttcaatttatttctgacaggagaaggggtgttaatagtcaaactagcttagaaattataattagtatcatgaatatttttataaatctcacagttttttccatttaagtttttctttaattttagactgtgatagatgccaacattttcccagccctcattagtattttacaaactgctgaatttcggacaagaaaagaagcagcttgggccatcacaaatgcaacttctggaggatcagctgaacagatcaagtacctagtagaactgggttgtatcaagccgctctgtgatctcctcacggtcatggactctaagattgtacaggttgccctaaatggcttggaaaatatcctgaggcttggagaacaggaagccaaaaggaatggcactggcattaacccttactgtgctttgattgaagaagcttatggtctggataaaattgagttcttacagagtcatgaaaaccaggagatctaccaaaaggcctttgatcttattgagcattacttcgggaccgaagatgaagacagcagcattgcaccccaggttgaccttaaccagcagcagtacatcttccaacagtgtgaggctcctatggaaggtttccagctttgaagcaatactctgctttcacgttcctgtgtcagaccaggctacccagtcgagtcctcttgtggagcccacagtcctcatggagctaacttctcaaatgttttccataatactgtttgcgctcatttgcttgccttgcgcacctgctctcttacacacatctggaaaacctccggctctctgtggtggaatacccttctaataaaagggtaaccagaacggcccactctcttttacggaaaaatccctaggctttggagatccgcacttacattagagttatgggaatatacacatattaatgtggctccctttttcttgtgggggaataaaagaggactcctcctcattccctttaacatgggggaaaaaactgacattaaaagatgagactaaatctttatcttgaattttacacaactacttacgacaagggagatgtttagacctgttgtgtatacttcagagtacttttcatgagttcttccacagtgaacccttggattacctggtggctttttctagccagatttgcattaatccttactgagattggatggttttctttcctctattggcgccattcttcagatattaaagttaaaccatccactccctcaccttcagccttcagtgaatgtgctttctagttgtcaggaatgctgaagaattaacactttgactcctaaatgtgatactggtttgtagattcccttagagcagaaaggagaggggcacatattaatttgtatcgcttttgcttctctttggtcttttgtgtcttagaatttggaagtggttcatttctgttgctggtatgaggatttcgaatacttagtaatcgaaaaccatatcctgtaatttaataaaaaaaactaaggacgaaaaaaccctccaattttcccaaatgcaatcagtgtaactaggggctgtgtttctgcattaaaataaatgtttcaggctttgtggtcctgatcaaggtcctcattaaaaaattggagttcaccctaggtgcttttcccctctgtgactggcagataacacatacttttgaaagtaactttgggatttttttcttaggtgcagctcgattctaatcttttcatgctgcacacgattcctttaatgtagcatccttatctgaaagaaataaccatcttctcaacatgacctgcttaacccaaataagaacagtgatcttataacctcattgtttcctaatcattttatttcatctcctgctagtactgtgccgcttccccctccccccacacaaaataaaaacagtatctgccttctggctcatttaatgatgactgcaatctgtacctgcaaatggcgcttccagtactgtgttcagtgatccacatttgtgcttggactggaatgaaaaaatacgcttaattgccaagacaactgcaaatgagttcaatacgacttctcggtgctagttggccatcttgactcaatgttgggatacactaccagagaagatttttttgttgatgtgctgttcaaagtgaattctgaaggaaaaggttgctcacctctgtttcagagcatacccttttaaacctttttagacttgtcctcttctagaattcattataaccccaaagtgtaaaaactatttggaagttgcccctgacaagctattatacatctctggtaaatcctgctgaatgtaagggatattcagagcttttcatacctcatcatgatgttatttaagcagccaacttatgtgacctgatttaaacttttaaaaaatccacttcattcaaactagaaagagtcaaagacaaaggacatttatcagccaagagtgtgacgcattcttcgcatctagtctgtagtagtgtctgtgctctgggatggataccgtctgatgtctgtttgttattgatggcgcagccactgcaaaactagtcaactcccatctataactgttactttttctagtgctgctttgtgctgagagaacattttagtttactgcacttgacctgtaaaagactgattctttgtaattttagggataaattaggtggttaatttaaagaagaaatttcaatgttgcctttacatcacattaaaatataacttctttcagaaggataatagaagcactgattcatagtaaaaatcttgtttttagctttgacttttttgtggctgttttttaaaattgtaaattactagtaacatgtcatttctataggatgttttaaattatgtaccttccattggatagttaaaataatttcattttataagccaatttgagtgggaaagatacaaagcacacagttgtctccccacattaggaagagtagtgtgcattcagacattcggaatttttgctagtagttggagatgtttcagtgagtgaattaaaacaaagtctatttaactgacgtgatctattttgtgtctaaaacagaggaatttatcttgtcctagaagttcatgaactataagatctaagtttttttttcttttttaacaataaaatgattttttcttaaagtatcaaagttggaattggctaaaagtgaagtagcataactcagatatgttggaacttggtactgaagcaggctttttggtaacagaaatgacattttaaggggtaactgtatatcctgtttttagttctttgcctctcagattctgttaacttagtttaaattcactgaataccctaccactaaggcgttgctcattacaaaagcatgttaatttcaatacaggaaaactcttttgtagttttatatatggattggggaaagtgactttgttttacttttcctttttattcccctccatcctccaaacttccaatctatattatttgtaatgagaactttggtgggggaaaaaaagcattaagagaattttggatgtaaaggcatctggtatctgatggaccagcaggtagatgtggttggattgagaaattttgggtaaggtagatgatagaagaaagagattttaggagacacagttctctgtggaacactttctttcatgttcctgtaactaattgatcaagacccttttaaacgcttatctttgtcagttccgcttttgaaaaaactattgccctaggattgtttcttccatatgacagatgaaggttattggctctgagtcatttttggcattatcgtcacagataaaaagattggcaattaatctcataaaaaatctgaattattccagattgctgccgatttttgcctaagaaacaatatgtaagtatattttataaaccaaactttgtcaaccaattctattgtacgtctacccacaggcaactttgaatttacttctctagtgctaaataaacatttcagcgatttaatcccccaacttgggggatgcattatgaaaaggttttcctgggagtcaaggggtttttctttctcgctagttttgtgaaaatttttatatcaataggcaaatcattataactttttaggggttgatggtttttaagtatattgggaaattgtgggtgtctaagggatgatgttcagtgaagaaaagggatccacttttagaaaccagcattgtttgctttcaactttcatactgtatgctaactcctacgttccaaaatgtgctcatttgcagacacaggtatgcctatatacatggaagtctcaaatctgaatttttatccatctcaatatgaccatttctctctgttgtgagctgaacagattaagtatatatctgccaggttgggaaatattttggtctatcttttcctgtcatcagaacttaatttaaaaaaattatcaaaggtcagatgtgactactacagtaagttggctatcataaagaatattccataaaatgttttatctgccatacaaaattactgggtttatggccggatgtggtggctcatgcctgtaatcccagcagttcaggattacaggttatatacaggttataacaatggataccaggacatcagaatatctgataaagcaaatatttatatgctaatttaaaatatcaaattgctactggacataaaatacatctggaagcttggggtaagaagaaagaaaagaagtgttccgttctgttttcaactaagggtaaacgaagtcccagagtgttttccctgtaggtcaaattaaggtaacatgtctttatttgatcatctattgtacaccagatacctggctaagggctttccttttttctcatgtagtcttccaaatgttctttgataattgtcactatattatagatgacaaagtgaagacttacgagaaattactttgccccaaggttacaacacttagatggctgtccaagggcggggaagagccctgcaaattctgtgtcttgaagaaagcagtggccacgcagtagttccgtgcccaggatctcccagaactagacttggcaaccacagctgggccagccttttttgttagaccattcttcctgactcctgcttaccatcagcacccttaaaatgacgaaatcaggcttaagttgcttttaggttacacagactggagtgtaggccctctcaggccaaacatctttcctcttctgtggtgctaaaattctgtatgaccagacaagtatggtaataggtttttttttttttttttttgtgcaaatgattttgtgtttagtaaaataatggctaaacacatggatccattcaaacgcacaaatgtggaaagtattgacacggaaggaaaggctttgaagaattactgcctcaggaagcagtgccatggatgcgaatttaacacagtctacttcttcctaaaggaatatcatcccaaggaatgtcaaaaattaaaatcaccttttaatgtactggttgttgagtgtttctgctttacctcaagtcattctgaccactctacatcctgcttcaaagtgttctgacacttagatttggaatggctctaatgattctttgtacttgaatgtggtctgtcaggccatgggtgagtgccttgcacatagtagacattcaataaatactaaatgaaggaatatgcatgcatctttgtgatgttagtaaagggtgcttgataaaagaaaattcaaaggaattcccttatgctgttacttgaaacacaggatcagacatcttaagcaaatgtctcaacgtgtattatatgcagatactattcag

SEQ ID NO: 277513 - DNA, 5943 bp, Homo sapiens
cgccacgcgtccgcggacgcgtgggcgatgcgggagtatgtaggagacttgtggaactgctgatgcataatgattataaagtggtttctcctgctttgcgagctgtgggaaacattgtcacaggggatgatattcagacacaggtaattctgaattgctcagctctgcagagtttattgcatttgctgagtagcccaaaggaatctatcaaaaaggaagcatgttggacgatatctaatattacagctggaaatagggcacagatccagactgtgatagatgccaacattttcccagccctcattagtattttacaaactgctgaatttcggacaagaaaagaagcagcttgggccatcacaaatgcaacttctggaggatcagctgaacagatcaagtacctagtagaactgggttgtatcaagccgctctgtgatctcctcacggtcatggactctaagattgtacaggttgccctaaatggcttggaaaatatcctgaggcttggagaacaggaagccaaaaggaatggcactggcattaacccttactgtgctttgattgaagaagcttatggtctggataaaattgagttcttacagagtcatgaaaaccaggagatctaccaaaaggcctttgatcttattgagcattacttcgggaccgaagatgaagacagcagcattgcaccccaggttgaccttaaccagcagcagtacatcttccaacagtgtgaggctcctatggaaggtttccagctttgaagcaatactctgctttcacgttcctgtgtcagaccaggctacccagtcgagtcctcttgtggagcccacagtcctcatggagctaacttctcaaatgttttccataatactgtttgcgctcatttgcttgccttgcgcacctgctctcttacacacatctggaaaacctccggctctctgtggtggaatacccttctaataaaagggtaaccagaacggcccactctcttttacggaaaaatccctaggctttggagatccgcacttacattagagttatgggaatatacacatattaatgtggctccctttttcttgtgggggaataaaagaggactcctcctcattccctttaacatgggggaaaaaactgacattaaaagatgagactaaatctttatcttgaattttacacaactacttacgacaagggagatgtttagacctgttgtgtatacttcagagtacttttcatgagttcttccacagtgaacccttggattacctggtggctttttctagccagatttgcattaatccttactgagattggatggttttctttcctctattggcgccattcttcagatattaaagttaaaccatccactccctcaccttcagccttcagtgaatgtgctttctagttgtcaggaatgctgaagaattaacactttgactcctaaatgtgatactggtttgtagattcccttagagcagaaaggagaggggcacatattaatttgtatcgcttttgcttctctttggtcttttgtgtcttagaatttggaagtggttcatttctgttgctggtatgaggatttcgaatacttagtaatcgaaaaccatatcctgtaatttaataaaaaaaactaaggacgaaaaaaccctccaattttcccaaatgcaatcagtgtaactaggggctgtgtttctgcattaaaataaatgtttcaggctttgtggtcctgatcaaggtcctcattaaaaaattggagttcaccctaggtgcttttcccctctgtgactggcagataacacatacttttgaaagtaactttgggatttttttcttaggtgcagctcgattctaatcttttcatgctgcacacgattcctttaatgtagcatccttatctgaaagaaataaccatcttctcaacatgacctgcttaacccaaataagaacagtgatcttataacctcattgtttcctaatcattttatttcatctcctgctagtactgtgccgcttccccctccccccacacaaaataaaaacagtatctgccttctggctcatttaatgatgactgcaatctgtacctgcaaatggcgcttccagtactgtgttcagtgatccacatttgtgcttggactggaatgaaaaaatacgcttaattgccaagacaactgcaaatgagttcaatacgacttctcggtgctagttggccatcttgactcaatgttgggatacactaccagagaagatttttttgttgatgtgctgttcaaagtgaattctgaaggaaaaggttgctcacctctgtttcagagcatacccttttaaacctttttagacttgtcctcttctagaattcattataaccccaaagtgtaaaaactatttggaagttgcccctgacaagctattatacatctctggtaaatcctgctgaatgtaagggatattcagagcttttcatacctcatcatgatgttatttaagcagccaacttatgtgacctgatttaaacttttaaaaaatccacttcattcaaactagaaagagtcaaagacaaaggacatttatcagccaagagtgtgacgcattcttcgcatctagtctgtagtagtgtctgtgctctgggatggataccgtctgatgtctgtttgttattgatggcgcagccactgcaaaactagtcaactcccatctataactgttactttttctagtgctgctttgtgctgagagaacattttagtttactgcacttgacctgtaaaagactgattctttgtaattttagggataaattaggtggttaatttaaagaagaaatttcaatgttgcctttacatcacattaaaatataacttctttcagaaggataatagaagcactgattcatagtaaaaatcttgtttttagctttgacttttttgtggctgttttttaaaattgtaaattactagtaacatgtcatttctataggatgttttaaattatgtaccttccattggatagttaaaataatttcattttataagccaatttgagtgggaaagatacaaagcacacagttgtctccccacattaggaagagtagtgtgcattcagacattcggaatttttgctagtagttggagatgtttcagtgagtgaattaaaacaaagtctatttaactgacgtgatctattttgtgtctaaaacagaggaatttatcttgtcctagaagttcatgaactataagatctaagtttttttttcttttttaacaataaaatgattttttcttaaagtatcaaagttggaattggctaaaagtgaagtagcataactcagatatgttggaacttggtactgaagcaggctttttggtaacagaaatgacattttaaggggtaactgtatatcctgtttttagttctttgcctctcagattctgttaacttagtttaaattcactgaataccctaccactaaggcgttgctcattacaaaagcatgttaatttcaatacaggaaaactcttttgtagttttatatatggattggggaaagtgactttgttttacttttcctttttattcccctccatcctccaaacttccaatctatattatttgtaatgagaactttggtgggggaaaaaaagcattaagagaattttggatgtaaaggcatctggtatctgatggaccagcaggtagatgtggttggattgagaaattttgggtaaggtagatgatagaagaaagagattttaggagacacagttctctgtggaacactttctttcatgttcctgtaactaattgatcaagacccttttaaacgcttatctttgtcagttccgcttttgaaaaaactattgccctaggattgtttcttccatatgacagatgaaggttattggctctgagtcatttttggcattatcgtcacagataaaaagattggcaattaatctcataaaaaatctgaattattccagattgctgccgatttttgcctaagaaacaatatgtaagtatattttataaaccaaactttgtcaaccaattctattgtacgtctacccacaggcaactttgaatttacttctctagtgctaaataaacatttcagcgatttaatcccccaacttgggggatgcattatgaaaaggttttcctgggagtcaaggggtttttctttctcgctagttttgtgaaaatttttatatcaataggcaaatcattataactttttaggggttgatggtttttaagtatattgggaaattgtgggtgtctaagggatgatgttcagtgaagaaaagggatccacttttagaaaccagcattgtttgctttcaactttcatactgtatgctaactcctacgttccaaaatgtgctcatttgcagacacaggtatgcctatatacatggaagtctcaaatctgaatttttatccatctcaatatgaccatttctctctgttgtgagctgaacagattaagtatatatctgccaggttgggaaatattttggtctatcttttcctgtcatcagaacttaatttaaaaaaattatcaaaggtcagatgtgactactacagtaagttggctatcataaagaatattccataaaatgttttatctgccatacaaaattactgggtttatggccggatgtggtggctcatgcctgtaatcccagcagttcaggattacaggttatatacaggttataacaatggataccaggacatcagaatatctgataaagcaaatatttatatgctaatttaaaatatcaaattgctactggacataaaatacatctggaagcttggggtaagaagaaagaaaagaagtgttccgttctgttttcaactaagggtaaacgaagtcccagagtgttttccctgtaggtcaaattaaggtaacatgtctttatttgatcatctattgtacaccagatacctggctaagggctttccttttttctcatgtagtcttccaaatgttctttgataattgtcactatattatagatgacaaagtgaagacttacgagaaattactttgccccaaggttacaacacttagatggctgtccaagggcggggaagagccctgcaaattctgtgtcttgaagaaagcagtggccacgcagtagttccgtgcccaggatctcccagaactagacttggcaaccacagctgggccagccttttttgttagaccattcttcctgactcctgcttaccatcagcacccttaaaatgacgaaatcaggcttaagttgcttttaggttacacagactggagtgtaggccctctcaggccaaacatctttcctcttctgtggtgctaaaattctgtatgaccagacaagtatggtaataggtttttttttttttttttttgtgcaaatgattttgtgtttagtaaaataatggctaaacacatggatccattcaaacgcacaaatgtggaaagtattgacacggaaggaaaggctttgaagaattactgcctcaggaagcagtgccatggatgcgaatttaacacagtctacttcttcctaaaggaatatcatcccaaggaatgtcaaaaattaaaatcaccttttaatgtactggttgttgagtgtttctgctttacctcaagtcattctgaccactctacatcctgcttcaaagtgttctgacacttagatttggaatggctctaatgattctttgtacttgaatgtggtctgtcaggccatgggtgagtgccttgcacatagtagacattcaataaatactaaatgaaggaatatgcatgcatctttgtgatgttagtaaagggtgcttgataaaagaaaattcaaaggaattcccttatgctgttacttgaaacacaggatcagacatcttaagcaaatgtctcaacgtgtattatatgcagatactattcag

SEQ ID NO: 277514 - DNA, 6208 bp, Homo sapiens
  misc_feature (6154)..(6154): n is a, c, g, or t
  misc_feature (6202)..(6202): n is a, c, g, or t
ggcacgagggccggctgagctgagtctcgctgctcggtgcgaggcggcggagagcgaggcctggtgagcaccgccgaggcgcgggccagctcttcgaggttgtgcgcgggagtggcacggcgggcgggcgagcgaggggctaacttcagcggtggcaccgggatcggttgccttgagcctgaaatcatgaccaccccaggaaaagagaactttcgcctgaaaagttacaagaacaaatctctgaatcccgatgagatgcgcaggaggagggaggaagaaggactgcagttacgaaagcagaaaagagaagagcagttattcaagcggagaaatgttgctacagcagaagaagaaacagaagaagaagttatgtcagatggaggctttcatgaggctcagattaataacatggagatggcaccaggtggtgtcatcacttctgacatgattgaaatgatattttccaaaagcccagagcaacagctttcagcaacacagaaattcaggaagctgctttcaaaagaacctaaccctcctattgatgaagttatcagcacaccaggagtagtggccaggtttgtggagttcctcaaacgaaaagagaattgtacactgcagtttgaatcagcttgggtactgacaaatattgcttcaggaaattctcttcagacccgaattgtgattcaggcaggagctgtgcccatcttcatagagttgctcagctcagagtttgaagatgtccaggaacaggcagtctgggctcttggcaacattgctggagatagtaccatgtgcagggactatgtcttagactgcaatatccttccccctcttttgcagttattttcaaagcaaaaccgcctgaccatgacccggaatgcagtatgggctttgtctaatctctgtagagggaaaagtccacctccagaatttgcaaaggtttctccatgtctgaatgtgctttcctggttgctgtttgtcagtgacactgatgtactggctgatgcctgctgggccctctcatatctatcagatggacccaatgataaaattcaagcggtcatcgatgcgggagtatgtaggagacttgtggaactgctgatgcataatgattataaagtggtttctcctgctttgcgagctgtgggaaacattgtcacaggggatgatattcagacacaggtaattctgaattgctcagctctgcagagtttattgcatttgctgagtagcccaaaggaatctatcaaaaaggaagcatgttggacgatatctaatattacagctggaaatagggcacagatccagactgtgatagatgccaacattttcccagccctcattagtattttacaaactgctgaatttcggacaagaaaagaagcagcttgggccatcacaaatgcaacttctggaggatcagctgaacagatcaagtacctagtagaactgggttgtatcaagccgctctgtgatctcctcacggtcatggactctaagattgtacaggttgccctaaatggcttggaaaatatcctgaggcttggagaacaggaagccaaaaggaatggcactggcattaacccttactgtgctttgattgaagaagcttatggtctggataaaattgagttcttacagagtcatgaaaaccaggagatctaccaaaaggcctttgatcttattgagcattacttcgggaccgaagatgaagacagcagcattgcaccccaggttgaccttaaccagcagcagtacatcttccaacagtgtgaggctcctatggaaggtttccagctttgaagcaatactctgctttcacgttcctgtgtcagaccaggctacccagtcgagtcctcttgtggagcccacagtcctcatggagctaacttctcaaatgttttccataatactgtttgcgctcatttgcttgccttgcgcacctgctctcttacacacatctggaaaacctccggctctctgtggtggaatacccttctaataaaagggtaaccagaacggcccactctcttttacggaaaaatccctaggctttggagatccgcacttacattagagttatgggaatatacacatattaatgtggctccctttttcttgtgggggaataaaagaggactcctcctcattccctttaacatgggggaaaaaactgacattaaaagatgagactaaatctttatcttgaattttacacaactacttacgacaagggagatgtttagacctgttgtgtatacttcagagtacttttcatgagttcttccacagtgaacccttggattacctggtggctttttctagccagatttgcattaatccttactgagattggatggttttctttcctctattggcgccattcttcagatattaaagttaaaccatccactccctcaccttcagccttcagtgaatgtgctttctagttgtcaggaatgctgaagaattaacactttgactcctaaatgtgatactggtttgtagattcccttagagcagaaaggagaggggcacatattaatttgtatcgcttttgcttctctttggtcttttgtgtcttagaatttggaagtggttcatttctgttgctggtatgaggatttcgaatacttagtaatcgaaaaccatatcctgtaatttaataaaaaaaactaaggacgaaaaaaccctccaattttcccaaatgcaatcagtgtaactaggggctgtgtttctgcattaaaataaatgtttcaggctttgtggtcctgatcaaggtcctcattaaaaaattggagttcaccctaggtgcttttcccctctgtgactggcagataacacatacttttgaaagtaactttgggatttttttcttaggtgcagctcgattctaatcttttcatgctgcacacgattcctttaatgtagcatccttatctgaaagaaataaccatcttctcaacatgacctgcttaacccaaataagaacagtgatcttataacctcattgtttcctaatcattttatttcatctcctgctagtactgtgccgcttccccctccccccacacaaaataaaaacagtatctgccttctggctcatttaatgatgactgcaatctgtacctgcaaatggcgcttccagtactgtgttcagtgatccacatttgtgcttggactggaatgaaaaaatacgcttaattgccaagacaactgcaaatgagttcaatacgacttctcggtgctagttggccatcttgactcaatgttgggatacactaccagagaagatttttttgttgatgtgctgttcaaagtgaattctgaaggaaaaggttgctcacctctgtttcagagcatacccttttaaacctttttagacttgtcctcttctagaattcattataaccccaaagtgtaaaaactatttggaagttgcccctgacaagctattatacatctctggtaaatcctgctgaatgtaagggatattcagagcttttcatacctcatcatgatgttatttaagcagccaacttatgtgacctgatttaaacttttaaaaaatccacttcattcaaactagaaagagtcaaagacaaaggacatttatcagccaagagtgtgacgcattcttcgcatctagtctgtagtagtgtctgtgctctgggatggataccgtctgatgtctgtttgttattgatggcgcagccactgcaaaactagtcaactcccatctataactgttactttttctagtgctgctttgtgctgagagaacattttagtttactgcacttgacctgtaaaagactgattctttgtaattttagggataaattaggtggttaatttaaagaagaaatttcaatgttgcctttacatcacattaaaatataacttctttcagaaggataatagaagcactgattcatagtaaaaatcttgtttttagctttgacttttttgtggctgttttttaaaattgtaaattactagtaacatgtcatttctataggatgttttaaattatgtaccttccattggatagttaaaataatttcattttataagccaatttgagtgggaaagatacaaagcacacagttgtctccccacattaggaagagtagtgtgcattcagacattcggaatttttgctagtagttggagatgtttcagtgagtgaattaaaacaaagtctatttaactgacgtgatctattttgtgtctaaaacagaggaatttatcttgtcctagaagttcatgaactataagatctaagtttttttttcttttttaacaataaaatgattttttcttaaagtatcaaagttggaattggctaaaagtgaagtagcataactcagatatgttggaacttggtactgaagcaggctttttggtaacagaaatgacattttaaggggtaactgtatatcctgtttttagttctttgcctctcagattctgttaacttagtttaaattcactgaataccctaccactaaggcgttgctcattacaaaagcatgttaatttcaatacaggaaaactcttttgtagttttatatatggattggggaaagtgactttgttttacttttcctttttattcccctccatcctccaaacttccaatctatattatttgtaatgagaactttggtgggggaaaaaaagcattaagagaattttggatgtaaaggcatctggtatctgatggaccagcaggtagatgtggttggattgagaaattttgggtaaggtagatgatagaagaaagagattttaggagacacagttctctgtggaacactttctttcatgttcctgtaactaattgatcaagacccttttaaacgcttatctttgtcagttccgcttttgaaaaaactattgccctaggattgtttcttccatatgacagatgaaggttattggctctgagtcatttttggcattatcgtcacagataaaaagattggcaattaatctcataaaaaatctgaattattccagattgctgccgatttttgcctaagaaacaatatgtaagtatattttataaaccaaactttgtcaaccaattctattgtacgtctacccacaggcaactttgaatttacttctctagtgctaaataaacatttcagcgatttaatcccccaacttgggggatgcattatgaaaaggttttcctgggagtcaaggggtttttctttctcgctagttttgtgaaaatttttatatcaataggcaaatcattataactttttaggggttgatggtttttaagtatattgggaaattgtgggtgtctaagggatgatgttcagtgaagaaaagggatccacttttagaaaccagcattgtttgctttcaactttcatactgtatgctaactcctacgttccaaaatgtgctcatttgcagacacaggtatgcctatatacatggaagtctcaaatctgaatttttatccatctcaatatgaccatttctctctgttgtgagctgaacagattaagtatatatctgccaggttgggaaatattttggtctatcttttcctgtcatcagaacttaatttaaaaaaattatcaaaggtcagatgtgactactacagtaagttggctatcataaagaatattccataaaatgttttatctgccatacaaaattactgggtttatggccggatgtggtggctcatgcctgtaatcccagcagttcaggattacaggttatatacaggttataacaatggataccaggacatcagaatatctgataaagcaaatatttatatgctaatttaaaatatcaaattgctactggacataaaatacatctggaagcttggggtaagaagaaagaaaagaagtgttccgttctgttttcaactaagggtaaacgaagtcccagagtgttttccctgtaggtcaaattaaggtaacatgtctttatttgatcatctattgtacaccagatacctggctaagggctttccttttttctcatgtagtcttccaaatgttctttgataattgtcactatattatagatgacaaagtgaagacttacgagaaattactttgccccaaggttttttttttttccatttttaaaaatgttttaatattttaanctaaaatttttaacttttttgtttgaagctttaacacatgtacaatcncgcgac

SEQ ID NO: 277515 - DNA, 7347 bp, Homo sapiens
ggcacgagggccggctgagctgagtctcgctgctcggtgcgaggcggcggagagcgaggcctggtgagcaccgccgaggcgcgggccagctcttcgaggttgtgcgcgggagtggcacggcgggcgggcgagcgaggggctaacttcagcggtggcaccgggatcggttgccttgagcctgaaatcatgaccaccccaggaaaagagaactttcgcctgaaaagttacaagaacaaatctctgaatcccgatgagatgcgcaggaggagggaggaagaaggactgcagttacgaaagcagaaaagagaagagcagttattcaagcggagaaatgttgctacagcagaagaagaaacagaagaagaagttatgtcagatggaggctttcatgaggctcagattaataacatggagatggcaccaggtggtgtcatcacttctgacatgattgaaatgatattttccaaaagcccagagcaacagctttcagcaacacagaaattcaggaagctgctttcaaaagaacctaaccctcctattgatgaagttatcagcacaccaggagtagtggccaggtttgtggagttcctcaaacgaaaagagaattgtacactgcagtttgaatcagcttgggtactgacaaatattgcttcaggaaattctcttcagacccgaattgtgattcaggcaggagctgtgcccatcttcatagagttgctcagctcagagtttgaagatgtccaggaacaggcagtctgggctcttggcaacattgctggagatagtaccatgtgcagggactatgtcttagactgcaatatccttccccctcttttgcagttattttcaaagcaaaaccgcctgaccatgacccggaatgcagtatgggctttgtctaatctctgtagagggaaaagtccacctccagaatttgcaaaggtttctccatgtctgaatgtgctttcctggttgctgtttgtcagtgacactgatgtactggctgatgcctgctgggccctctcatatctatcagatggacccaatgataaaattcaagcggtcatcgatgcgggagtatgtaggagacttgtggaactgctgatgcataatgattataaagtggtttctcctgctttgcgagctgtgggaaacattgtcacaggggatgatattcagacacaggtaattctgaattgctcagctctgcagagtttattgcatttgctgagtagcccaaaggaatctatcaaaaaggaagcatgttggacgatatctaatattacagctggaaatagggcacagatccagactgtgatagatgccaacattttcccagccctcattagtattttacaaactgctgaatttcggacaagaaaagaagcagcttgggccatcacaaatgcaacttctggaggatcagctgaacagatcaagtacctagtagaactgggttgtatcaagccgctctgtgatctcctcacggtcatggactctaagattgtacaggttgccctaaatggcttggaaaatatcctgaggcttggagaacaggaagccaaaaggaatggcactggcattaacccttactgtgctttgattgaagaagcttatggtaagatgctttggttgaagaagtttatggccaagaatgaattgggtcatagatagagttcagtaaaaacaatactactactgctaggcactggatgaaaagaggactgttaggaaattgctgcttctgcagactggatattacttgcatatgtatttaagatgtcagtttataatactagctttcagatgtaatcccagcagtcatttctgtgctattataaaatacttatgagatacaaataatctttctttacatcaagaacagagatatatgacaaaatatagtttaggaatatatagttatggaatttccaatatttattgaagttttcaataaagattttcctttattcttcattttaggtctggataaaattgagttcttacagagtcatgaaaaccaggagatctaccaaaaggcctttgatcttattgagcattacttcgggaccgaagatgaagacagcagcattgcaccccaggttgaccttaaccagcagcagtacatcttccaacagtgtgaggctcctatggaaggtttccagctttgaagcaatactctgctttcacgttcctgtgtcagaccaggctacccagtcgagtcctcttgtggagcccacagtcctcatggagctaacttctcaaatgttttccataatactgtttgcgctcatttgcttgccttgcgcacctgctctcttacacacatctggaaaacctccggctctctgtggtggaatacccttctaataaaagggtaaccagaacggcccactctcttttacggaaaaatccctaggctttggagatccgcacttacattagagttatgggaatatacacatattaatgtggctccctttttcttgtgggggaataaaagaggactcctcctcattccctttaacatgggggaaaaaactgacattaaaagatgagactaaatctttatcttgaattttacacaactacttacgacaagggagatgtttagacctgttgtgtatacttcagagtacttttcatgagttcttccacagtgaacccttggattacctggtggctttttctagccagatttgcattaatccttactgagattggatggttttctttcctctattggcgccattcttcagatattaaagttaaaccatccactccctcaccttcagccttcagtgaatgtgctttctagttgtcaggaatgctgaagaattaacactttgactcctaaatgtgatactggtttgtagattcccttagagcagaaaggagaggggcacatattaatttgtatcgcttttgcttctctttggtcttttgtgtcttagaatttggaagtggttcatttctgttgctggtatgaggatttcgaatacttagtaatcgaaaaccatatcctgtaatttaataaaaaaaactaaggacgaaaaaaccctccaattttcccaaatgcaatcagtgtaactaggggctgtgtttctgcattaaaataaatgtttcaggctttgtggtcctgatcaaggtcctcattaaaaaattggagttcaccctaggtgcttttcccctctgtgactggcagataacacatacttttgaaagtaactttgggatttttttcttaggtgcagctcgattctaatcttttcatgctgcacacgattcctttaatgtagcatccttatctgaaagaaataaccatcttctcaacatgacctgcttaacccaaataagaacagtgatcttataacctcattgtttcctaatcattttatttcatctcctgctagtactgtgccgcttccccctccccccacacaaaataaaaacagtatctgccttctggctcatttaatgatgactgcaatctgtacctgcaaatggcgcttccagtactgtgttcagtgatccacatttgtgcttggactggaatgaaaaaatacgcttaattgccaagacaactgcaaatgagttcaatacgacttctcggtgctagttggccatcttgactcaatgttgggatacactaccagagaagatttttttgttgatgtgctgttcaaagtgaattctgaaggaaaaggttgctcacctctgtttcagagcatacccttttaaacctttttagacttgtcctcttctagaattcattataaccccaaagtgtaaaaactatttggaagttgcccctgacaagctattatacatctctggtaaatcctgctgaatgtaagggatattcagagcttttcatacctcatcatgatgttatttaagcagccaacttatgtgacctgatttaaacttttaaaaaatccacttcattcaaactagaaagagtcaaagacaaaggacatttatcagccaagagtgtgacgcattcttcgcatctagtctgtagtagtgtctgtgctctgggatggataccgtctgatgtctgtttgttattgatggcgcagccactgcaaaactagtcaactcccatctataactgttactttttctagtgctgctttgtgctgagagaacattttagtttactgcacttgacctgtaaaagactgattctttgtaattttagggataaattaggtggttaatttaaagaagaaatttcaatgttgcctttacatcacattaaaatataacttctttcagaaggataatagaagcactgattcatagtaaaaatcttgtttttagctttgacttttttgtggctgttttttaaaattgtaaattactagtaacatgtcatttctataggatgttttaaattatgtaccttccattggatagttaaaataatttcattttataagccaatttgagtgggaaagatacaaagcacacagttgtctccccacattaggaagagtagtgtgcattcagacattcggaatttttgctagtagttggagatgtttcagtgagtgaattaaaacaaagtctatttaactgacgtgatctattttgtgtctaaaacagaggaatttatcttgtcctagaagttcatgaactataagatctaagtttttttttcttttttaacaataaaatgattttttcttaaagtatcaaagttggaattggctaaaagtgaagtagcataactcagatatgttggaacttggtactgaagcaggctttttggtaacagaaatgacattttaaggggtaactgtatatcctgtttttagttctttgcctctcagattctgttaacttagtttaaattcactgaataccctaccactaaggcgttgctcattacaaaagcatgttaatttcaatacaggaaaactcttttgtagttttatatatggattggggaaagtgactttgttttacttttcctttttattcccctccatcctccaaacttccaatctatattatttgtaatgagaactttggtgggggaaaaaaagcattaagagaattttggatgtaaaggcatctggtatctgatggaccagcaggtagatgtggttggattgagaaattttgggtaaggtagatgatagaagaaagagattttaggagacacagttctctgtggaacactttctttcatgttcctgtaactaattgatcaagacccttttaaacgcttatctttgtcagttccgcttttgaaaaaactattgccctaggattgtttcttccatatgacagatgaaggttattggctctgagtcatttttggcattatcgtcacagataaaaagattggcaattaatctcataaaaaatctgaattattccagattgctgccgatttttgcctaagaaacaatatgtaagtatattttataaaccaaactttgtcaaccaattctattgtacgtctacccacaggcaactttgaatttacttctctagtgctaaataaacatttcagcgatttaatcccccaacttgggggatgcattatgaaaaggttttcctgggagtcaaggggtttttctttctcgctagttttgtgaaaatttttatatcaataggcaaatcattataactttttaggggttgatggtttttaagtatattgggaaattgtgggtgtctaagggatgatgttcagtgaagaaaagggatccacttttagaaaccagcattgtttgctttcaactttcatactgtatgctaactcctacgttccaaaatgtgctcatttgcagacacaggtatgcctatatacatggaagtctcaaatctgaatttttatccatctcaatatgaccatttctctctgttgtgagctgaacagattaagtatatatctgccaggttgggaaatattttggtctatcttttcctgtcatcagaacttaatttaaaaaaattatcaaaggtcagatgtgactactacagtaagttggctatcataaagaatattccataaaatgttttatctgccatacaaaattactgggtttatggccggatgtggtggctcatgcctgtaatcccagcagttcaggattacaggttatatacaggttataacaatggataccaggacatcagaatatctgataaagcaaatatttatatgctaatttaaaatatcaaattgctactggacataaaatacatctggaagcttggggtaagaagaaagaaaagaagtgttccgttctgttttcaactaagggtaaacgaagtcccagagtgttttccctgtaggtcaaattaaggtaacatgtctttatttgatcatctattgtacaccagatacctggctaagggctttccttttttctcatgtagtcttccaaatgttctttgataattgtcactatattatagatgacaaagtgaagacttacgagaaattactttgccccaaggttacaacacttagatggctgtccaagggcggggaagagccctgcaaattctgtgtcttgaagaaagcagtggccacgcagtagttccgtgcccaggatctcccagaactagacttggcaaccacagctgggccagccttttttgttagaccattcttcctgactcctgcttaccatcagcacccttaaaatgacgaaatcaggcttaagttgcttttaggttacacagactggagtgtaggccctctcaggccaaacatctttcctcttctgtggtgctaaaattctgtatgaccagacaagtatggtaataggtttttttttttttttttttgtgcaaatgattttgtgtttagtaaaataatggctaaacacatggatccattcaaacgcacaaatgtggaaagtattgacacggaaggaaaggctttgaagaattactgcctcaggaagcagtgccatggatgcgaatttaacacagtctacttcttcctaaaggaatatcatcccaaggaatgtcaaaaattaaaatcaccttttaatgtactggttgttgagtgtttctgctttacctcaagtcattctgaccactctacatcctgcttcaaagtgttctgacacttagatttggaatggctctaatgattctttgtacttgaatgtggtctgtcaggccatgggtgagtgccttgcacatagtagacattcaataaatactaaatgaaggaatatgcatgcatctttgtgatgttagtaaagggtgcttgataaaagaaaattcaaaggaattcccttatgctgttacttgaaacacaggatcagacatcttaagcaaatgtctcaacgtgtattatatgcagatactattcag

SEQ ID NO: 277516 - DNA, 6928 bp, Homo sapiens
ggcacgagggccggctgagctgagtctcgctgctcggtgcgaggcggcggagagcgaggcctggtgagcaccgccgaggcgcgggccagctcttcgaggttgtgcgcgggagtggcacggcgggcgggcgagcgaggggctaacttcagcggtggcaccgggatcggttgccttgagcctgaaatcatgaccaccccaggaaaagagaactttcgcctgaaaagttacaagaacaaatctctgaatcccgatgagatgcgcaggaggagggaggaagaaggactgcagttacgaaagcagaaaagagaagagcagttattcaagcggagaaatgttgctacagcagaagaagaaacagaagaagaagttatgtcagatggaggctttcatgaggctcagattaataacatggagatggcaccaggtggtgtcatcacttctgacatgattgaaatgatattttccaaaagcccagagcaacagctttcagcaacacagaaattcaggaagctgctttcaaaagaacctaaccctcctattgatgaagttatcagcacaccaggagtagtggccaggtttgtggagttcctcaaacgaaaagagaattgtacactgcagtttgaatcagcttgggtactgacaaatattgcttcaggaaattctcttcagacccgaattgtgattcaggcaggagctgtgcccatcttcatagagttgctcagctcagagtttgaagatgtccaggaacaggcagtctgggctcttggcaacattgctggagatagtaccatgtgcagggactatgtcttagactgcaatatccttccccctcttttgcagttattttcaaagcaaaaccgcctgaccatgacccggaatgcagtatgggctttgtctaatctctgtagagggaaaagtccacctccagaatttgcaaaggtttctccatgtctgaatgtgctttcctggttgctgtttgtcagtgacactgatgtactggctgatgcctgctgggccctctcatatctatcagatggacccaatgataaaattcaagcggtcatcgatgcgggagtatgtaggagacttgtggaactgctgatgcataatgattataaagtggtttctcctgctttgcgagctgtgggaaacattgtcacaggggatgatattcagacacaggtaattctgaattgctcagctctgcagagtttattgcatttgctgagtagcccaaaggaatctatcaaaaaggaagcatgttggacgatatctaatattacagctggaaatagggcacagatccagactgtgatagatgccaacattttcccagccctcattagtattttacaaactgctgaatttcggacaagaaaagaagcagcttgggccatcacaaatgcaacttctggaggatcagctgaacagatcaagtacctagtagaactgggttgtatcaagccgctctgtgatctcctcacggtcatggactctaagattgtacaggttgccctaaatggcttggaaaatatcctgaggcttggagaacaggaagccaaaaggaatggcactggcattaacccttactgtgctttgattgaagaagcttatggtctggataaaattgagttcttacagagtcatgaaaaccaggagatctaccaaaaggcctttgatcttattgagcattacttcgggaccgaagatgaagacagcagcattgcaccccaggttgaccttaaccagcagcagtacatcttccaacagtgtgaggctcctatggaaggtttccagctttgaagcaatactctgctttcacgttcctgtgtcagaccaggctacccagtcgagtcctcttgtggagcccacagtcctcatggagctaacttctcaaatgttttccataatactgtttgcgctcatttgcttgccttgcgcacctgctctcttacacacatctggaaaacctccggctctctgtggtggaatacccttctaataaaagggtaaccagaacggcccactctcttttacggaaaaatccctaggctttggagatccgcacttacattagagttatgggaatatacacatattaatgtggctccctttttcttgtgggggaataaaagaggactcctcctcattccctttaacatgggggaaaaaactgacattaaaagatgagactaaatctttatcttgaattttacacaactacttacgacaagggagatgtttagacctgttgtgtatacttcagagtacttttcatgagttcttccacagtgaacccttggattacctggtggctttttctagccagatttgcattaatccttactgagattggatggttttctttcctctattggcgccattcttcagatattaaagttaaaccatccactccctcaccttcagccttcagtgaatgtgctttctagttgtcaggaatgctgaagaattaacactttgactcctaaatgtgatactggtttgtagattcccttagagcagaaaggagaggggcacatattaatttgtatcgcttttgcttctctttggtcttttgtgtcttagaatttggaagtggttcatttctgttgctggtatgaggatttcgaatacttagtaatcgaaaaccatatcctgtaatttaataaaaaaaactaaggacgaaaaaaccctccaattttcccaaatgcaatcagtgtaactaggggctgtgtttctgcattaaaataaatgtttcaggctttgtggtcctgatcaaggtcctcattaatacttttgaaagtaactttgggatttttttcttaggtgcagctcgattctaatcttttcatgctgcacacgattcctttaatgtagcatccttatctgaaagaaataaccatcttctcaacatgacctgcttaacccaaataagaacagtgatcttataacctcattgtttcctaatcattttatttcatctcctgctagtactgtgccgcttccccctccccccacacaaaataaaaacagtatctgccttctggctcatttaatgatgactgcaatctgtacctgcaaatggcgcttccagtactgtgttcagtgatccacatttgtgcttggactggaatgaaaaaatacgcttaattgccaagacaactgcaaatgagttcaatacgacttctcggtgctagttggccatcttgactcaatgttgggatacactaccagagaagatttttttgttgatgtgctgttcaaagtgaattctgaaggaaaaggttgctcacctctgtttcagagcatacccttttaaacctttttagacttgtcctcttctagaattcattataaccccaaagtgtaaaaactatttggaagttgcccctgacaagctattatacatctctggtaaatcctgctgaatgtaagggatattcagagcttttcatacctcatcatgatgttatttaagcagccaacttatgtgacctgatttaaacttttaaaaaatccacttcattcaaactagaaagagtcaaagacaaaggacatttatcagccaagagtgtgacgcattcttcgcatctagtctgtagtagtgtctgtgctctgggatggataccgtctgatgtctgtttgttattgatggcgcagccactgcaaaactagtcaactcccatctataactgttactttttctagtgctgctttgtgctgagagaacattttagtttactgcacttgacctgtaaaagactgattctttgtaattttagggataaattaggtggttaatttaaagaagaaatttcaatgttgcctttacatcacattaaaatataacttctttcagaaggataatagaagcactgattcatagtaaaaatcttgtttttagctttgacttttttgtggctgttttttaaaattgtaaattactagtaacatgtcatttctataggatgttttaaattatgtaccttccattggatagttaaaataatttcattttataagccaatttgagtgggaaagatacaaagcacacagttgtctccccacattaggaagagtagtgtgcattcagacattcggaatttttgctagtagttggagatgtttcagtgagtgaattaaaacaaagtctatttaactgacgtgatctattttgtgtctaaaacagaggaatttatcttgtcctagaagttcatgaactataagatctaagtttttttttcttttttaacaataaaatgattttttcttaaagtatcaaagttggaattggctaaaagtgaagtagcataactcagatatgttggaacttggtactgaagcaggctttttggtaacagaaatgacattttaaggggtaactgtatatcctgtttttagttctttgcctctcagattctgttaacttagtttaaattcactgaataccctaccactaaggcgttgctcattacaaaagcatgttaatttcaatacaggaaaactcttttgtagttttatatatggattggggaaagtgactttgttttacttttcctttttattcccctccatcctccaaacttccaatctatattatttgtaatgagaactttggtgggggaaaaaaagcattaagagaattttggatgtaaaggcatctggtatctgatggaccagcaggtagatgtggttggattgagaaattttgggtaaggtagatgatagaagaaagagattttaggagacacagttctctgtggaacactttctttcatgttcctgtaactaattgatcaagacccttttaaacgcttatctttgtcagttccgcttttgaaaaaactattgccctaggattgtttcttccatatgacagatgaaggttattggctctgagtcatttttggcattatcgtcacagataaaaagattggcaattaatctcataaaaaatctgaattattccagattgctgccgatttttgcctaagaaacaatatgtaagtatattttataaaccaaactttgtcaaccaattctattgtacgtctacccacaggcaactttgaatttacttctctagtgctaaataaacatttcagcgatttaatcccccaacttgggggatgcattatgaaaaggttttcctgggagtcaaggggtttttctttctcgctagttttgtgaaaatttttatatcaataggcaaatcattataactttttaggggttgatggtttttaagtatattgggaaattgtgggtgtctaagggatgatgttcagtgaagaaaagggatccacttttagaaaccagcattgtttgctttcaactttcatactgtatgctaactcctacgttccaaaatgtgctcatttgcagacacaggtatgcctatatacatggaagtctcaaatctgaatttttatccatctcaatatgaccatttctctctgttgtgagctgaacagattaagtatatatctgccaggttgggaaatattttggtctatcttttcctgtcatcagaacttaatttaaaaaaattatcaaaggtcagatgtgactactacagtaagttggctatcataaagaatattccataaaatgttttatctgccatacaaaattactgggtttatggccggatgtggtggctcatgcctgtaatcccagcagttcaggattacaggttatatacaggttataacaatggataccaggacatcagaatatctgataaagcaaatatttatatgctaatttaaaatatcaaattgctactggacataaaatacatctggaagcttggggtaagaagaaagaaaagaagtgttccgttctgttttcaactaagggtaaacgaagtcccagagtgttttccctgtaggtcaaattaaggtaacatgtctttatttgatcatctattgtacaccagatacctggctaagggctttccttttttctcatgtagtcttccaaatgttctttgataattgtcactatattatagatgacaaagtgaagacttacgagaaattactttgccccaaggttacaacacttagatggctgtccaagggcggggaagagccctgcaaattctgtgtcttgaagaaagcagtggccacgcagtagttccgtgcccaggatctcccagaactagacttggcaaccacagctgggccagccttttttgttagaccattcttcctgactcctgcttaccatcagcacccttaaaatgacgaaatcaggcttaagttgcttttaggttacacagactggagtgtaggccctctcaggccaaacatctttcctcttctgtggtgctaaaattctgtatgaccagacaagtatggtaataggtttttttttttttttttttgtgcaaatgattttgtgtttagtaaaataatggctaaacacatggatccattcaaacgcacaaatgtggaaagtattgacacggaaggaaaggctttgaagaattactgcctcaggaagcagtgccatggatgcgaatttaacacagtctacttcttcctaaaggaatatcatcccaaggaatgtcaaaaattaaaatcaccttttaatgtactggttgttgagtgtttctgctttacctcaagtcattctgaccactctacatcctgcttcaaagtgttctgacacttagatttggaatggctctaatgattctttgtacttgaatgtggtctgtcaggccatgggtgagtgccttgcacatagtagacattcaataaatactaaatgaaggaatatgcatgcatctttgtgatgttagtaaagggtgcttgataaaagaaaattcaaaggaattcccttatgctgttacttgaaacacaggatcagacatcttaagcaaatgtctcaacgtgtattatatgcagatactattcag

SEQ ID NO: 277517 - DNA, 6008 bp, Homo sapiens
aagtctctgcagtgaagttgaggatgacttgctcactaatttcataagtttaacaaaattaaaagttttgtttgactacattattctttgtatttaggtacctagtagaactgggttgtatcaagccgctctgtgatctcctcacggtcatggactctaagattgtacaggttgccctaaatggcttggaaaatatcctgaggcttggagaacaggaagccaaaaggaatggcactggcattaacccttactgtgctttgattgaagaagcttatggtaagatgctttggttgaagaagtttatggccaagaatgaattgggtcatagatagagttcagtaaaaacaatactactactgctaggcactggatgaaaagaggactgttaggaaattgctgcttctgcagactggatattacttgcatatgtatttaagatgtcagtttataatactagctttcagatgtaatcccagcagtcatttctgtgctattataaaatacttatgagatacaaataatctttctttacatcaagaacagagatatatgacaaaatatagtttaggaatatatagttatggaatttccaatatttattgaagttttcaataaagattttcctttattcttcattttaggtctggataaaattgagttcttacagagtcatgaaaaccaggagatctaccaaaaggcctttgatcttattgagcattacttcgggaccgaagatgaagacagcagcattgcaccccaggttgaccttaaccagcagcagtacatcttccaacagtgtgaggctcctatggaaggtttccagctttgaagcaatactctgctttcacgttcctgtgtcagaccaggctacccagtcgagtcctcttgtggagcccacagtcctcatggagctaacttctcaaatgttttccataatactgtttgcgctcatttgcttgccttgcgcacctgctctcttacacacatctggaaaacctccggctctctgtggtggaatacccttctaataaaagggtaaccagaacggcccactctcttttacggaaaaatccctaggctttggagatccgcacttacattagagttatgggaatatacacatattaatgtggctccctttttcttgtgggggaataaaagaggactcctcctcattccctttaacatgggggaaaaaactgacattaaaagatgagactaaatctttatcttgaattttacacaactacttacgacaagggagatgtttagacctgttgtgtatacttcagagtacttttcatgagttcttccacagtgaacccttggattacctggtggctttttctagccagatttgcattaatccttactgagattggatggttttctttcctctattggcgccattcttcagatattaaagttaaaccatccactccctcaccttcagccttcagtgaatgtgctttctagttgtcaggaatgctgaagaattaacactttgactcctaaatgtgatactggtttgtagattcccttagagcagaaaggagaggggcacatattaatttgtatcgcttttgcttctctttggtcttttgtgtcttagaatttggaagtggttcatttctgttgctggtatgaggatttcgaatacttagtaatcgaaaaccatatcctgtaatttaataaaaaaaactaaggacgaaaaaaccctccaattttcccaaatgcaatcagtgtaactaggggctgtgtttctgcattaaaataaatgtttcaggctttgtggtcctgatcaaggtcctcattaaaaaattggagttcaccctaggtgcttttcccctctgtgactggcagataacacatacttttgaaagtaactttgggatttttttcttaggtgcagctcgattctaatcttttcatgctgcacacgattcctttaatgtagcatccttatctgaaagaaataaccatcttctcaacatgacctgcttaacccaaataagaacagtgatcttataacctcattgtttcctaatcattttatttcatctcctgctagtactgtgccgcttccccctccccccacacaaaataaaaacagtatctgccttctggctcatttaatgatgactgcaatctgtacctgcaaatggcgcttccagtactgtgttcagtgatccacatttgtgcttggactggaatgaaaaaatacgcttaattgccaagacaactgcaaatgagttcaatacgacttctcggtgctagttggccatcttgactcaatgttgggatacactaccagagaagatttttttgttgatgtgctgttcaaagtgaattctgaaggaaaaggttgctcacctctgtttcagagcatacccttttaaacctttttagacttgtcctcttctagaattcattataaccccaaagtgtaaaaactatttggaagttgcccctgacaagctattatacatctctggtaaatcctgctgaatgtaagggatattcagagcttttcatacctcatcatgatgttatttaagcagccaacttatgtgacctgatttaaacttttaaaaaatccacttcattcaaactagaaagagtcaaagacaaaggacatttatcagccaagagtgtgacgcattcttcgcatctagtctgtagtagtgtctgtgctctgggatggataccgtctgatgtctgtttgttattgatggcgcagccactgcaaaactagtcaactcccatctataactgttactttttctagtgctgctttgtgctgagagaacattttagtttactgcacttgacctgtaaaagactgattctttgtaattttagggataaattaggtggttaatttaaagaagaaatttcaatgttgcctttacatcacattaaaatataacttctttcagaaggataatagaagcactgattcatagtaaaaatcttgtttttagctttgacttttttgtggctgttttttaaaattgtaaattactagtaacatgtcatttctataggatgttttaaattatgtaccttccattggatagttaaaataatttcattttataagccaatttgagtgggaaagatacaaagcacacagttgtctccccacattaggaagagtagtgtgcattcagacattcggaatttttgctagtagttggagatgtttcagtgagtgaattaaaacaaagtctatttaactgacgtgatctattttgtgtctaaaacagaggaatttatcttgtcctagaagttcatgaactataagatctaagtttttttttcttttttaacaataaaatgattttttcttaaagtatcaaagttggaattggctaaaagtgaagtagcataactcagatatgttggaacttggtactgaagcaggctttttggtaacagaaatgacattttaaggggtaactgtatatcctgtttttagttctttgcctctcagattctgttaacttagtttaaattcactgaataccctaccactaaggcgttgctcattacaaaagcatgttaatttcaatacaggaaaactcttttgtagttttatatatggattggggaaagtgactttgttttacttttcctttttattcccctccatcctccaaacttccaatctatattatttgtaatgagaactttggtgggggaaaaaaagcattaagagaattttggatgtaaaggcatctggtatctgatggaccagcaggtagatgtggttggattgagaaattttgggtaaggtagatgatagaagaaagagattttaggagacacagttctctgtggaacactttctttcatgttcctgtaactaattgatcaagacccttttaaacgcttatctttgtcagttccgcttttgaaaaaactattgccctaggattgtttcttccatatgacagatgaaggttattggctctgagtcatttttggcattatcgtcacagataaaaagattggcaattaatctcataaaaaatctgaattattccagattgctgccgatttttgcctaagaaacaatatgtaagtatattttataaaccaaactttgtcaaccaattctattgtacgtctacccacaggcaactttgaatttacttctctagtgctaaataaacatttcagcgatttaatcccccaacttgggggatgcattatgaaaaggttttcctgggagtcaaggggtttttctttctcgctagttttgtgaaaatttttatatcaataggcaaatcattataactttttaggggttgatggtttttaagtatattgggaaattgtgggtgtctaagggatgatgttcagtgaagaaaagggatccacttttagaaaccagcattgtttgctttcaactttcatactgtatgctaactcctacgttccaaaatgtgctcatttgcagacacaggtatgcctatatacatggaagtctcaaatctgaatttttatccatctcaatatgaccatttctctctgttgtgagctgaacagattaagtatatatctgccaggttgggaaatattttggtctatcttttcctgtcatcagaacttaatttaaaaaaattatcaaaggtcagatgtgactactacagtaagttggctatcataaagaatattccataaaatgttttatctgccatacaaaattactgggtttatggccggatgtggtggctcatgcctgtaatcccagcagttcaggattacaggttatatacaggttataacaatggataccaggacatcagaatatctgataaagcaaatatttatatgctaatttaaaatatcaaattgctactggacataaaatacatctggaagcttggggtaagaagaaagaaaagaagtgttccgttctgttttcaactaagggtaaacgaagtcccagagtgttttccctgtaggtcaaattaaggtaacatgtctttatttgatcatctattgtacaccagatacctggctaagggctttccttttttctcatgtagtcttccaaatgttctttgataattgtcactatattatagatgacaaagtgaagacttacgagaaattactttgccccaaggttacaacacttagatggctgtccaagggcggggaagagccctgcaaattctgtgtcttgaagaaagcagtggccacgcagtagttccgtgcccaggatctcccagaactagacttggcaaccacagctgggccagccttttttgttagaccattcttcctgactcctgcttaccatcagcacccttaaaatgacgaaatcaggcttaagttgcttttaggttacacagactggagtgtaggccctctcaggccaaacatctttcctcttctgtggtgctaaaattctgtatgaccagacaagtatggtaataggtttttttttttttttttttgtgcaaatgattttgtgtttagtaaaataatggctaaacacatggatccattcaaacgcacaaatgtggaaagtattgacacggaaggaaaggctttgaagaattactgcctcaggaagcagtgccatggatgcgaatttaacacagtctacttcttcctaaaggaatatcatcccaaggaatgtcaaaaattaaaatcaccttttaatgtactggttgttgagtgtttctgctttacctcaagtcattctgaccactctacatcctgcttcaaagtgttctgacacttagatttggaatggctctaatgattctttgtacttgaatgtggtctgtcaggccatgggtgagtgccttgcacatagtagacattcaataaatactaaatgaaggaatatgcatgcatctttgtgatgttagtaaagggtgcttgataaaagaaaattcaaaggaattcccttatgctgttacttgaaacacaggatcagacatcttaagcaaatgtctcaacgtgtattatatgcagatactattcag

SEQ ID NO: 277518 - DNA, 3090 bp, Homo sapiens
ggcacgagggccggctgagctgagtctcgctgctcggtgcgaggcggcggagagcgaggcctggtgagcaccgccgaggcgcgggccagctcttcgaggttgtgcgcgggagtggcacggcgggcgggcgagcgaggggctaacttcagcggtggcaccgggatcggttgccttgagcctgaaatcatgaccaccccaggaaaagagaactttcgcctgaaaagttacaagaacaaatctctgaatcccgatgagatgcgcaggaggagggaggaagaaggactgcagttacgaaagcagaaaagagaagagcagttattcaagcggagaaatgttgctacagcagaagaagaaacagaagaagaagttatgtcagatggaggctttcatgaggctcagattaataacatggagatggcaccaggtggtgtcatcacttctgacatgattgaaatgatattttccaaaagcccagagcaacagctttcagcaacacagaaattcaggaagctgctttcaaaagaacctaaccctcctattgatgaagttatcagcacaccaggagtagtggccaggtttgtggagttcctcaaacgaaaagagaattgtacactgcagtttgaatcagcttgggtactgacaaatattgcttcaggaaattctcttcagacccgaattgtgattcaggcaggagctgtgcccatcttcatagagttgctcagctcagagtttgaagatgtccaggaacaggcagtctgggctcttggcaacattgctggagatagtaccatgtgcagggactatgtcttagactgcaatatccttccccctcttttgcagttattttcaaagcaaaaccgcctgaccatgacccggaatgcagtatgggctttgtctaatctctgtagagggaaaagtccacctccagaatttgcaaaggtttctccatgtctgaatgtgctttcctggttgctgtttgtcagtgacactgatgtactggctgatgcctgctgggccctctcatatctatcagatggacccaatgataaaattcaagcggtcatcgatgcgggagtatgtaggagacttgtggaactgctgatgcataatgattataaagtggtttctcctgctttgcgagctgtgggaaacattgtcacaggggatgatattcagacacaggtaattctgaattgctcagctctgcagagtttattgcatttgctgagtagcccaaaggaatctatcaaaaaggaagcatgttggacgatatctaatattacagctggaaatagggcacagatccagactgtgatagatgccaacattttcccagccctcattagtattttacaaactgctgaatttcggacaagaaaagaagcagcttgggccatcacaaatgcaacttctggaggatcagctgaacagatcaagtacctagtagaactgggttgtatcaagccgctctgtgatctcctcacggtcatggactctaagattgtacaggttgccctaaatggcttggaaaatatcctgaggcttggagaacaggaagccaaaaggaatggcactggcattaacccttactgtgctttgattgaagaagcttatggtctggataaaattgagttcttacagagtcatgaaaaccaggagatctaccaaaaggcctttgatcttattgagcattacttcgggaccgaagatgaagacagcagcattgcaccccaggttgaccttaaccagcagcagtacatcttccaacagtgtgaggctcctatggaaggtttccagctttgaagcaatactctgctttcacgttcctgtgtcagaccaggctacccagtcgagtcctcttgtggagcccacagtcctcatggagctaacttctcaaatgttttccataatactgtttgcgctcatttgcttgccttgcgcacctgctctcttacacacatctggaaaacctccggctctctgtggtggaatacccttctaataaaagggtaaccagaacggcccactctcttttacggaaaaatccctaggctttggagatccgcacttacattagagttatgggaatatacacatattaatgtggctccctttttcttgtgggggaataaaagaggactcctcctcattccctttaacatgggggaaaaaactgacattaaaagatgagactaaatctttatcttgaattttacacaactacttacgacaagggagatgtttagacctgttgtgtatacttcagagtacttttcatgagttcttccacagtgaacccttggattacctggtggctttttctagccagatttgcattaatccttactgagattggatggttttctttcctctattggcgccattcttcagatattaaagttaaaccatccactccctcaccttcagccttcagtgaatgtgctttctagttgtcaggaatgctgaagaattaacactttgactcctaaatgtgatactggtttgtagattccgggcacatattaatttgtatcgcttttgcttctctttggtcttttgtgtcttagaatttggaagtggttcatttctgttgctggtatgaggatttcgaatacttagtaatcgaaaaccatatcctgtaatttaataaaaaaaactaaggacgaaaaaaccctccaattttcccaaatgcaatcagtgtaactaggggctgtgtttctgcattaaaataaatgtttcaggctttgtggtcctgatcaaggtcctcattaaaaaattggagttcaccctaggtgcttttcccctctgtgactggcagataacacatacttttgaaagtaactttgggatttttttcttaggtgcagctcgattctaatcttttcatgctgcacacgattcctttaatgtagcatccttatctgaaagaaataaccatcttctcaacatgacctgcttaacccaaataagaacagtgatcttataacctcattgtttcctaatcattttatttcatctcctgctagtactgtgccgcttccccctccccccacacaaaataaaaacagtatctgccttctggctcattta

SEQ ID NO: 277519 - DNA, 3109 bp, Homo sapiens
ggcacgagggccggctgagctgagtctcgctgctcggtgcgaggcggcggagagcgaggcctggtgagcaccgccgaggcgcgggccagctcttcgaggttgtgcgcgggagtggcacggcgggcgggcgagcgaggggctaacttcagcggtggcaccgggatcggttgccttgagcctgaaatcatgaccaccccaggaaaagagaactttcgcctgaaaagttacaagaacaaatctctgaatcccgatgagatgcgcaggaggagggaggaagaaggactgcagttacgaaagcagaaaagagaagagcagttattcaagcggagaaatgttgctacagcagaagaagaaacagaagaagaagttatgtcagatggaggctttcatgaggctcagattaataacatggagatggcaccaggtggtgtcatcacttctgacatgattgaaatgatattttccaaaagcccagagcaacagctttcagcaacacagaaattcaggaagctgctttcaaaagaacctaaccctcctattgatgaagttatcagcacaccaggagtagtggccaggtttgtggagttcctcaaacgaaaagagaattgtacactgcagtttgaatcagcttgggtactgacaaatattgcttcaggaaattctcttcagacccgaattgtgattcaggcaggagctgtgcccatcttcatagagttgctcagctcagagtttgaagatgtccaggaacaggcagtctgggctcttggcaacattgctggagatagtaccatgtgcagggactatgtcttagactgcaatatccttccccctcttttgcagttattttcaaagcaaaaccgcctgaccatgacccggaatgcagtatgggctttgtctaatctctgtagagggaaaagtccacctccagaatttgcaaaggtttctccatgtctgaatgtgctttcctggttgctgtttgtcagtgacactgatgtactggctgatgcctgctgggccctctcatatctatcagatggacccaatgataaaattcaagcggtcatcgatgcgggagtatgtaggagacttgtggaactgctgatgcataatgattataaagtggtttctcctgctttgcgagctgtgggaaacattgtcacaggggatgatattcagacacaggtaattctgaattgctcagctctgcagagtttattgcatttgctgagtagcccaaaggaatctatcaaaaaggaagcatgttggacgatatctaatattacagctggaaatagggcacagatccagactgtgatagatgccaacattttcccagccctcattagtattttacaaactgctgaatttcggacaagaaaagaagcagcttgggccatcacaaatgcaacttctggaggatcagctgaacagatcaagtacctagtagaactgggttgtatcaagccgctctgtgatctcctcacggtcatggactctaagattgtacaggttgccctaaatggcttggaaaatatcctgaggcttggagaacaggaagccaaaaggaatggcactggcattaacccttactgtgctttgattgaagaagcttatggtctggataaaattgagttcttacagagtcatgaaaaccaggagatctaccaaaaggcctttgatcttattgagcattacttcgggaccgaagatgaagacagcagcattgcaccccaggttgaccttaaccagcagcagtacatcttccaacagtgtgaggctcctatggaaggtttccagctttgaagcaatactctgctttcacgttcctgtgtcagaccaggctacccagtcgagtcctcttgtggagcccacagtcctcatggagctaacttctcaaatgttttccataatactgtttgcgctcatttgcttgccttgcgcacctgctctcttacacacatctggaaaacctccggctctctgtggtggaatacccttctaataaaagggtaaccagaacggcccactctcttttacggaaaaatccctaggctttggagatccgcacttacattagagttatgggaatatacacatattaatgtggctccctttttcttgtgggggaataaaagaggactcctcctcattccctttaacatgggggaaaaaactgacattaaaagatgagactaaatctttatcttgaattttacacaactacttacgacaagggagatgtttagacctgttgtgtatacttcagagtacttttcatgagttcttccacagtgaacccttggattacctggtggctttttctagccagatttgcattaatccttactgagattggatggttttctttcctctattggcgccattcttcagatattaaagttaaaccatccactccctcaccttcagccttcagtgaatgtgctttctagttgtcaggaatgctgaagaattaacactttgactcctaaatgtgatactggtttgtagattcccttagagcagaaaggagaggggcacatattaatttgtatcgcttttgcttctctttggtcttttgtgtcttagaatttggaagtggttcatttctgttgctggtatgaggatttcgaatacttagtaatcgaaaaccatatcctgtaatttaataaaaaaaactaaggacgaaaaaaccctccaattttcccaaatgcaatcagtgtaactaggggctgtgtttctgcattaaaataaatgtttcaggctttgtggtcctgatcaaggtcctcattaaaaaattggagttcaccctaggtgcttttcccctctgtgactggcagataacacatacttttgaaagtaactttgggatttttttcttaggtgcagctcgattctaatcttttcatgctgcacacgattcctttaatgtagcatccttatctgaaagaaataaccatcttctcaacatgacctgcttaacccaaataagaacagtgatcttataacctcattgtttcctaatcattttatttcatctcctgctagtactgtgccgcttccccctccccccacacaaaataaaaacagtatctgccttctggctcattta

SEQ ID NO: 277520 - DNA, 5401 bp, Homo sapiens
agcggagccctggtgtgatcgccatcgggaacgccggtcgaggctaggcggggcggggcggcgtggcgcggcggcgggcctgaaatcatgaccaccccaggaaaagagaactttcgcctgaaaagttacaagaacaaatctctgaatcccgatgagatgcgcaggaggagggaggaagaaggactgcagttacgaaagcagaaaagagaagagcagttattcaagcggagaaatgttgctacagcagaagaagaaacagaagaagaagttatgtcagatggaggctttcatgaggctcagattactaacttctcaaatgttttccataatactgtttgcgctcatttgcttgccttgcgcacctgctctcttacacacatctggaaaacctccggctctctgtggtggaatacccttctaataaaagggtaaccagaacggcccactctcttttacggaaaaatccctaggctttggagatccgcacttacattagagttatgggaatatacacatattaatgtggctccctttttcttgtgggggaataaaagaggactcctcctcattccctttaacatgggggaaaaaactgacattaaaagatgagactaaatctttatcttgaattttacacaactacttacgacaagggagatgtttagacctgttgtgtatacttcagagtacttttcatgagttcttccacagtgaacccttggattacctggtggctttttctagccagatttgcattaatccttactgagattggatggttttctttcctctattggcgccattcttcagatattaaagttaaaccatccactccctcaccttcagccttcagtgaatgtgctttctagttgtcaggaatgctgaagaattaacactttgactcctaaatgtgatactggtttgtagattcccttagagcagaaaggagaggggcacatattaatttgtatcgcttttgcttctctttggtcttttgtgtcttagaatttggaagtggttcatttctgttgctggtatgaggatttcgaatacttagtaatcgaaaaccatatcctgtaatttaataaaaaaaactaaggacgaaaaaaccctccaattttcccaaatgcaatcagtgtaactaggggctgtgtttctgcattaaaataaatgtttcaggctttgtggtcctgatcaaggtcctcattaaaaaattggagttcaccctaggtgcttttcccctctgtgactggcagataacacatacttttgaaagtaactttgggatttttttcttaggtgcagctcgattctaatcttttcatgctgcacacgattcctttaatgtagcatccttatctgaaagaaataaccatcttctcaacatgacctgcttaacccaaataagaacagtgatcttataacctcattgtttcctaatcattttatttcatctcctgctagtactgtgccgcttccccctccccccacacaaaataaaaacagtatctgccttctggctcatttaatgatgactgcaatctgtacctgcaaatggcgcttccagtactgtgttcagtgatccacatttgtgcttggactggaatgaaaaaatacgcttaattgccaagacaactgcaaatgagttcaatacgacttctcggtgctagttggccatcttgactcaatgttgggatacactaccagagaagatttttttgttgatgtgctgttcaaagtgaattctgaaggaaaaggttgctcacctctgtttcagagcatacccttttaaacctttttagacttgtcctcttctagaattcattataaccccaaagtgtaaaaactatttggaagttgcccctgacaagctattatacatctctggtaaatcctgctgaatgtaagggatattcagagcttttcatacctcatcatgatgttatttaagcagccaacttatgtgacctgatttaaacttttaaaaaatccacttcattcaaactagaaagagtcaaagacaaaggacatttatcagccaagagtgtgacgcattcttcgcatctagtctgtagtagtgtctgtgctctgggatggataccgtctgatgtctgtttgttattgatggcgcagccactgcaaaactagtcaactcccatctataactgttactttttctagtgctgctttgtgctgagagaacattttagtttactgcacttgacctgtaaaagactgattctttgtaattttagggataaattaggtggttaatttaaagaagaaatttcaatgttgcctttacatcacattaaaatataacttctttcagaaggataatagaagcactgattcatagtaaaaatcttgtttttagctttgacttttttgtggctgttttttaaaattgtaaattactagtaacatgtcatttctataggatgttttaaattatgtaccttccattggatagttaaaataatttcattttataagccaatttgagtgggaaagatacaaagcacacagttgtctccccacattaggaagagtagtgtgcattcagacattcggaatttttgctagtagttggagatgtttcagtgagtgaattaaaacaaagtctatttaactgacgtgatctattttgtgtctaaaacagaggaatttatcttgtcctagaagttcatgaactataagatctaagtttttttttcttttttaacaataaaatgattttttcttaaagtatcaaagttggaattggctaaaagtgaagtagcataactcagatatgttggaacttggtactgaagcaggctttttggtaacagaaatgacattttaaggggtaactgtatatcctgtttttagttctttgcctctcagattctgttaacttagtttaaattcactgaataccctaccactaaggcgttgctcattacaaaagcatgttaatttcaatacaggaaaactcttttgtagttttatatatggattggggaaagtgactttgttttacttttcctttttattcccctccatcctccaaacttccaatctatattatttgtaatgagaactttggtgggggaaaaaaagcattaagagaattttggatgtaaaggcatctggtatctgatggaccagcaggtagatgtggttggattgagaaattttgggtaaggtagatgatagaagaaagagattttaggagacacagttctctgtggaacactttctttcatgttcctgtaactaattgatcaagacccttttaaacgcttatctttgtcagttccgcttttgaaaaaactattgccctaggattgtttcttccatatgacagatgaaggttattggctctgagtcatttttggcattatcgtcacagataaaaagattggcaattaatctcataaaaaatctgaattattccagattgctgccgatttttgcctaagaaacaatatgtaagtatattttataaaccaaactttgtcaaccaattctattgtacgtctacccacaggcaactttgaatttacttctctagtgctaaataaacatttcagcgatttaatcccccaacttgggggatgcattatgaaaaggttttcctgggagtcaaggggtttttctttctcgctagttttgtgaaaatttttatatcaataggcaaatcattataactttttaggggttgatggtttttaagtatattgggaaattgtgggtgtctaagggatgatgttcagtgaagaaaagggatccacttttagaaaccagcattgtttgctttcaactttcatactgtatgctaactcctacgttccaaaatgtgctcatttgcagacacaggtatgcctatatacatggaagtctcaaatctgaatttttatccatctcaatatgaccatttctctctgttgtgagctgaacagattaagtatatatctgccaggttgggaaatattttggtctatcttttcctgtcatcagaacttaatttaaaaaaattatcaaaggtcagatgtgactactacagtaagttggctatcataaagaatattccataaaatgttttatctgccatacaaaattactgggtttatggccggatgtggtggctcatgcctgtaatcccagcagttcaggattacaggttatatacaggttataacaatggataccaggacatcagaatatctgataaagcaaatatttatatgctaatttaaaatatcaaattgctactggacataaaatacatctggaagcttggggtaagaagaaagaaaagaagtgttccgttctgttttcaactaagggtaaacgaagtcccagagtgttttccctgtaggtcaaattaaggtaacatgtctttatttgatcatctattgtacaccagatacctggctaagggctttccttttttctcatgtagtcttccaaatgttctttgataattgtcactatattatagatgacaaagtgaagacttacgagaaattactttgccccaaggttacaacacttagatggctgtccaagggcggggaagagccctgcaaattctgtgtcttgaagaaagcagtggccacgcagtagttccgtgcccaggatctcccagaactagacttggcaaccacagctgggccagccttttttgttagaccattcttcctgactcctgcttaccatcagcacccttaaaatgacgaaatcaggcttaagttgcttttaggttacacagactggagtgtaggccctctcaggccaaacatctttcctcttctgtggtgctaaaattctgtatgaccagacaagtatggtaataggtttttttttttttttttttgtgcaaatgattttgtgtttagtaaaataatggctaaacacatggatccattcaaacgcacaaatgtggaaagtattgacacggaaggaaaggctttgaagaattactgcctcaggaagcagtgccatggatgcgaatttaacacagtctacttcttcctaaaggaatatcatcccaaggaatgtcaaaaattaaaatcaccttttaatgtactggttgttgagtgtttctgctttacctcaagtcattctgaccactctacatcctgcttcaaagtgttctgacacttagatttggaatggctctaatgattctttgtacttgaatgtggtctgtcaggccatgggtgagtgccttgcacatagtagacattcaataaatactaaatgaaggaatatgcatgcatctttgtgatgttagtaaagggtgcttgataaaagaaaattcaaaggaattcccttatgctgttacttgaaacacaggatcagacatcttaagcaaatgtctcaacgtgtattatatgcagatactattcag

SEQ ID NO: 277521 - DNA, 2383 bp, Homo sapiens
ggcacgagggccggctgagctgagtctcgctgctcggtgcgaggcggcggagagcgaggcctggtgagcaccgccgaggcgcgggccagctcttcgaggttgtgcgcgggagtggcacggcgggcgggcgagcgaggggctaacttcagcggtggcaccgggatcggttgccttgagcctgaaatcatgaccaccccaggaaaagagaactttcgcctgaaaagttacaagaacaaatctctgaatcccgatgagatgcgcaggaggagggaggaagaaggactgcagttacgaaagcagaaaagagaagagcagttattcaagcggagaaatgttgctacagcagaagaagaaacagaagaagaagttatgtcagatggaggctttcatgaggctcagattaataacatggagatggcaccaggtggtgtcatcacttctgacatgattgaaatgatattttccaaaagcccagagcaacagctttcagcaacacagaaattcaggaagctgctttcaaaagaacctaaccctcctattgatgaagttatcagcacaccaggagtagtggccaggtttgtggagttcctcaaacgaaaagagaattgtacactgcagtttgaatcagcttgggtactgacaaatattgcttcaggaaattctcttcagacccgaattgtgattcaggcaggagctgtgcccatcttcatagagttgctcagctcagagtttgaagatgtccaggaacaggcagtctgggctcttggcaacattgctggagatagtaccatgtgcagggactatgtcttagactgcaatatccttccccctcttttgcagttattttcaaagcaaaaccgcctgaccatgacccggaatgcagtatgggctttgtctaatctctgtagagggaaaagtccacctccagaatttgcaaaggtttctccatgtctgaatgtgctttcctggttgctgtttgtcagtgacactgatgtactggctgatgcctgctgggccctctcatatctatcagatggacccaatgataaaattcaagcggtcatcgatgcgggagtatgtaggagacttgtggaactgctgatgcataatgattataaagtggtttctcctgctttgcgagctgtgggaaacattgtcacaggggatgatattcagacacaggtaattctgaattgctcagctctgcagagtttattgcatttgctgagtagcccaaaggaatctatcaaaaaggaagcatgttggacgatatctaatattacagctggaaatagggcacagatccagactgtgatagatgccaacattttcccagccctcattagtattttacaaactgctgaatttcggacaagaaaagaagcagcttgggccatcacaaatgcaacttctggaggatcagctgaacagatcaagtacctagtagaactgggttgtatcaagccgctctgtgatctcctcacggtcatggactctaagattgtacaggttgccctaaatggcttggaaaatatcctgaggcttggagaacaggaagccaaaaggaatggcactggcattaacccttactgtgctttgattgaagaagcttatggtaagatgctttggttgaagaagtttatggccaagaatgaattgggtcatagatagagttcagtaaaaacaatactactactgctaggcactggatgaaaagaggactgttaggaaattgctgcttctgcagactggatattacttgcatatgtatttaagatgtcagtttataatactagctttcagatgtaatcccagcagtcatttctgtgctattataaaatacttatgagatacaaataatctttctttacatcaagaacagagatatatgacaaaatatagtttaggaatatatagttatggaatttccaatatttattgaagttttcaataaagattttcctttattcttcattttaggtctggataaaattgagttcttacagagtcatgaaaaccaggagatctaccaaaaggcctttgatcttattgagcattacttcgggaccgaagatgaagacagcagcattgcaccccaggttgaccttaaccagcagcagtacatcttccaacagtgtgaggctcctatggaaggtttccagctttgaagcaatactctgctttcacgttcctgtgtcagaccaggctacccagtcgagtcctcttgtggagcccacagtcctcatggagctaacttctcaaatgttttccataatactgtttgcgctcatttgcttgccttgcgcacctgctctcttacacacatctggaaaacctccggctctctgtggtggaatacccttctaataaaagggtaaccaga

SEQ ID NO: 277522 - DNA, 384 bp, Homo sapiens
ggaggtgagcctggcatttgctaggaaccagagtggaaccggcaaagtggtcagcaacagagtcctgatccaaatggagaaagggaaccaggcgtacctcaacctgaagtgggaaacttgataggagtttgaatcagcttgggtactgacaaatattgcttcaggaaattctcttcagacccgaattgtgattcaggcaggagctgtgcccatcttcatagagttgctcagctcagagtttgaagatgtccaggaacaggcagtctgggctcttggcaacattgctggagatagtaccatgtgcagggactatgtcttagactgcaatatccttccccctcttttgcagttattttcaaagcgagggaaaggtccacctccaaa

SEQ ID NO: 277523 - DNA, 3964 bp, Homo sapiens
ggcacgagggccggctgagctgagtctcgctgctcggtgcgaggcggcggagagcgaggcctggtgagcaccgccgaggcgcgggccagctcttcgaggttgtgcgcgggagtggcacggcgggcgggcgagcgaggggctaacttcagcggtggcaccgggatcggttgccttgagcctgaaatcatgaccaccccaggaaaagagaactttcgcctgaaaagttacaagaacaaatctctgaatcccgatgagatgcgcaggaggagggaggaagaaggactgcagttacgaaagcagaaaagagaagagcagttattcaagcggagaaatgttgctacagcagaagaagaaacagaagaagaagttatgtcagatggaggctttcatgaggctcagattaataacatggagatggcaccaggtggtgtcatcacttctgacatgattgaaatgatattttccaaaagcccagagcaacagctttcagcaacacagaaattcaggaagctgctttcaaaagaacctaaccctcctattgatgaagttatcagcacaccaggagtagtggccaggtttgtggagttcctcaaacgaaaagagaattgtacactgcagtttgaatcagcttgggtactgacaaatattgcttcaggaaattctcttcagacccgaattgtgattcaggcaggagctgtgcccatcttcatagagttgctcagctcagagtttgaagatgtccaggaacaggcagtctgggctcttggcaacattgctggagatagtaccatgtgcagggactatgtcttagactgcaatatccttccccctcttttgcagttattttcaaagcaaaaccgcctgaccatgacccggaatgcagtatgggctttgtctaatctctgtagagggaaaagtccacctccagaatttgcaaaggtttctccatgtctgaatgtgctttcctggttgctgtttgtcagtgacactgatgtactggctgatgcctgctgggccctctcatatctatcagatggacccaatgataaaattcaagcggtcatcgatgcgggagtatgtaggagacttgtggaactgctgatgcataatgattataaagtggtttctcctgctttgcgagctgtgggaaacattgtcacaggggatgatattcagacacaggtaattctgaattgctcagctctgcagagtttattgcatttgctgagtagcccaaaggaatctatcaaaaaggaagcatgttggacgatatctaatattacagctggaaatagggcacagatccagactgtgatagatgccaacattttcccagccctcattagtattttacaaactgctgaatttcggacaagaaaagaagcagcttgggccatcacaaatgcaacttctggaggatcagctgaacagatcaagtacctagtagaactgggttgtatcaagccgctctgtgatctcctcacggtcatggactctaagattgtacaggttgccctaaatggcttggaaaatatcctgaggcttggagaacaggaagccaaaaggaatggcactggcattaacccttactgtgctttgattgaagaagcttatggtctggataaaattgagttcttacagagtcatgaaaaccaggagatctaccaaaaggcctttgatcttattgagcattacttcgggaccgaagatgaagacagcagcattgcaccccaggttgaccttaaccagcagcagtacatcttccaacagtgtgaggctcctatggaaggtttccagctttgaagcaatactctgctttcacgttcctgtgtcagaccaggctacccagtcgagtcctcttgtggagcccacagtcctcatggagctaacttctcaaatgttttccataatactgtttgcgctcatttgcttgccttgcgcacctgctctcttacacacatctggaaaacctccggctctctgtggtggaatacccttctaataaaagggtaaccagaacggcccactctcttttacggaaaaatccctaggctttggagatccgcacttacattagagttatgggaatatacacatattaatgtggctccctttttcttgtgggggaataaaagaggactcctcctcattccctttaacatgggggaaaaaactgacattaaaagatgagactaaatctttatcttgaattttacacaactacttacgacaagggagatgtttagacctgttgtgtatacttcagagtacttttcatgagttcttccacagtgaacccttggattacctggtggctttttctagccagatttgcattaatccttactgagattggatggttttctttcctctattggcgccattcttcagatattaaagttaaaccatccactccctcaccttcagccttcagtgaatgtgctttctagttgtcaggaatgctgaagaattaacactttgactcctaaatgtgatactggtttgtagattcccttagagcagaaaggagaggggcacatattaatttgtatcgcttttgcttctctttggtcttttgtgtcttagaatttggaagtggttcatttctgttgctggtatgaggatttcgaatacttagtaatcgaaaaccatatcctgtaatttaataaaaaaaactaaggacgaaaaaaccctccaattttcccaaatgcaatcagtgtaactaggggctgtgtttctgcattaaaataaatgtttcaggctttgtggtcctgatcaaggtcctcattaaaaaattggagttcaccctaggtgcttttcccctctgtgactggcagataacacatacttttgaaagtaactttgggatttttttcttaggtgcagctcgattctaatcttttcatgctgcacacgattcctttaatgtagcatccttatctgaaagaaataaccatcttctcaacatgacctgcttaacccaaataagaacagtgatcttataacctcattgtttcctaatcattttatttcatctcctgctagtactgtgccgcttccccctccccccacacaaaataaaaacagtatctgccttctggctcatttaatgatgactgcaatctgtacctgcaaatggcgcttccagtactgtgttcagtgatccacatttgtgcttggactggaatgaaaaaatacgcttaattgccaagacaactgcaaatgagttcaatacgacttctcggtgctagttggccatcttgactcaatgttgggatacactaccagagaagatttttttgttgatgtgctgttcaaagtgaattctgaaggaaaaggttgctcacctctgtttcagagcatacccttttaaacctttttagacttgtcctcttctagaattcattataaccccaaagtgtaaaaactatttggaagttgcccctgacaagctattatacatctctggtaaatcctgctgaatgtaagggatattcagagcttttcatacctcatcatgatgttatttaagcagccaacttatgtgacctgatttaaacttttaaaaaatccacttcattcaaactagaaagagtcaaagacaaaggacatttatcagccaagagtgtgacgcattcttcgcatctagtctgtagtagtgtctgtgctctgggatggataccgtctgatgtctgtttgttattgatggcgcagccactgcaaaactagtcaactcccatctataactgttactttttctagtgctgctttgtgctgagagaacattttagtttactgcacttgacctgtaaaagactgattctttgtaattttagggataaattaggtggttaatttaaagaagaaatttcaatgttgcctttacatcacattaaaatataacttctttcagaaggataatagaagcactgattcatagtaaaaatcttgtttttagctttga

SEQ ID NO: 277524 - DNA, 2610 bp, Homo sapiens
ggcacgagggccggctgagctgagtctcgctgctcggtgcgaggcggcggagagcgaggcctggtgagcaccgccgaggcgcgggccagctcttcgaggttgtgcgcgggagtggcacggcgggcgggcgagcgaggggctaacttcagcggtggcaccgggatcggttgccttgagcctgaaatcatgaccaccccaggaaaagagaactttcgcctgaaaagttacaagaacaaatctctgaatcccgatgagatgcgcaggaggagggaggaagaaggactgcagttacgaaagcagaaaagagaagagcagttattcaagcggagaaatgttgctacagcagaagaagaaacagaagaagaagttatgtcagatggaggctttcatgaggctcagattaataacatggagatggcaccaggtggtgtcatcacttctgacatgattgaaatgatattttccaaaagcccagagcaacagctttcagcaacacagaaattcaggaagctgctttcaaaagaacctaaccctcctattgatgaagttatcagcacaccaggagtagtggccaggtttgtggagttcctcaaacgaaaagagaattgtacactgcagtttgaatcagcttgggtactgacaaatattgcttcaggaaattctcttcagacccgaattgtgattcaggcaggagctgtgcccatcttcatagagttgctcagctcagagtttgaagatgtccaggaacaggcagtctgggctcttggcaacattgctggagatagtaccatgtgcagggactatgtcttagactgcaatatccttccccctcttttgcagttattttcaaagcaaaaccgcctgaccatgacccggaatgcagtatgggctttgtctaatctctgtagagggaaaagtccacctccagaatttgcaaaggtttctccatgtctgaatgtgctttcctggttgctgtttgtcagtgacactgatgtactggctgatgcctgctgggccctctcatatctatcagatggacccaatgataaaattcaagcggtcatcgatgcgggagtatgtaggagacttgtggaactgctgatgcataatgattataaagtggtttctcctgctttgcgagctgtgggaaacattgtcacaggggatgatattcagacacaggtaattctgaattgctcagctctgcagagtttattgcatttgctgagtagcccaaaggaatctatcaaaaaggaagcatgttggacgatatctaatattacagctggaaatagggcacagatccagactgtgatagatgccaacattttcccagccctcattagtattttacaaactgctgaatttcggacaagaaaagaagcagcttgggccatcacaaatgcaacttctggaggatcagctgaacagatcaagtacctagtagaactgggttgtatcaagccgctctgtgatctcctcacggtcatggactctaagattgtacaggttgccctaaatggcttggaaaatatcctgaggcttggagaacaggaagccaaaaggaatggcactggcattaacccttactgtgctttgattgaagaagcttatggtctggataaaattgagttcttacagagtcatgaaaaccaggagatctaccaaaaggcctttgatcttattgagcattacttcgggaccgaagatgaagacagcagcattgcaccccaggttgaccttaaccagcagcagtacatcttccaacagtgtgaggctcctatggaaggtttccagctttgaagcaatactctgctttcacgttcctgtgtcagaccaggctacccagtcgagtcctcttgtggagcccacagtcctcatggagctaacttctcaaatgttttccataatactgtttgcgctcatttgcttgccttgcgcacctgctctcttacacacatctggaaaacctccggctctctgtggtggaatacccttctaataaaagggtaaccagaacggcccactctcttttacggaaaaatccctaggctttggagatccgcacttacattagagttatgggaatatacacatattaatgtggctccctttttcttgtgggggaataaaagaggactcctcctcattccctttaacatgggggaaaaaactgacattaaaagatgagactaaatctttatcttgaattttacacaatctacttcttcctaaaggaatatcatcccaaggaatgtcaaaaattaaaatcaccttttaatgtactggttgttgagtgtttctgctttacctcaagtcattctgaccactctacatcctgcttcaaagtgttctgacacttagatttggaatggctctaatgattctttgtacttgaatgtggtctgtcaggccatgggtgagtgccttgcacatagtagacattcaataaatactaaatgaaggaatatgcatgcatctttgtgatgttagtaaagggtgcttgataaaagaaaattcaaaggaattcccttatgctgttacttgaaacacaggatcagacatcttaagcaaatgtctcaacgtgtattatatgcagatactattcag

SEQ ID NO: 277525 - DNA, 2313 bp, Homo sapiens
ggcacgagggccggctgagctgagtctcgctgctcggtgcgaggcggcggagagcgaggcctggtgagcaccgccgaggcgcgggccagctcttcgaggttgtgcgcgggagtggcacggcgggcgggcgagcgaggggctaacttcagcggtggcaccgggatcggttgccttgagcctgaaatcatgaccaccccaggaaaagagaactttcgcctgaaaagttacaagaacaaatctctgaatcccgatgagatgcgcaggaggagggaggaagaaggactgcagttacgaaagcagaaaagagaagagcagttattcaagcggagaaatgttgctacagcagaagaagaaacagaagaagaagttatgtcagatggaggctttcatgaggctcagattaataacatggagatggcaccaggtggtgtcatcacttctgacatgattgaaatgatattttccaaaagcccagagcaacagctttcagcaacacagaaattcaggaagctgctttcaaaagaacctaaccctcctattgatgaagttatcagcacaccaggagtagtggccaggtttgtggagttcctcaaacgaaaagagaattgtacactgcagtttgaatcagcttgggtactgacaaatattgcttcaggaaattctcttcagacccgaattgtgattcaggcaggagctgtgcccatcttcatagagttgctcagctcagagtttgaagatgtccaggaacaggcagtctgggctcttggcaacattgctggagatagtaccatgtgcagggactatgtcttagactgcaatatccttccccctcttttgcagttattttcaaagcaaaaccgcctgaccatgacccggaatgcagtatgggctttgtctaatctctgtagagggaaaagtccacctccagaatttgcaaaggtttctccatgtctgaatgtgctttcctggttgctgtttgtcagtgacactgatgtactggctgatgcctgctgggccctctcatatctatcagatggacccaatgataaaattcaagcggtcatcgatgcgggagtatgtaggagacttgtggaactgctgatgcataatgattataaagtggtttctcctgctttgcgagctgtgggaaacattgtcacaggggatgatattcagacacaggtatgaagaagtagtaacttttttttgtcctttaaaaacagtatattgaacttcatgatcatgtttctattatcgtattttactccatattattagggaaacttgatactctgttacactaatgtttaaaaatgttgggccgggggcggtcactcacgcctgtaatcccagcactttgggagactgaggcggacggattgcctgagctcaggagttcgacaccagcctgggcaacatggtgaaacctcatctctactaaaaatacaaaaaattagccgggcgtggttgcacacgcctgtagttccagctaccgggaggctgaggcaggagaatcacttgaacccaggaggtggaagctgcagtgagctgagattgcaccactgcactccagcctgggcaacagagtgagactccatctcaaaaaagaaaaaaaaaggttagagataatgacataactcttttcaatttatttctgacaggagaaggggtgttaatagtcaaactagcttagaaattataattagtatcatgaatatttttataaatctcacagttttttccatttaagtttttctttaattttagactgtgatagatgccaacattttcccagccctcattagtattttacaaactgctgaatttcggacaagaaaagaagcagcttgggccatcacaaatgcaacttctggaggatcagctgaacagatcaagtaagtaccaatcaggcagcatattgtaagttaaagaaaaattattattgtgtctatcactttataacctcccacatattacctagagtaaaagattagctgcctttgaggggaaaagtaagtgagagacgatcttaccaaataagaatgtttagttccagtccttaggaaattgtccttggtgtcataattagatgtgtatttaattctttataactctcccatttctttttgctgaaaaacaatcctgggatataagaagtaggcatagtcgaggcttgaggcaatagaaatccttgcttcaacctactctggagctacttgtcagaaatatcttgggtaatataggttacttgtagaacttgagcccaagtttaataactcactcttgccctttttagtttagatgtcttaatag

SEQ ID NO: 277526 - DNA, 1221 bp, Homo sapiens
ggcacgagggccggctgagctgagtctcgctgctcggtgcgaggcggcggagagcgaggcctggtgagcaccgccgaggcgcgggccagctcttcgaggttgtgcgcgggagtggcacggcgggcgggcgagcgaggggctaacttcagcggtggcaccgggatcggttgccttgagcctgaaatcatgaccaccccaggaaaagagaactttcgcctgaaaagttacaagaacaaatctctgaatcccgatgagatgcgcaggaggagggaggaagaaggactgcagttacgaaagcagaaaagagaagagcagttattcaagcggagaaatgttgctacagcagaagaagaaacagaagaagaagttatgtcagatggaggctttcatgaggctcagattaataacatggagatggcaccaggtggtgtcatcacttctgacatgattgaaatgatattttccaaaagcccagagcaacagctttcagcaacacagaaattcaggaagctgctttcaaaagaacctaaccctcctattgatgaagttatcagcacaccaggagtagtggccaggtttgtggagttcctcaaacgaaaagagaattgtacactgcagtttgaatcagcttgggtactgacaaatattgcttcaggaaattctcttcagacccgaattgtgattcaggcaggagctgtgcccatcttcatagagttgctcagctcagagtttgaagatgtccaggaacaggcagtctgggctcttggcaacattgctggagatagtaccatgtgcagggactatgtcttagactgcaatatccttccccctcttttgcagttattttcaaagcaaaaccgcctgaccatgacccggaatgcagtatgggctttgtctaatctctgtagagggaaaagtccacctccagaatttgcaaaggtttctccatgtctgaatgtgctttcctggttgctgtttgtcagtgacactgatgtactggctgatgcctgctgggccctctcatatctatcagatggacccaatgataaaattcaagcggtcatcgatgcgggagtatgtaggagacttgtggaactgctgatgcataatgattatatagtggttgacacacttcattccacctttacaagcgtctgggacaatgtcacattcatcaatatctttgcattgctgtctcacaggatcccacgtatatccgta

SEQ ID NO: 277527 - DNA, 1333 bp, Homo sapiens
ggcacgagggccggctgagctgagtctcgctgctcggtgcgaggcggcggagagcgaggcctggtgagcaccgccgaggcgcgggccagctcttcgaggttgtgcgcgggagtggcacggcgggcgggcgagcgaggggctaacttcagcggtggcaccgggatcggttgccttgagcctgaaatcatgaccaccccaggaaaagagaactttcgcctgaaaagttacaagaacaaatctctgaatcccgatgagatgcgcaggaggagggaggaagaaggactgcagttacgaaagcagaaaagagaagagcagttattcaagcggagaaatgttgctacagcagaagaagaaacagaagaagaagttatgtcagatggaggctttcatgaggctcagattaataacatggagatggcaccaggtggtgtcatcacttctgacatgattgaaatgatattttccaaaagcccagagcaacagctttcagcaacacagaaattcaggaagctgctttcaaaagaacctaaccctcctattgatgaagttatcagcacaccaggagtagtggccaggtttgtggagttcctcaaacgaaaagagaattgtacactgcagtttgaatcagcttgggtactgacaaatattgcttcaggaaattctcttcagacccgaattgtgattcaggcaggagctgtgcccatcttcatagagttgctcagctcagagtttgaagatgtccaggaacaggcagtctgggctcttggcaacattgctggagatagtaccatgtgcagggactatgtcttagactgcaatatccttccccctcttttgcagttattttcaaagcaaaaccgcctgaccatgacccggaatgcagtatgggctttgtctaatctctgtagagggaaaagtccacctccagaatttgcaaaggtttctccatgtctgaatgtgctttcctggttgctgtttgtcagtgacactgatgtactggctgatgcctgctgggccctctcatatctatcagatggacccaatgataaaattcaagcggtcatcgatgcgggagtatgtaggagacttgtggaactgctgatgcataatgattataaagtggtttctcctgctttgcgagctgtgggaaacattgtcacaggggatgatattcagacacaggtaattctgaattgctcagctctgcagagtttattgcatttgctgagtagcccaaaggaatctatcaaaaaggaagcatgttggcatctatcacagtctggatctgtgccctatttccagctgtaatattagatatcgtccaacgtcgacg

SEQ ID NO: 277528 - DNA, 1658 bp, Homo sapiens
acagcaatcaaatcagtgactgccagggactgggaggtgggggtgatagatatattctacttcttaaaaaaaaaaaatcaaagtatatatcctaaaacagtgattttactgtatgtaaattacactcccagaaaccttttttttaattaagtattatttcaaaattctgtttttggacaaaaccaagagccattccaaaacgttcaagaccgtcagcactgatagatgttgaagcaatttactcagtcacaatttaacaaacagctatataaaatcaaagctaaccactgaggcactatttaaccatgtttcccttttttcagtaagactggactattattattacagttcctcattccctaaagttagcgtttcttttcaccactttgttaccagttctcaaattactgtcccaaaaaactgtagtctactcaagaaatctcacaaggagatattttttcctacaagatgctgcggccatttgcacattcttatgcaaaaattaacaacttgacagtcaagcagcaccttcatagcccgtttcaacctatatatggcctaaatatatatggcaaaaataccaatattggtatttttgaaatgcacaaagttccattactgttctgagcaacttttaaaagtctgaaaacatttaattacatatttcttaagattaacaaagtcaaatcctttttccataaaaatcttgccaaaaaaaaaaatcaaccccaaatttctcaatcttcaaaaccagtaaggcacaaaatctaaacccaccgttaccaagaatgcacaaatgggcaagaacgtttacttacacatcttcatgtcatcacaaagggagggggattaactccagaaaggaaccaccataaaacaaacctatggactcaaaactctcaacagaattcctgccagcaacctataatcaaatataggatccttttaacagaaaacacttgatcaaattgctagagaagagcagcacgttaacatgcgcgcagatgactccgattagcaagctttcaagcacttcaaaactatatagactgccacgctttcaaatgcctaactcaagaatcttttccataaagttcgtcccacttccgactgtagtacaaaaaacatcaactcttatcttccctcaatgtcttttccagagggaggcaaggctcagccgtcttccagctcaacgcttctcaacctgagcactactgactttaggggcaggataattcttcgctgagagggggccggggcggttatcttgggcactgcaggaccttcagcagcctctatacactgggtgcccaacaacagccccttctaggagaagccaaccaaaaacgtccccaggcgttgccatctgtcccggggggcggagggaggtgtcaaaatcgcctccggtggatctagctagagcaccgccgcgattctcaagttgcaaggtattcaaggttagcagctgggctggggagcagaaaacacacttggaacgcagggcagacaccctgacgcaggcggcccttccctgaatcggcaatgcagcaaggttatctttacctttgtagagattggtgacggcggtggctgcgttttggaaggggacccagagagaaagtcctggctgctgacacactcggtctgaaaagcaagcc

SEQ ID NO: 277529 - DNA, 1147 bp, Homo sapiens
tgtccaagtcaaagaaaaccgcccgcacgcggctcagccccatagcgccggccgctggcgcgaaccgtagccttgccaccgccgcctgcgcatgcgcaaggcggactgcccagagagacgtgggaggagccgcgaagtcaccagaccatctcccggcgcgggtggaattcccgcgatctgtctcattccctgcgccgccgagaaaagtgagatcccgcgagactcccaggatgaagtctggctctgttgcccaagctggagtgtgttggcaccatcttggttcactgcaacttccacctcccaggctccagtgattctcctgcctcagcctcaagggtagctgagattacaggctggagtgcagtggcatgatctcacctcactgagaacctccacctccagggttcaagtgattctgctacctcaacctcccaaatagctgggactacagggtctcattctgtcacccaggttggagtgcagtggcaacatcatagctcactgcagccttgaacccctgggctcaagtgatcctcctgcttcagcctcctgagtagctggggctacagctttttaactgaaatgatacaagaaaatggctataattttgatagatcatcctctaccatttagtggcataaaagaacttggtcgacagtttggtttaacttttgggcttgatcaggttgaaaccagaaaagccattggcatggtacacaaggatggcgttgaatttggtttaaagagctaattcggaggggaaggcatccactttaaatcgcgatcttagaattccggcgtcacgttcgtcataacatcttgccacgacacaaagacccggctgtttcttgtgacaaacgttagaaccccttaatggtacactcgcaacagaagagtggtgtgggggccaccacagttgttaccacacacacttggtgccagcaggagtaagaagacccgacagaatatgggaacacaacgtggaccgtcagttgaacgaaacttactttggcagccacgagcgagcgcactactcatcagcaactggatctgtgtgccatcaccaccgcatcgaccaccactcatactaacgagctctacccagtacgcccatgctgaggattctgtcgactgacttcccccgaca

SEQ ID NO: 277530 - DNA, 734 bp, Homo sapiens
tgtccaagtcaaagaaaaccgcccgcacgcggctcagccccatagcgccggccgctggcgcgaaccgtagccttgccaccgccgcctgcgcatgcgcaaggcggactgcccagagagacgtgggaggagccgcgaagtcaccagaccatctcccggcgcgggtggaattcccgcgatctgtctcattccctgcggctccagcctgagcaagagtgagactccgtcacaaaaaaaaaaaaaaaaaaaattagtcgggtgtggtggcgagcgcctgtagtcccagctactcaggagtctgaggcaggagaatggtgtgaacgtgggaggcagagcttgcagtgagcggagaccgtgccactgcactccagcctgggcaacagagcaagactccgcatcaagaaaaaaaaaaagttaaatatctccacaggttgcttactctatgttcactctatcctcggttttttgggaacaaactctatttggctagaatatatcatccttttcatgtattgctggatactacttgtccatattttggtgagaattcttgactattttcctctggaatgattacatgtaagggcacatgagaactcttgttgaaatgttctgtatcttgattgaggtgataagtgacctgtgtatactttaaagagtcaaaactcattatacagttaaaagcagtgcttcttacggtatgcaagttacacctcaacactgattaaaaatcctct

SEQ ID NO: 277531 - DNA, 862 bp, Homo sapiens
agccctggaaacgtgtgtcggcgccgccggatgcggcgacttctcagtggctgtggctggcgttggtccgaagcgtggtgttcttccctggtgtctttctgcttatctctttcctccctgggccctccggcgcgagggaccgtcatcacctccccgagagaggttgtccgcgctgccaggcgctgggcagcaggctctccgggtggccgggcgggcggcgcggagacgtcggcgggcctgatgtctgccttgagcgcccgcggtcctagcctgcctaatggcaccattgttgtgcggatgctgatgcccagcgttgagcctgtcgtctcctatattaggggaagttctcctggcccttcccaactacctcccctgtgcaagtttattacaactgaacggcctcaaggatgaagtctggctctgttgcccaagctggagtgtgttggcaccatcttggttcactgcaacttccacctcccaggctccagtgattctcctgcctcagcctcaagggtagctgagattacaggctggagtgcagtggcatgatctcacctcactgagaacctccacctccagggttcaagtgattctgctacctcaacctcccaaatagctgggactacaggaaaacattctgcctgtgttgcaatatccagaaactcctagatatactgatcaacagcagtttgaatgttttcctgatcagtgccattgacatagtcctgactcaccagagaagcaaagcaagcctcgaaagatggctccaattcattcaccaggtactgtgagaaggtctcagagtatctggtgctgcctgaagaagtgaagcctggccccggagctccaatgtgggtagtgg

SEQ ID NO: 277532 - DNA, 536 bp, Homo sapiens
gctgcaagttcgactttaaaaggatccccggcgttttgatgtaaaagagttcccgggaagactccccaggaaatggcaccattgttgtgcggatgctgatgcccagcgttgagcctgtcgtctcctatattaggggaagttctcctggcccttcccaactacctcccctgtgcaagtttattacaactgaacggcctcaaggatgaagtctggctctgttgcccaagctggagtgtgttggcaccatcttggttcactgcaacttccacctcccaggctccagtgattctcctgcctcagcctcaagggtagctgagattacaggctggagtgcagtggcatgatctcacctcactgagaacctccacctccagggttcaagtgattctgctacctcaacctcccaaatagctgggactacagacaggtgtgtgccaccttgcctgctaatttttgtatttttagtaaagacggggtttcaccatgctagccaggctggtctcgaactcctgacctcaggtgatccacccacctca

SEQ ID NO: 277533 - DNA, 314 bp, Homo sapiens
acatctacccagctaccgccagccctttctgttgtttgctggatcccacccttactgaggggcatctttcagcaattctttcctccttggttttgcatcttcaaagttctcccaccctttgaatccactccatttagcatttcactgacaccactccaccgaaactactcttgtcaggccaccaatgaccttcaccttgctcttcaatcgccatttcctggcctcttcttatttgtcctatcagtagcatttgaactagccagtcactgctttctccttgataagcttttttttttctctttctgtttttcttt

SEQ ID NO: 277534 - DNA, 595 bp, Homo sapiens
ttttgactgtgagacttgatctaggaatgaatggaaatgcaactgtagtcatgtttctcctgcattcttccatctgcagaatggcaccattgttgtgcggatgctgatgcccagcgttgagcctgtcgtctcctatattaggggaagttctcctggcccttcccaactacctcccctgtgcaagtttattacaactgaacggcctcaagggcaagtgtgccttctggtttaaagttttctcagattagggcactgtcaggtttatagggatgaaacagaagcaaccagaagagaatcttaggctcccacatctacccagctaccgccagccctttctgttgtttgctggatcccacccttactgaggggcatctttcagcaattctttcctccttggttttgcatcttcaaagttctcccaccctttgaatccactccatttagcatttcactgacaccactccaccgaaactactcttgtcaggccaccaatgaccttcaccttgctcttcaatcgccatttcctggcctcttcttatttgtcctatcagtagcatttgaactagccagtcactgctttctccttgataagctt

SEQ ID NO: 277535 - DNA, 824 bp, Homo sapiens
agccctggaaacgtgtgtcggcgccgccggatgcggcgacttctcagtggctgtggctggcgttggtccgaagcgtggtgttcttccctggtgtctttctgcttatctctttcctccctgggccctccggcgcgagggaccgtcatcacctccccgagagaggttgtccgcgctgccaggcgctgggcagcaggctctccgggtggccgggcgggcggcgcggagacgtcggcgggcctgatgtctgccttgagcgcccgcggtcctagcctgcctgtacgcgcaggtcactgtagaatggcaccattgttgtgcggatgctgatgcccagcgttgagcctgtcgtctcctatattaggggaagttctcctggcccttcccaactacctcccctgtgcaagtttattacaactgaacggcctcaaggatgaagtctggctctgttgcccaagctggagtgtgttggcaccatcttggttcactgcaacttccacctcccaggctccagtgattctcctgcctcagcctcaagggtagctgagattacaggctggagtgcagtggcatgatctcacctcactgagaacctccacctccagggttcaagtgattctgctacctcaacctcccaaatagctgggactacagggtctcattctgtcacccaggttggagtgcagtggcaacatcatagctcactgcagccttgaacccctgggctcaagtgatcctcctgcttcagcctcctgagtagctggggctacaggcactttccctacattttcaaaggcctgcatcatcacatctgccacagcattctctat

SEQ ID NO: 277536 - DNA, 695 bp, Homo sapiens
tgtccaagtcaaagaaaaccgcccgcacgcggctcagccccatagcgccggccgctggcgcgaaccgtagccttgccaccgccgcctgcgcatgcgcaaggcggactgcccagagagacgtgggaggagccgcgaagtcaccagaccatctcccggcgcgggtggaattcccgcgatctgtctcattccctgcgccgccgagaaaagtgagatcccgcgagactcccaggaatggcaccattgttgtgcggatgctgatgcccagcgttgagcctgtcgtctcctatattaggggaagttctcctggcccttcccaactacctcccctgtgcaagtttattacaactgaacggcctcaaggatgaagtctggctctgttgcccaagctggagtgtgttggcaccatcttggttcactgcaacttccacctcccaggctccagtgattctcctgcctcagcctcaagggtagctgagattacaggctggagtgcagtggcatgatctcacctcactgagaacctccacctccagggttcaagtgattctgctacctcaacctcccaaatagctgggactacagacaggtgtgtgccaccttgcctgctaatttttgtatttttagtaaagacggggtttcaccatgctagccaggctggtctcgaactcctgacctcaggtgatccacccacctca

SEQ ID NO: 277537 - DNA, 1739 bp, Homo sapiens
catgaagaatttcaattagatatttcttctacgtagtatagttataactttgcattccattgttttccttctctatagtccattgtatttctgtggggtttttttttttcaggttttgagttcaagaacgagattaaaaaagaaaatctaaaatgggatgattcagaggaagtagaaataaacaaggctttacagagaaagtccagaggagtttattggcactctgagctacaaaaaggcttggagagtgagccaacatcaagaaggcaatgtagaaattctccaggggagagtgaggagaaaaccccatcccaggagaagatgagtcaccagagtttttgtgccagggacaaagcctgtacacatatcctctgtgggaaaaactgctctcagagtgtgcactctccccacaagccagcgctcaaactggaaaaagtatctcaatgtcctgaatgtgggaaaacctttagccgaagttcttatcttgttcggcatcaaagaatccacacaggcgagaagcctcacaagtgcagtgagtgcgggaagggctttagtgagcgctccaacctcactgcccacctacgaactcacacaggggagaggccctatcagtgtgggcaatgtgggaaaagcttcaaccagagttccagcctcattgtccaccagaggacccataccggggaaaagccttaccagtgcattgtctgtggaaagagattcaacaacagttcccagttcagtgctcaccggcgcatccacactggggagagcccatacaagtgtgcagtgtgtgggaaaatcttcaacaatagctcccacttcagtgcccaccgaaaaacccacactggtgaaaagccttacaggtgttctcactgtgagagaggcttcactaagaactctgccctcacccgtcatcagacagtacacatgaaagcagtactctcatcacaggaaggaagagatgcgttatgagtgtgtcggtaaactgtcagattaagttcctcaggtcagcatgtatgagctttcttctgctgtggagagatctagccagtccctgactttgcaacagacctactgactactggatcttaagacccatgtctaggaccaggagtcagcataaggacgctgacctctcctggctgtgcctgtgactccagagtcctatcttactgtgacttaaagtttgatggagagaaagctgtaggatccataaattctaccaggaaaccagggtcttcctgttcctagcactgagaatgggcacccagtggtccaagaacactttctgggctaacatagtcctcacacagggctgagaaagaaagtgtctcctttcctggaaagcacatgtaaaagttaagggcctgaatctcttctaaaccaataattgacctctaggcacccaccataatactgctaccttcagggcagaagacactgctctttgtaacccagccaccaccaaaaagcaaacagaaagaaggaaggatggttaagccattggataatactgaatctgtttccctaagtgacttaaccttagagcaagcacaacatccaggttaattttttgtaagatttctccttttattattgccctcatcatagttcctgattgtctcttaaagtaagtggtttatagacattactatttctgataataatttacaaactactataaacaaatttataaacattactaatttctgatgaaaataaagttgtttctccctcca

SEQ ID NO: 277538 - DNA, 3135 bp, Homo sapiens
gcgtgcgtaatgggcggagcgaatcgcgccgctgacttccggcccggaggctgagggagtttgtggagtcgcgagtgctggtgtccgacatccttcaaagttgagccctttttttccgctgtgagtctctacacatgtctgacactctcatgtcccacggattacagaaagacattccttgcaggagaacatggcttcccagtgatgtgggaaagatggactctgatctccagggtagaagtggcaaccagagtaagccagttcgttgaagcaaatgatggctgcagtgaagagtaccgaggcacacccatcctcaaacaaggatcccacacagggccagaaatcagccctccagggtaacagccctgactccgaggcctcccgtcagcgcttcaggcagttttgctaccaggaggtaactggcccacatgaagcttttagcaaactctgggaactctgttgtcagtggctgaggccgaagacccactcaaaagaggaaatcctggagctgctggttttggagcagtttctgactatcttgccagaggagatccagacctgggtgagggagcagcatccagaaaacggcgaggaagctgtggctctggttgaggatgtacagagagctcctggacaacaggttctagattctgagaaggacttgaaagtactcatgaaggagatggcccctttgggagcaaccagagaatcactgagatcccaatggaaacaggaggttcagccagaggaaccgacttttaagggatcacagagctcacaccaaagaccaggggaacagtcagaagcctggcttgctcctcaggctcccaggaacctgcctcaaaacacaggtctccacgaccaggagacaggtgctgtggtctggacagctgggtcccagggaccagccatgcgtgacaacagagctgtatccctctgtcagcaagaatggatgtgcccaggccctgcacaaagggccctctacaggggtgccacccagaggaaggacagtcacgtctcgctggcaacaggtgtgccctggggctatgaagagaccaagacgctcctggctattcttagtagttctcaattttatggaaaactccagacctgtcagcagaacagccagatctacagggccatggcggaaggactctgggagcagggttttctgcggaccccagaacagtgtcgcaccaagttcaaaagcctacagttgagttaccgcaaagtgaggagaggccgtgtgcctgagccttgtatcttttatgaggaaatgaatgctctttcaggctcctgggcctctgcacctcctatggcaagcgatgctgttcctggccaagaaggaagtgatattgaggctggagagctgaatcaccagaatggggaacccacggaggtagaagatggcactgtggatggtgcagacagggatgaaaaggacttcaggaatcctggccaggaagtcaggaaactagacctgccagtgctgttcccaaacagacttggttttgagttcaagaacgagattaaaaaagaaaatctaaaatgggatgattcagaggaagtagaaataaacaaggctttacagagaaagtccagaggagtttattggcactctgagctacaaaaaggcttggagagtgagccaacatcaagaaggcaatgtagaaattctccaggggagagtgaggagaaaaccccatcccaggagaagatgagtcaccagagtttttgtgccagggacaaagcctgtacacatatcctctgtgggaaaaactgctctcagagtgtgcactctccccacaagccagcgctcaaactggaaaaagtatctcaatgtcctgaatgtgggaaaacctttagccgaagttcttatcttgttcggcatcaaagaatccacacaggcgagaagcctcacaagtgcagtgagtgcgggaagggctttagtgagcgctccaacctcactgcccacctacgaactcacacaggggagaggccctatcagtgtgggcaatgtgggaaaagcttcaaccagagttccagcctcattgtccaccagaggacccataccggggaaaagccttaccagtgcattgtctgtggaaagagattcaacaacagttcccagttcagtgctcaccggcgcatccacactggggagagcccatacaagtgtgcagtgtgtgggaaaatcttcaacaatagctcccacttcagtgcccaccgaaaaacccacactggtgaaaagccttacaggtgttctcactgtgagagaggcttcactaagaactctgccctcacccgtcatcagacagtacacatgaaagcagtactctcatcacaggaaggaagagatgcgttatgagtgtgtcggtaaactgtcagattaagttcctcaggtcagcatgtatgagctttcttctgctgtggagagatctagccagtccctgactttgcaacagacctactgactactggatcttaagacccatgtctaggaccaggagtcagcataaggacgctgacctctcctggctgtgcctgtgactccagagtcctatcttactgtgacttaaagtttgatggagagaaagctgtaggatccataaattctaccaggaaaccagggtcttcctgttcctagcactgagaatgggcacccagtggtccaagaacactttctgggctaacatagtcctcacacagggctgagaaagaaagtgtctcctttcctggaaagcacatgtaaaagttaagggcctgaatctcttctaaaccaataattgacctctaggcacccaccataatactgctaccttcagggcagaagacactgctctttgtaacccagccaccaccaaaaagcaaacagaaagaaggaaggatggttaagccattggataatactgaatctgtttccctaagtgacttaaccttagagcaagcacaacatccaggttaattttttgtaagatttctccttttattattgccctcatcatagttcctgattgtctcttaaagtaagtggtttatagacattactatttctgataataatttacaaactactataaacaaatttataaacattactaatttctgatgaaaataaagttgtttctccctcca

SEQ ID NO: 277539 - DNA, 2746 bp, Homo sapiens
ggaaagggataggaagtaaatcacaagaaccagagtgaaggaatgtttgataggtttatattgtctttttccatcctcttcagacatccttcaaagttgagccctttttttccgctgtgagtctctacacatgtctgacactctcatgtcccacggattacagaaagacattccttgcaggagaacatggcttcccagtgatgtgggaaagatggactctgatctccagggtagaagtggcaaccagagtaagccagttcgttgaagcaaatgatggctgcagtgaagagtaccgaggcacacccatcctcaaacaaggatcccacacagggccagaaatcagccctccagggtaacagccctgactccgaggcctcccgtcagcgcttcaggcagttttgctaccaggaggtaactggcccacatgaagcttttagcaaactctgggaactctgttgtcagtggctgaggccgaagacccactcaaaagaggaaatcctggagctgctggttttggagcagtttctgactatcttgccagaggagatccagacctgggtgagggagcagcatccagaaaacggcgaggaagctgtggctctggttgaggatgtacagagagctcctggacaacagcaacaggtgtgccctggggctatgaagagaccaagacgctcctggctattcttagtagttctcaattttatggaaaactccagacctgtcagcagaacagccagatctacagggccatggcggaaggactctgggagcagggttttctgcggaccccagaacagtgtcgcaccaagttcaaaagcctacagttgagttaccgcaaagtgaggagaggccgtgtgcctgagccttgtatcttttatgaggaaatgaatgctctttcaggctcctgggcctctgcacctcctatggcaagcgatgctgttcctggccaagaaggaagtgatattgaggctggagagctgaatcaccagaatggggaacccacggaggtagaagatggcactgtggatggtgcagacagggatgaaaaggacttcaggaatcctggccaggaagtcaggaaactagacctgccagtgctgttcccaaacagacttggttttgagttcaagaacgagattaaaaaagaaaatctaaaatgggatgattcagaggaagtagaaataaacaaggctttacagagaaagtccagaggagtttattggcactctgagctacaaaaaggcttggagagtgagccaacatcaagaaggcaatgtagaaattctccaggggagagtgaggagaaaaccccatcccaggagaagatgagtcaccagagtttttgtgccagggacaaagcctgtacacatatcctctgtgggaaaaactgctctcagagtgtgcactctccccacaagccagcgctcaaactggaaaaagtatctcaatgtcctgaatgtgggaaaacctttagccgaagttcttatcttgttcggcatcaaagaatccacacaggcgagaagcctcacaagtgcagtgagtgcgggaagggctttagtgagcgctccaacctcactgcccacctacgaactcacacaggggagaggccctatcagtgtgggcaatgtgggaaaagcttcaaccagagttccagcctcattgtccaccagaggacccataccggggaaaagccttaccagtgcattgtctgtggaaagagattcaacaacagttcccagttcagtgctcaccggcgcatccacactggggagagcccatacaagtgtgcagtgtgtgggaaaatcttcaacaatagctcccacttcagtgcccaccgaaaaacccacactggtgaaaagccttacaggtgttctcactgtgagagaggcttcactaagaactctgccctcacccgtcatcagacagtacacatgaaagcagtactctcatcacaggaaggaagagatgcgttatgagtgtgtcggtaaactgtcagattaagttcctcaggtcagcatgtatgagctttcttctgctgtggagagatctagccagtccctgactttgcaacagacctactgactactggatcttaagacccatgtctaggaccaggagtcagcataaggacgctgacctctcctggctgtgcctgtgactccagagtcctatcttactgtgacttaaagtttgatggagagaaagctgtaggatccataaattctaccaggaaaccagggtcttcctgttcctagcactgagaatgggcacccagtggtccaagaacactttctgggctaacatagtcctcacacagggctgagaaagaaagtgtctcctttcctggaaagcacatgtaaaagttaagggcctgaatctcttctaaaccaataattgacctctaggcacccaccataatactgctaccttcagggcagaagacactgctctttgtaacccagccaccaccaaaaagcaaacagaaagaaggaaggatggttaagccattggataatactgaatctgtttccctaagtgacttaaccttagagcaagcacaacatccaggttaattttttgtaagatttctccttttattattgccctcatcatagttcctgattgtctcttaaagtaagtggtttatagacattactatttctgataataatttacaaactactataaacaaatttataaacattactaatttctgatgaaaataaagttgtttctccctcca

SEQ ID NO: 277540 - DNA, 2969 bp, Homo sapiens
gcgtgcgtaatgggcggagcgaatcgcgccgctgacttccggcccggaggctgagggagtttgtggagtcgcgagtgctggtgtccgacatccttcaaagttgagccctttttttccgctgtgagtctctacacatgtctgacactctcatgtcccacggattacagaaagacattccttgcaggagaacatggcttcccagtgatgtgggaaagatggactctgatctccagggtagaagtggcaaccagagtaagccagttcgttgaagcaaatgatggctgcagtgaagagtaccgaggcacacccatcctcaaacaaggatcccacacagggccagaaatcagccctccagggtaacagccctgactccgaggcctcccgtcagcgcttcaggcagttttgctaccaggaggtaactggcccacatgaagcttttagcaaactctgggaactctgttgtcagtggctgaggccgaagacccactcaaaagaggaaatcctggagctgctggttttggagcagtttctgactatcttgccagaggagatccagacctgggtgagggagcagcatccagaaaacggcgaggaagctgtggctctggttgaggatgtacagagagctcctggacaacagcctggcttgctcctcaggctcccaggaacctgcctcaaaacacaggtctccacgaccaggagacaggtgctgtggtctggacagctgggtcccagggaccagccatgcgtgacaacagagctgtatccctctgtcagcaagaatggatgtgcccaggccctgcacaaagggccctctacaggggtgccacccagaggaaggacagtcacgtctcgctggcaacaggtgtgccctggggctatgaagagaccaagacgctcctggctattcttagtagttctcaattttatggaaaactccagacctgtcagcagaacagccagatctacagggccatggcggaaggactctgggagcagggttttctgcggaccccagaacagtgtcgcaccaagttcaaaagcctacagttgagttaccgcaaagtgaggagaggccgtgtgcctgagccttgtatcttttatgaggaaatgaatgctctttcaggctcctgggcctctgcacctcctatggcaagcgatgctgttcctggccaagaaggaagtgatattgaggctggagagctgaatcaccagaatggggaacccacggaggtagaagatggcactgtggatggtgcagacagggatgaaaaggacttcaggaatcctggccaggaagtcaggaaactagacctgccagtgctgttcccaaacagacttggttttgagttcaagaacgagattaaaaaagaaaatctaaaatgggatgattcagaggaagtagaaataaacaaggctttacagagaaagtccagaggagtttattggcactctgagctacaaaaaggcttggagagtgagccaacatcaagaaggcaatgtagaaattctccaggggagagtgaggagaaaaccccatcccaggagaagatgagtcaccagagtttttgtgccagggacaaagcctgtacacatatcctctgtgggaaaaactgctctcagagtgtgcactctccccacaagccagcgctcaaactggaaaaagtatctcaatgtcctgaatgtgggaaaacctttagccgaagttcttatcttgttcggcatcaaagaatccacacaggcgagaagcctcacaagtgcagtgagtgcgggaagggctttagtgagcgctccaacctcactgcccacctacgaactcacacaggggagaggccctatcagtgtgggcaatgtgggaaaagcttcaaccagagttccagcctcattgtccaccagaggacccataccggggaaaagccttaccagtgcattgtctgtggaaagagattcaacaacagttcccagttcagtgctcaccggcgcatccacactggggagagcccatacaagtgtgcagtgtgtgggaaaatcttcaacaatagctcccacttcagtgcccaccgaaaaacccacactggtgaaaagccttacaggtgttctcactgtgagagaggcttcactaagaactctgccctcacccgtcatcagacagtacacatgaaagcagtactctcatcacaggaaggaagagatgcgttatgagtgtgtcggtaaactgtcagattaagttcctcaggtcagcatgtatgagctttcttctgctgtggagagatctagccagtccctgactttgcaacagacctactgactactggatcttaagacccatgtctaggaccaggagtcagcataaggacgctgacctctcctggctgtgcctgtgactccagagtcctatcttactgtgacttaaagtttgatggagagaaagctgtaggatccataaattctaccaggaaaccagggtcttcctgttcctagcactgagaatgggcacccagtggtccaagaacactttctgggctaacatagtcctcacacagggctgagaaagaaagtgtctcctttcctggaaagcacatgtaaaagttaagggcctgaatctcttctaaaccaataattgacctctaggcacccaccataatactgctaccttcagggcagaagacactgctctttgtaacccagccaccaccaaaaagcaaacagaaagaaggaaggatggttaagccattggataatactgaatctgtttccctaagtgacttaaccttagagcaagcacaacatccaggttaattttttgtaagatttctccttttattattgccctcatcatagttcctgattgtctcttaaagtaagtggtttatagacattactatttctgataataatttacaaactactataaacaaatttataaacattactaatttctgatgaaaataaagttgtttctccctcca

SEQ ID NO: 277541 - DNA, 804 bp, Homo sapiens
gcgtgcgtaatgggcggagcgaatcgcgccgctgacttccggcccggaggctgagggagtttgtggagtcgcgagtgctggtgtccgcaacaggtgtgccctggggctatgaagagaccaagacgctcctggctattcttagtagttctcaattttatggaaaactccagacctgtcagcagaacagccagatctacagggccatggcggaaggactctgggagcagggttttctgcggaccccagaacagtgtcgcaccaagttcaaaagcctacagttgagttaccgcaaagtgaggagaggccgtgtgcctgagccttgtatcttttatgaggaaatgaatgctctttcaggctcctgggcctctgcacctcctatggcaagcgatgctgttcctggccaagaaggaagtgatattgaggctggagagctgaatcaccagaatggggaacccacggaggtagaagatggcactgtggatggtgcagacagggatgaaaaggacttcaggaatcctggccaggaagtcaggaaactagacctgccagtgctgttcccaaacagacttggtaagactcccttggctctgatggtcaaaggatggcaaagtccactttagaggccattagcctagcagttgagtaggagctgtcactgatcctggcatcatcatcatcttgatgtgtgaccctatccaagttttggttttcatggagttaaaggttattccccttgcattttacagccctgattttgcatttgccaacctctttcaactaagttcatgtcatcttttcccatgg

SEQ ID NO: 277542 - DNA, 3131 bp, Homo sapiens
ggaaagggataggaagtaaatcacaagaaccagagtgaaggaatgtttgataggtttatattgtctttttccatcctcttcagacatccttcaaagttgagccctttttttccgctgtgagtctctacacatgtctgacactctcatgtcccacggattacagaaagacattccttgcaggagaacatggcttcccagtgatgtgggaaagatggactctgatctccagggtagaagtggcaaccagagtaagccagttcgttgaagcaaatgatggctgcagtgaagagtaccgaggcacacccatcctcaaacaaggatcccacacagggccagaaatcagccctccagggtaacagccctgactccgaggcctcccgtcagcgcttcaggcagttttgctaccaggaggtaactggcccacatgaagcttttagcaaactctgggaactctgttgtcagtggctgaggccgaagacccactcaaaagaggaaatcctggagctgctggttttggagcagtttctgactatcttgccagaggagatccagacctgggtgagggagcagcatccagaaaacggcgaggaagctgtggctctggttgaggatgtacagagagctcctggacaacaggttctagattctgagaaggacttgaaagtactcatgaaggagatggcccctttgggagcaaccagagaatcactgagatcccaatggaaacaggaggttcagccagaggaaccgacttttaagggatcacagagctcacaccaaagaccaggggaacagtcagaagcctggcttgctcctcaggctcccaggaacctgcctcaaaacacaggtctccacgaccaggagacaggtgctgtggtctggacagctgggtcccagggaccagccatgcgtgacaacagagctgtatccctctgtcagcaagaatggatgtgcccaggccctgcacaaagggccctctacaggggtgccacccagaggaaggacagtcacgtctcgctggcaacaggtgtgccctggggctatgaagagaccaagacgctcctggctattcttagtagttctcaattttatggaaaactccagacctgtcagcagaacagccagatctacagggccatggcggaaggactctgggagcagggttttctgcggaccccagaacagtgtcgcaccaagttcaaaagcctacagttgagttaccgcaaagtgaggagaggccgtgtgcctgagccttgtatcttttatgaggaaatgaatgctctttcaggctcctgggcctctgcacctcctatggcaagcgatgctgttcctggccaagaaggaagtgatattgaggctggagagctgaatcaccagaatggggaacccacggaggtagaagatggcactgtggatggtgcagacagggatgaaaaggacttcaggaatcctggccaggaagtcaggaaactagacctgccagtgctgttcccaaacagacttggttttgagttcaagaacgagattaaaaaagaaaatctaaaatgggatgattcagaggaagtagaaataaacaaggctttacagagaaagtccagaggagtttattggcactctgagctacaaaaaggcttggagagtgagccaacatcaagaaggcaatgtagaaattctccaggggagagtgaggagaaaaccccatcccaggagaagatgagtcaccagagtttttgtgccagggacaaagcctgtacacatatcctctgtgggaaaaactgctctcagagtgtgcactctccccacaagccagcgctcaaactggaaaaagtatctcaatgtcctgaatgtgggaaaacctttagccgaagttcttatcttgttcggcatcaaagaatccacacaggcgagaagcctcacaagtgcagtgagtgcgggaagggctttagtgagcgctccaacctcactgcccacctacgaactcacacaggggagaggccctatcagtgtgggcaatgtgggaaaagcttcaaccagagttccagcctcattgtccaccagaggacccataccggggaaaagccttaccagtgcattgtctgtggaaagagattcaacaacagttcccagttcagtgctcaccggcgcatccacactggggagagcccatacaagtgtgcagtgtgtgggaaaatcttcaacaatagctcccacttcagtgcccaccgaaaaacccacactggtgaaaagccttacaggtgttctcactgtgagagaggcttcactaagaactctgccctcacccgtcatcagacagtacacatgaaagcagtactctcatcacaggaaggaagagatgcgttatgagtgtgtcggtaaactgtcagattaagttcctcaggtcagcatgtatgagctttcttctgctgtggagagatctagccagtccctgactttgcaacagacctactgactactggatcttaagacccatgtctaggaccaggagtcagcataaggacgctgacctctcctggctgtgcctgtgactccagagtcctatcttactgtgacttaaagtttgatggagagaaagctgtaggatccataaattctaccaggaaaccagggtcttcctgttcctagcactgagaatgggcacccagtggtccaagaacactttctgggctaacatagtcctcacacagggctgagaaagaaagtgtctcctttcctggaaagcacatgtaaaagttaagggcctgaatctcttctaaaccaataattgacctctaggcacccaccataatactgctaccttcagggcagaagacactgctctttgtaacccagccaccaccaaaaagcaaacagaaagaaggaaggatggttaagccattggataatactgaatctgtttccctaagtgacttaaccttagagcaagcacaacatccaggttaattttttgtaagatttctccttttattattgccctcatcatagttcctgattgtctcttaaagtaagtggtttatagacattactatttctgataataatttacaaactactataaacaaatttataaacattactaatttctgatgaaaataaagttgtttctccctcca

SEQ ID NO: 277543 - DNA, 1353 bp, Homo sapiens
ggaaagggataggaagtaaatcacaagaaccagagtgaaggaatgtttgataggtttatattgtctttttccatcctcttcagacatccttcaaagttgagccctttttttccgctgtgagtctctacacatgtctgacactctcatgtcccacggattacagaaagacattccttgcaggagaacatggcttcccagtgatgtgggaaagatggactctgatctccagggtagaagtggcaaccagagtaagccagttcgttgaagcaaatgatggctgcagtgaagagtaccgaggcacacccatcctcaaacaaggatcccacacagggccagaaatcagccctccagggtaacagccctgactccgaggcctcccgtcagcgcttcaggcagttttgctaccaggaggtaactggcccacatgaagcttttagcaaactctgggaactctgttgtcagtggctgaggccgaagacccactcaaaagaggaaatcctggagctgctggttttggagcagtttctgactatcttgccagaggagatccagacctgggtgagggagcagcatccagaaaacggcgaggaagctgtggctctggttgaggatgtacagagagctcctggacaacagcaacaggtgtgccctggggctatgaagagaccaagacgctcctggctattcttagtagttctcaattttatggaaaactccagacctgtcagcagaacagccagatctacagggccatggcggaaggactctgggagcagggttttctgcggaccccagaacagtgtcgcaccaagttcaaaagcctacagttgagttaccgcaaagtgaggagaggccgtgtgcctgagccttgtatcttttatgaggaaatgaatgctctttcaggctcctgggcctctgcacctcctatggcaagcgatgctgttcctggccaagaaggaagtgatattgaggctggagagctgaatcaccagaatggggaacccacggaggtagaagatggcactgtggatggtgcagacagggatgaaaaggacttcaggaatcctggccaggaagtcaggaaactagacctgccagtgctgttcccaaacagacttggtaagactcccttggctctgatggtcaaaggatggcaaagtccactttagaggccattagcctagcagttgagtaggagctgtcactgatcctggcatcatcatcatcttgatgtgtgaccctatccaagttttggttttcatggagttaaaggttattccccttgcattttacagccctgattttgcatttgccaacctctttcaactaagttcatgtcatcttttcccatgg

SEQ ID NO: 277544 - DNA, 1146 bp, Homo sapiens
  misc_feature (1141)..(1144): n is a, c, g, or t
  misc_feature (1146)..(1146): n is a, c, g, or t
tcctgagctcaagcgattctccctcctcaggctccctaaccctaaccccaaccttagggcagctgggaccacaggcccgcccgaccacactccgctaatattttttattttttgtagagacaggattttgctttgttgctcaggctaatttctaactcctgacctcaaatgatccttgtgacttggcctcccaaactggtggaattacaggcgggagccaccataccagtcaggacgcacatcttaaggatactcccgaggtgaagctgggcttttcctgcagaagcgcctctgggaattgcgccctttaccctccttgttgcctagggaactacattacccagaaaactcagcctcgaatgatagcgtagaagacctctgagggctcagaataaaggcgtttcctgtgtgcacgtgacaatgggtccggacttccggcgccctctggtggcggccattttgattggtgttggatttatttgtaggagaggctcctgagcgctaggtccgcactgtggtgactgaacccagaagtcggggagcagttgtcctccgctgcacagaggctactctggagctctgtgacggcgcccagcgtgacccactcctgggccaggatacggaccgtcgtgcccatatctcctggctggtcgccctatcctcccgactctgcttaaaaccacgtggttcgatggctgccgcggctacgctgaggctctccgctcagggcacagtgacttttgaagatgtggctgtgaactttacctgggaggaatggaatctccttagtgaggctcagagatgcctgtaccgtgatgtgacgctggagaacctggcacttatatcctccctggggatgacatttctccatgtttgtcaggccttggactctctacgtcaggtgatccacccacccacctcggcctcccaaagtgctgggattacaggtgtgagccactgcgcctgacccttgcaggatctcactctattccccaggctagagtgcgatggcaccatctcggctgattgcaacctccattttccaggaaggctctttaattccccctgattacaaaggttttgtgtgaacataatttggtgtaataaaaaaaaatttacaccacaagagacaaacataaannnnan

SEQ ID NO: 277545 - DNA, 1110 bp, Homo sapiens
tcctgagctcaagcgattctccctcctcaggctccctaaccctaaccccaaccttagggcagctgggaccacaggcccgcccgaccacactccgctaatattttttattttttgtagagacaggattttgctttgttgctcaggctaatttctaactcctgacctcaaatgatccttgtgacttggcctcccaaactggtggaattacaggcgggagccaccataccagtcaggacgcacatcttaaggatactcccgaggtgaagctgggcttttcctgcagaagcgcctctgggaattgcgccctttaccctccttgttgcctagggaactacattacccagaaaactcagcctcgaatgatagcgtagaagacctctgagggctcagaataaaggcgtttcctgtgtgcacgtgacaatgggtccggacttccggcgccctctggtggcggccattttgattggtgttggatttatttgtaggagaggctcctgagcgctaggtccgcactgtggtgactgaacccagaagtcggggagcagttgtcctccgctgcacagaggctactctggagctctgtgacggcgcccagcgtgacccactcctgggccaggatacggaccgtcgtgcccatatctcctggctggtcgccctatcctcccgactctgcttaaaaccacgtggttcgatggctgccgcggctacgctgaggctctccgctcagggcacagtgacttttgaagatgtggctgtgaactttacctgggaggaatggaatctccttagtgaggctcagagatgcctgtaccgtgatgtgacgctggagaacctggcacttatatcctccctggatcctgcactggatggatcagcggacaacacacagaccggtaatctgggtcaatcagttctgccatcccacccagaacagaaaacagcatgaaaaactcactttaaccccctatgaatccatctccaaccagactgatcagcactccccacttcccaagcccctacccgccaaattttgaaaactctgatcccagaatgctcagggagactgatttgaataataaaactcctgtctcccgaacagcaaaaaaactc

SEQ ID NO: 277546 - DNA, 983 bp, Homo sapiens
tcctgagctcaagcgattctccctcctcaggctccctaaccctaaccccaaccttagggcagctgggaccacaggcccgcccgaccacactccgctaatattttttattttttgtagagacaggattttgctttgttgctcaggctaatttctaactcctgacctcaaatgatccttgtgacttggcctcccaaactggtggaattacaggcgggagccaccataccagtcaggacgcacatcttaaggatactcccgaggtgaagctgggcttttcctgcagaagcgcctctgggaattgcgccctttaccctccttgttgcctagggaactacattacccagaaaactcagcctcgaatgatagcgtagaagacctctgagggctcagaataaaggcgtttcctgtgtgcacgtgacaatgggtccggacttccggcgccctctggtggcggccattttgattggtgttggatttatttgtaggagaggctcctgagcgctaggtccgcactgtggtgactgaacccagaagtcggggagcagttgtcctccgctgcacagaggctactctggagctctgtgacggcgcccagcgtgacccactcctgggccaggatacggaccgtcgtgcccatatctcctggctggtcgccctatcctcccgactctgcttaaaaccacgtggttcgatggctgccgcggctacgctgaggctctccgctcagatcctgcactggatggatcagcggacaacacacagaccggtaatctgggtcaatcagttctgccatcccacccagaacagaaaacagcatgaaaaactcactttaaccccctatgaatccatctccaaccagactgatcagcactccccacttcccaagcccctacccgccaaattttgaaaactctgatcccagaatgctcagggagactgatttgaataataaaactcctgtctcccgaacagcaaaaaaactc

SEQ ID NO: 277547 - DNA, 2564 bp, Homo sapiens
tcctgagctcaagcgattctccctcctcaggctccctaaccctaaccccaaccttagggcagctgggaccacaggcccgcccgaccacactccgctaatattttttattttttgtagagacaggattttgctttgttgctcaggctaatttctaactcctgacctcaaatgatccttgtgacttggcctcccaaactggtggaattacaggcgggagccaccataccagtcaggacgcacatcttaaggatactcccgaggtgaagctgggcttttcctgcagaagcgcctctgggaattgcgccctttaccctccttgttgcctagggaactacattacccagaaaactcagcctcgaatgatagcgtagaagacctctgagggctcagaataaaggcgtttcctgtgtgcacgtgacaatgggtccggacttccggcgccctctggtggcggccattttgattggtgttggatttatttgtaggagaggctcctgagcgctaggtccgcactgtggtgactgaacccagaagtcggggagcagttgtcctccgctgcacagaggctactctggagctctgtgacggcgcccagcgtgacccactcctgggccaggatacggaccgtcgtgcccatatctcctggctggtcgccctatcctcccgactctgcttaaaaccacgtggttcgatggctgccgcggctacgctgaggctctccgctcagggcacagtgacttttgaagatgtggctgtgaactttacctgggaggaatggaatctccttagtgaggctcagagatgcctgtaccgtgatgtgacgctggagaacctggcacttatatcctccctggtctatgcaacaaggtccagccagatgaagcctgtagccaggtagaactgtggtaatatcacctcctgactttgatccgttttatctctaagcatttcacaacctggtagcaaatcctgggttaatcttacaagggtgtttacattggttgacagaaatgggaatacctccatataacctgtcatggacttggtatcctggcttcagagattctccagggtcctcggatcaaaggactgaaaaaaatggcacttaagagtcccaggacaccacaagctagagaacctgtagatggcgtcaggaccaatgagggaatggaacaccctccacttccctgtgtgggttccctaagtgcttctgcagccaggagtgcctgaggggaaaggcagacattacaaacatgtcacaggatttgataagctcaggactccctgaaccctttcttgtccctggaaccaggtaaccctaaggctggttgtctgacctgcttttctcagtgcaaaatgtcatctctaccatctatgtgatctacaaaacggattcaacctcccaaggccccaaagtcctcatcctctctctctatgatgttcttcctttgattggcctttgggaaacttcttaaaagcctggatttggatcatgtccctcctttcttcaaaactctccatggcttctagaatcctcatgatgaatgcacagcccctggcctgcttgctctaccaggaagagctccatctcacacgttgttcctgacagatgcctgtgaaccccaggttccatccttccagctctgtccatctgcaggccattgcctgcacccctacctgtgcctgtcactctccccactgcatcccactggtgtcagaaacaggtgaaaccgactttgcaaaattataactgacgaaattatgacagtgaaagaaatcagacctaaccgactccatcttgcttccaacctttcagccgtcttttttcattcctgggcataggctgaattaactttggaaaagaattcagttcatggtttcactctgaaacaaaattgataatagccctttcctgaaaagacccctttcttgcctggggaccagcctgtctttgcaggactaacaaattagctacaagaatagaaattacggtttaggggtcatgcagcttctggctccaagagtctgaacctccccaagttgctcctgaagataaccttactattgtaaaacctaatgtgagtttctggggtgctagttgagttggtctcccctgtgtgagacacccatgggaagccatgggcggcctctgaggagaaaagtctccttattgccttcatgtctttatgccccgagagcataactcttcagcagcattccatgggttgctcagggagatcacactcccttgaagcagtggagcataatcaaacatcttggctcctcctgaaacccgcagccacccgtttcagttaagttaaagatcttaagtagtttagacacacgcctttgttcaaggaaattcacagaaacggccagtgctttacatcttatggaatgactcacgagttctcctttactgattaatccttttcctgatcgcttcctccccctccaatcagccataagaacaaagagcttgtaaaccaataaactgggtggagcccaagagctctgggccgccaggaagcctccaatgctctggccacctggacccgcctttt

SEQ ID NO: 277548 - DNA, 1425 bp, Homo sapiens
tcctgagctcaagcgattctccctcctcaggctccctaaccctaaccccaaccttagggcagctgggaccacaggcccgcccgaccacactccgctaatattttttattttttgtagagacaggattttgctttgttgctcaggctaatttctaactcctgacctcaaatgatccttgtgacttggcctcccaaactggtggaattacaggcgggagccaccataccagtcaggacgcacatcttaaggatactcccgaggtgaagctgggcttttcctgcagaagcgcctctgggaattgcgccctttaccctccttgttgcctagggaactacattacccagaaaactcagcctcgaatgatagcgtagaagacctctgagggctcagaataaaggcgtttcctgtgtgcacgtgacaatgggtccggacttccggcgccctctggtggcggccattttgattggtgttggatttatttgtaggagaggctcctgagcgctaggtccgcactgtggtgactgaacccagaagtcggggagcagttgtcctccgctgcacagaggctactctggagctctgtgacggcgcccagcgtgacccactcctgggccaggatacggaccgtcgtgcccatatctcctggctggtcgccctatcctcccgactctgcttaaaaccacgtggttcgatggctgccgcggctacgctgaggctctccgctcagagaatctcgctctgtcgcccaggctggagtgcagtgggcctgatcttggctcactgcaaactccgcctcctgggttcacgccattctcctgcctcagcctcctgagtagctgggacaacaggtgcgtgccaccacacctggctaactttcggtatttttagtagagatggggtttcactgtgttagccaggatggtctcgatctcctgaccttgtgatccgcccacctcatcctctcaaagtgctgggattacaggtgtgagtcactgtgcccggccgtgttgtcacttttaatgtgctttggttttaattttctgtagaaaagtaaaacaaatttttccctttaaatttaatccttgcttttaatgacttgtgcaccccaatttactaagaaaataaaccatttaaaaaataatcttgagttgggcatagtagtttattcctgtaatcccaacacattgggaggcagaggcaggctgttgacttgagccgaggagattgagaccagcctgggcaacatggcaaaaccctgtgtccacaaaaaatgcaaaaattagccaggcagggtgcctgtctgtagtcccagctacccagcaggctgaggtggcacgatcacttgaaccctgggggtggtcaaggctgcagtgagccatgatcatgccactgcactccagcctgggcagcagagcaagattctct

SEQ ID NO: 277549 - DNA, 1062 bp, Homo sapiens
tttaagacaaggatctagctctgttgcctaggctggagggcaatggcatgatcacagcttactgcaacctctgctcctgcattcaagcgattctcatgcctcagcctcccgaacatctgggattacaggtgcatgataccacatccggctaatttttggatttttagtagagactgtttcacggtattggcctgactggtctcgaactcctgtcctcaagtgacccacctgtcttggcctcccaaagtgggattacaggcatgaaccactgcacccagcctaaatgactaccttttatgttgcacattttaagtaacttttgtcatttccatcttgggttgttgctttttttgttttttgagacagaatctcgctctgtcgcccaggctggagtgcagtgggcctgatcttggctcactgcaaactccgcctcctgggttcacgccattctcctgcctcagcctcctgagtagctgggacaacaggtgcgtgccaccacacctggctaactttcggtatttttagtagagatggggtttcactgtgttagccaggatggtctcgatctcctgaccttgtgatccgcccacctcatcctctcaaagtgctgggattacaggtgtgagtcactgtgcccggccgtgttgtcacttttaatgtgctttggttttaattttctgtagaaaagtaaaacaaatttttccctttaaatttaatccttgcttttaatgacttgtgcaccccaatttactaagaaaataaaccatttaaaaaataatcttgagttgggcatagtagtttattcctgtaatcccaacacattgggaggcagaggcaggctgttgacttgagccgaggagattgagaccagcctgggcaacatggcaaaaccctgtgtccacaaaaaatgcaaaaattagccaggcagggtgcctgtctgtagtcccagctacccagcaggctgaggtggcacgatcacttgaaccctgggggtggtcaaggctgcagtgagccatgatcatgccactgcactccagcctgggcagcagagcaagattctct

SEQ ID NO: 277550 - DNA, 1217 bp, Homo sapiens
  misc_feature (1212)..(1215): n is a, c, g, or t
  misc_feature (1217)..(1217): n is a, c, g, or t
tcctgagctcaagcgattctccctcctcaggctccctaaccctaaccccaaccttagggcagctgggaccacaggcccgcccgaccacactccgctaatattttttattttttgtagagacaggattttgctttgttgctcaggctaatttctaactcctgacctcaaatgatccttgtgacttggcctcccaaactggtggaattacaggcgggagccaccataccagtcaggacgcacatcttaaggatactcccgaggtgaagctgggcttttcctgcagaagcgcctctgggaattgcgccctttaccctccttgttgcctagggaactacattacccagaaaactcagcctcgaatgatagcgtagaagacctctgagggctcagaataaaggcgtttcctgtgtgcacgtgacaatgggtccggacttccggcgccctctggtggcggccattttgattggtgttggatttatttgtaggagaggctcctgagcgctaggtccgcactgtggtgactgaacccagaagtcggggagcagttgtcctccgctgcacagaggctactctggagctctgtgacggcgcccagcgtgacccactcctgggccaggatacggaccgtcgtgcccatatctcctggctggtcgccctatcctcccgactctgcttaaaaccacgtggttcgatggctgccgcggctacgctgaggctctccgctcagggcacagtgacttttgaagatgtggctgtgaactttacctgggaggaatggaatctccttagtgaggctcagagatgcctgtaccgtgatgtgacgctggagaacctggcacttatatcctccctgggttgttggtgtggagtggaagatgaggcggcaccttctaagcagagtatttatatacaaagagagactcagggatgacatttctccatgtttgtcaggccttggactctctacgtcaggtgatccacccacccacctcggcctcccaaagtgctgggattacaggtgtgagccactgcgcctgacccttgcaggatctcactctattccccaggctagagtgcgatggcaccatctcggctgattgcaacctccattttccaggaaggctctttaattccccctgattacaaaggttttgtgtgaacataatttggtgtaataaaaaaaaatttacaccacaagagacaaacataaannnnan

SEQ ID NO: 277551 - DNA, 1076 bp, Homo sapiens
tcctgagctcaagcgattctccctcctcaggctccctaaccctaaccccaaccttagggcagctgggaccacaggcccgcccgaccacactccgctaatattttttattttttgtagagacaggattttgctttgttgctcaggctaatttctaactcctgacctcaaatgatccttgtgacttggcctcccaaactggtggaattacaggcgggagccaccataccagtcaggacgcacatcttaaggatactcccgaggtgaagctgggcttttcctgcagaagcgcctctgggaattgcgccctttaccctccttgttgcctagggaactacattacccagaaaactcagcctcgaatgatagcgtagaagacctctgagggctcagaataaaggcgtttcctgtgtgcacgtgacaatgggtccggacttccggcgccctctggtggcggccattttgattggtgttggatttatttgtaggagaggctcctgagcgctaggtccgcactgtggtgactgaacccagaagtcggggagcagttgtcctccgctgcacagaggctactctggagctctgtgacggcgcccagcgtgacccactcctgggccaggatacggaccgtcgtgcccatatctcctggctggtcgccctatcctcccgactctgcttaaaaccacgtggttcgatggctgccgcggctacgctgaggctctccgctcagcagcttcttcttggcacaatcctgaactgggcagaacgtccttcccaaactcgcggaagacaaatggctcctgtgacaccctgagcttacgtttctttacaaacgatgcttctctgacactctttctgtagaatttctctccaatatgctgcttctggtgctgatgaaggtatgcagtgtcatccaagttttttccacatgctccatcctgtaatcccagcactttgcaaggccgaggcgggcagatcacctgacgtcaggagttcgagaccagcctggctaatatagtgaaaccctgtatctactttgggaggctgaggcaggagaatcgcttgaacccaggaggcag

SEQ ID NO: 277552 - DNA, 809 bp, Homo sapiens
  misc_feature (804)..(807): n is a, c, g, or t
  misc_feature (809)..(809): n is a, c, g, or t
aacaaacaaacaaacaaaaaaatatactttaagttgtttaaaggccagagagaggccagtggtgtgtggcagtcacctggggatggacatggaatgtacctggaagtctaaagaatgaggtgtgttcagagagggtatctctgctgtgctgaaggtgccacattgggctttccatgaccttggccatactagggaaagtgcctgtcaggagggggtggactcttacgtcacaaccaccacacagatacctatttgttcaactattgttggtggctataccccatgaccagtgggcctagtttctcctatgtttgaggaccttgagaggaggatgtgcgagagtagatgtgtgggagagatggattgtgatacctcagcataggggcagtttgtagtttcatctgtcaacatcataacagggcacagtgacttttgaagatgtggctgtgaactttacctgggaggaatggaatctccttagtgaggctcagagatgcctgtaccgtgatgtgacgctggagaacctggcacttatatcctccctggggatgacatttctccatgtttgtcaggccttggactctctacgtcaggtgatccacccacccacctcggcctcccaaagtgctgggattacaggatctcactctattccccaggctagagtgcgatggcaccatctcggctgattgcaacctccattttccaggaaggctctttaattccccctgattacaaaggttttgtgtgaacataatttggtgtaataaaaaaaaatttacaccacaagagacaaacataaannnnan

SEQ ID NO: 277553 - DNA, 1748 bp, Homo sapiens
ttatctctgacctttcttcctcttccctcaacccacagtctatgcaacaaggtccagccagatgaagcctgtagccaggtagaactgtggtaatatcacctcctgactttgatccgttttatctctaagcatttcacaacctggtagcaaatcctgggttaatcttacaagggtgtttacattggttgacagaaatgggaatacctccatataacctgtcatggacttggtatcctggcttcagagattctccagggtcctcggatcaaaggactgaaaaaaatggcacttaagagtcccaggacaccacaagctagagaacctgtagatggcgtcaggaccaatgagggaatggaacaccctccacttccctgtgtgggttccctaagtgcttctgcagccaggagtgcctgaggggaaaggcagacattacaaacatgtcacaggatttgataagctcaggactccctgaaccctttcttgtccctggaaccaggtaaccctaaggctggttgtctgacctgcttttctcagtgcaaaatgtcatctctaccatctatgtgatctacaaaacggattcaacctcccaaggccccaaagtcctcatcctctctctctatgatgttcttcctttgattggcctttgggaaacttcttaaaagcctggatttggatcatgtccctcctttcttcaaaactctccatggcttctagaatcctcatgatgaatgcacagcccctggcctgcttgctctaccaggaagagctccatctcacacgttgttcctgacagatgcctgtgaaccccaggttccatccttccagctctgtccatctgcaggccattgcctgcacccctacctgtgcctgtcactctccccactgcatcccactggtgtcagaaacaggtgaaaccgactttgcaaaattataactgacgaaattatgacagtgaaagaaatcagacctaaccgactccatcttgcttccaacctttcagccgtcttttttcattcctgggcataggctgaattaactttggaaaagaattcagttcatggtttcactctgaaacaaaattgataatagccctttcctgaaaagacccctttcttgcctggggaccagcctgtctttgcaggactaacaaattagctacaagaatagaaattacggtttaggggtcatgcagcttctggctccaagagtctgaacctccccaagttgctcctgaagataaccttactattgtaaaacctaatgtgagtttctggggtgctagttgagttggtctcccctgtgtgagacacccatgggaagccatgggcggcctctgaggagaaaagtctccttattgccttcatgtctttatgccccgagagcataactcttcagcagcattccatgggttgctcagggagatcacactcccttgaagcagtggagcataatcaaacatcttggctcctcctgaaacccgcagccacccgtttcagttaagttaaagatcttaagtagtttagacacacgcctttgttcaaggaaattcacagaaacggccagtgctttacatcttatggaatgactcacgagttctcctttactgattaatccttttcctgatcgcttcctccccctccaatcagccataagaacaaagagcttgtaaaccaataaactgggtggagcccaagagctctgggccgccaggaagcctccaatgctctggccacctggacccgcctttt

SEQ ID NO: 277554 - DNA, 1254 bp, Homo sapiens
tcctgagctcaagcgattctccctcctcaggctccctaaccctaaccccaaccttagggcagctgggaccacaggcccgcccgaccacactccgctaatattttttattttttgtagagacaggattttgctttgttgctcaggctaatttctaactcctgacctcaaatgatccttgtgacttggcctcccaaactggtggaattacaggcgggagccaccataccagtcaggacgcacatcttaaggatactcccgaggtgaagctgggcttttcctgcagaagcgcctctgggaattgcgccctttaccctccttgttgcctagggaactacattacccagaaaactcagcctcgaatgatagcgtagaagacctctgagggctcagaataaaggcgtttcctgtgtgcacgtgacaatgggtccggacttccggcgccctctggtggcggccattttgattggtgttggatttatttgtaggagaggctcctgagcgctaggtccgcactgtggtgactgaacccagaagtcggggagcagttgtcctccgctgcacagaggctactctggagctctgtgacggcgcccagcgtgacccactcctgggccaggatacggaccgtcgtgcccatatctcctggctggtcgccctatcctcccgactctgcttaaaaccacgtggttcgatggctgccgcggctacgctgaggctctccgctcagggcacagtgacttttgaagatgtggctgtgaactttacctgggaggaatggaatctccttagtgaggctcagagatgcctgtaccgtgatgtgacgctggagaacctggcacttatatcctccctgggtaagttgctcacactcaccctgtgacctgagctagtctctgttttcccctatctttccccattggtaagactttctcatgtcaggagcatggacacagcttcctgcttcagttctgtgggtaggttcttggttggtaggtctgaggtgtacatactgccctactcctttcttggagcagccccaacacctgctttactgcaggctcccagggagggattcccagtcagaagcccaccttgttagtcctgtggatgtttgggtgtccttgtccagatttcaggttcctgtgtgcccacagtctacttcctttctctagctgctattttcttatgccttcctgtggcaggaattgccttcacagactacatcactgcctatatagaccagaggctgttctt

SEQ ID NO: 277555 - DNA, 946 bp, Homo sapiens
aacaaacaaacaaacaaaaaaatatactttaagttgtttaaaggccagagagaggccagtggtgtgtggcagtcacctggggatggacatggaatgtacctggaagtctaaagaatgaggtgtgttcagagagggtatctctgctgtgctgaaggtgccacattgggctttccatgaccttggccatactagggaaagtgcctgtcaggagggggtggactcttacgtcacaaccaccacacagatacctatttgttcaactattgttggtggctataccccatgaccagtgggcctagtttctcctatgtttgaggaccttgagaggaggatgtgcgagagtagatgtgtgggagagatggattgtgatacctcagcataggggcagtttgtagtttcatctgtcaacatcataacagggcacagtgacttttgaagatgtggctgtgaactttacctgggaggaatggaatctccttagtgaggctcagagatgcctgtaccgtgatgtgacgctggagaacctggcacttatatcctccctgggtaagttgctcacactcaccctgtgacctgagctagtctctgttttcccctatctttccccattggtaagactttctcatgtcaggagcatggacacagcttcctgcttcagttctgtgggtaggttcttggttggtaggtctgaggtgtacatactgccctactcctttcttggagcagccccaacacctgctttactgcaggctcccagggagggattcccagtcagaagcccaccttgttagtcctgtggatgtttgggtgtccttgtccagatttcaggttcctgtgtgcccacagtctacttcctttctctagctgctattttcttatgccttcctgtggcaggaattgccttcacagactacatcactgcctatatagaccagaggctgttctt

SEQ ID NO: 277556 - DNA, 4127 bp, Homo sapiens
agtgggcgccggagctgcggctgctgtagttgtcctagccggtgctggggcggcggggtggcggagcggcgggcgggcgggagggctggcggggcgaacgtctgggagacgtctgaaagaccaacgagactttggagaccagagacgcgcctggggggacctggggcttggggcgtgcgagatttcccttgcattcgctgggagctcgcgcagggatcgtcccatggccggggctcggagccgcgacccttggggggcctccgggatttgctacctttttggctccctgctcgtcgaactgctcttctcacgggctgtcgccttcaatctggacgtgatgggtgccttgcgcaaggagggcgagccaggcagcctcttcggcttctctgtggccctgcaccggcagttgcagccccgaccccagagctggctgctggtgggtgctccccaggccctggctcttcctgggcagcaggcgaatcgcactggaggcctcttcgcttgcccgttgagcctggaggagactgactgctacagagtggacatcgaccagggagctgatatgcaaaaggaaagcaaggagaaccagtggttgggagtcagtgttcggagccaggggcctgggggcaagattgttacctgtgcacaccgatatgaggcaaggcagcgagtggaccagatcctggagacgcgggatatgattggtcgctgctttgtgctcagccaggacctggccatccgggatgagttggatggtggggaatggaagttctgtgagggacgcccccaaggccatgaacaatttgggttctgccagcagggcacagctgccgccttctcccctgatagccactacctcctctttggggccccaggaacctataattggaaggggttgctttttgtgaccaacattgatagctcagaccccgaccagctggtgtataaaactttggaccctgctgaccggctcccaggaccagccggagacttggccctcaatagctacttaggcttctctattgactcggggaaaggtctggtgcgtgcagaagagctgagctttgtggctggagccccccgcgccaaccacaagggtgctgtggtcatcctgcgcaaggacagcgccagtcgcctggtgcccgaggttatgctgtctggggagcgcctgacctccggctttggctactcactggctgtggctgacctcaacagtgatggctggccagacctgatagtgggtgccccctacttctttgagcgccaagaagagctggggggtgctgtgtatgtgtacttgaaccaggggggtcactgggctgggatctcccctctccggctctgcggctcccctgactccatgttcgggatcagcctggctgtcctgggggacctcaaccaagatggctttccagatattgcagtgggtgccccctttgatggtgatgggaaagtcttcatctaccatgggagcagcctgggggttgtcgccaaaccttcacaggtgctggagggcgaggctgtgggcatcaagagcttcggctactccctgtcaggcagcttggatatggatgggaaccaataccctgacctgctggtgggctccctggctgacaccgcagtgctcttcagggccagacccatcctccatgtctcccatgaggtctctattgctccacgaagcatcgacctggagcagcccaactgtgctggcggccactcggtctgtgtggacctaagggtctgtttcagctacattgcagtccccagcagctatagccctactgtggccctggactatgtgttagatgcggacacagaccggaggctccggggccaggttccccgtgtgacgttcctgagccgtaacctggaagaacccaagcaccaggcctcgggcaccgtgtggctgaagcaccagcatgaccgagtctgtggagacgccatgttccagctccaggaaaatgtcaaagacaagcttcgggccattgtagtgaccttgtcctacagtctccagacccctcggctccggcgacaggctcctggccaggggctgcctccagtggcccccatcctcaatgcccaccagcccagcacccagcgggcagagatccacttcctgaagcaaggctgtggtgaagacaagatctgccagagcaatctgcagctggtccacgcccgcttctgtacccgggtcagcgacacggaattccaacctctgcccatggatgtggatggaacaacagccctgtttgcactgagtgggcagccagtcattggcctggagctgatggtcaccaacctgccatcggacccagcccagccccaggctgatggggatgatgcccatgaagcccagctcctggtcatgcttcctgactcactgcactactcaggggtccgggccctggaccctgcggagaagccactctgcctgtccaatgagaatgcctcccatgttgagtgtgagctggggaaccccatgaagagaggtgcccaggtcaccttctacctcatccttagcacctccgggatcagcattgagaccacggaactggaggtagagctgctgttggccacgatcagtgagcaggagctgcatccagtctctgcacgagcccgtgtcttcattgagctgccactgtccattgcaggaatggccattccccagcaactcttcttctctggtgtggtgaggggcgagagagccatgcagtctgagcgggatgtgggcagcaaggtcaagtatgaggtcacggtttccaaccaaggccagtcgctcagaaccctgggctctgccttcctcaacatcatgtggcctcatgagattgccaatgggaagtggttgctgtacccaatgcaggttgagctggagggcgggcaggggcctgggcagaaagggctttgctctcccaggcccaacatcctccacctggatgtggacagtagggataggaggcggcgggagctggagccacctgagcagcaggagcctggtgagcggcaggagcccagcatgtcctggtggccagtgtcctctgctgagaagaagaaaaacatcaccctggactgcgcccggggcacggccaactgtgtggtgttcagctgcccactctacagctttgaccgcgcggctgtgctgcatgtctggggccgtctctggaacagcacctttctggaggagtactcagctgtgaagtccctggaagtgattgtccgggccaacatcacagtgaagtcctccataaagaacttgatgctccgagatgcctccacagtgatcccagtgatggtatacttggaccccatggctgtggtggcagaaggagtgccctggtgggtcatcctcctggctgtactggctgggctgctggtgctagcactgctggtgctgctcctgtggaagatgggattcttcaaacgggcgaagcaccccgaggccaccgtgccccagtaccatgcggtgaagattcctcgggaagaccgacagcagttcaaggaggagaagacgggcaccatcctgaggaacaactggggcagcccccggcgggagggcccggatgcacaccccatcctggctgctgacgggcatcccgagctgggccccgatgggcatccagggccaggcaccgcctaggttcccatgtcccagcctggcctgtggctgccctccatcccttccccagagatggctccttgggatgaagagggtagagtgggctgctggtgtcgcatcaagatttggcaggatcggcttcctcaggggcacagacctctcccacccacaagaactcctcccacccaacttccccttagagtgctgtgagatgagagtgggtaaatcagggacagggccatggggtagggtgagaagggcaggggtgtcctgatgcaaaggtggggagaagggatcctaatcccttcctctcccattcaccctgtgtaacaggaccccaaggacctgcctccccggaagtgccttaacctagagggtcggggaggaggttgtgtcactgactcaggctgctccttctctagtttcccctctcatctgaccttagtttgctgccatcagtctagtggtttcgtggtttcgtctatttattaaaaaatatttgagaacaaaa

SEQ ID NO: 277557 - DNA, 959 bp, Homo sapiens
cgcggtaaaaatttgccgcggagtcgtgcctccggtggggccgagttctctcatgccgcccgcattatgtccgcttatgtgttaccccccctagtaccccggcttgaatgtgtttatagttctcgcctctgggggcgtgttaattacttccgctacggaggtgaggttgtggccgcaccgtagttgttctcccccccccgggtgtttaggggtgctccgttcccccaaggggtcccccacggctgtccacctcgtttttcccgcctccacgcggccgttgtttaaacgaggggccccggcgggcgttggccttttataagggcggcccccctttggggcccccctgtgcccaaaaactgggggccgccgtaattgggcggccccccgggggagtttttttgggcgcgcgcgcccccccttttttttttttttttttttttttttttttttttttggtttcgtggtttcgtctatttattaaaaaatatttgagaacaaaacctctgcctctttgagtcttgctctggcatccccagcatctctgattctccctggtgcccccagctcaggaagaaggtggtagtggggagagagggtcaggggggcttggcagggatgcaggcaccatgacttttgtgaccagttcctagagacgcatgggtgtagcctcaggaggaaagcgagaggagctttaccatgggaacgaaggaaagggacaacattgggaggcaaacgttgggagactagtccagaaacttgcagttgaggatacaacagggtcctagtgtttcctccctgggtcagcgtagaagtagagctttttcactgtcgaaggcgggattgaagttagagattgccctggcagaggttggggagagagggactaggaggtggtacatgaatgtcttctctcattctgctaggtccctctcagtggaagatagataggctggtgggtg

SEQ ID NO: 277558 - DNA, 453 bp, Homo sapiens
ggcagctattttggatataagattagtttgagaagacttcctggaggaggggagtttgaggtcaaatttggcaggatcggcttcctcaggggcacagacctctcccacccacaagaactcctcccacccaacttccccttagagtgctgtgagatgagagtgggtaaatcagggacagggccatggggtagggtgagaagggcaggggtgtcctgatgcaaaggtggggagaagggatcctaatcccttcctctcccattcaccctgtgtaacaggaccccaaggacctgcctccccggaagtgccttaacctagagggtcggggaggaggttgtgtcactgactcaggctgctccttctctagtttcccctctcatctgaccttagtttgctgccatcagtctagtggtttcgtggtttcgtctatttattaaaaaatatttgagaacaaaa

SEQ ID NO: 277559 - DNA, 967 bp, Homo sapiens
ggcaagagttcaaggattgagagaaagccctctcaggaggaccagtcagagggaagggctgagcctgcagaaaaggcagaaggtggaagaggacctgccgatggacttggagactgagatgagggtcagtgatggggccacgggggctcccatggcaaggaatagcaatccttcacagtacactaataatatgcagtctacatacatctcattggttagtcttcaaacctctgtgaggtaggaattatattagtctcattttatagatggagaactgaagcctagagaggttaagttacttggccaaggtaagtaatggtggagctgagatgagaacggaggtcccctgactcccagtcgtgtgtacagaggcctgaggcttggacgggtgtgatggggacctggggtgggaagagaggctcagggagtgaaggcaggtactgggggagcagactgggcgggggaatggtagggggaggtgttcagaacttagcaggagtggggtctgactctccagggatgtggatggaacaacagccctgtttgcactgagtgggcagccagtcattggcctggagctgatggtcaccaacctgccatcggacccagcccagccccaggctgatggggatgatgcccatgaagcccagctcctggtcatgcttcctgactcactgcactactcaggggtccgggccctggaccctgcggtgaggacctgggggcaggatggggtggggtcttgaggggctccagtaacccagactgaccttgccttctctcccattccaggagaagccactctgcctgtccaatgagaatgcctcccatgttgagtgtgagctggggaaccccatgaagagaggtgcccaggtcaccttctacctcatccttagcacctccgggatcagcattgagaccacggaactggaggtagagctgctgttggccacgtaagccaggcggg

SEQ ID NO: 277560 - DNA, 4586 bp, Homo sapiens
agtgggcgccggagctgcggctgctgtagttgtcctagccggtgctggggcggcggggtggcggagcggcgggcgggcgggagggctggcggggcgaacgtctgggagacgtctgaaagaccaacgagactttggagaccagagacgcgcctggggggacctggggcttggggcgtgcgagatttcccttgcattcgctgggagctcgcgcagggatcgtcccatggccggggctcggagccgcgacccttggggggcctccgggatttgctacctttttggctccctgctcgtcgaactgctcttctcacgggctgtcgccttcaatctggacgtgatgggtgccttgcgcaaggagggcgagccaggcagcctcttcggcttctctgtggccctgcaccggcagttgcagccccgaccccagagctggctgctggtgggtgctccccaggccctggctcttcctgggcagcaggcgaatcgcactggaggcctcttcgcttgcccgttgagcctggaggagactgactgctacagagtggacatcgaccagggagctgatatgcaaaaggaaagcaaggagaaccagtggttgggagtcagtgttcggagccaggggcctgggggcaagattgttacctgtgcacaccgatatgaggcaaggcagcgagtggaccagatcctggagacgcgggatatgattggtcgctgctttgtgctcagccaggacctggccatccgggatgagttggatggtggggaatggaagttctgtgagggacgcccccaaggccatgaacaatttgggttctgccagcagggcacagctgccgccttctcccctgatagccactacctcctctttggggccccaggaacctataattggaaggggttgctttttgtgaccaacattgatagctcagaccccgaccagctggtgtataaaactttggaccctgctgaccggctcccaggaccagccggagacttggccctcaatagctacttaggcttctctattgactcggggaaaggtctggtgcgtgcagaagagctgagctttgtggctggagccccccgcgccaaccacaagggtgctgtggtcatcctgcgcaaggacagcgccagtcgcctggtgcccgaggttatgctgtctggggagcgcctgacctccggctttggctactcactggctgtggctgacctcaacagtgatggctggccagacctgatagtgggtgccccctacttctttgagcgccaagaagagctggggggtgctgtgtatgtgtacttgaaccaggggggtcactgggctgggatctcccctctccggctctgcggctcccctgactccatgttcgggatcagcctggctgtcctgggggacctcaaccaagatggctttccagatattgcagtgggtgccccctttgatggtgatgggaaagtcttcatctaccatgggagcagcctgggggttgtcgccaaaccttcacaggtgctggagggcgaggctgtgggcatcaagagcttcggctactccctgtcaggcagcttggatatggatgggaaccaataccctgacctgctggtgggctccctggctgacaccgcagtgctcttcagggccagacccatcctccatgtctcccatgaggtctctattgctccacgaagcatcgacctggagcagcccaactgtgctggcggccactcggtctgtgtggacctaagggtctgtttcagctacattgcagtccccagcagctatagccctactgtggccctggactatgtgttagatgcggacacagaccggaggctccggggccaggttccccgtgtgacgttcctgagccgtaacctggaagaacccaagcaccaggcctcgggcaccgtgtggctgaagcaccagcatgaccgagtctgtggagacgccatgttccagctccaggaaaatgtcaaagacaagcttcgggccattgtagtgaccttgtcctacagtctccagacccctcggctccggcgacaggctcctggccaggggctgcctccagtggcccccatcctcaatgcccaccagcccagcacccagcgggcagagatccacttcctgaagcaaggctgtggtgaagacaagatctgccagagcaatctgcagctggtccacgcccgcttctgtacccgggtcagcgacacggaattccaacctctgcccatggatgtggatggaacaacagccctgtttgcactgagtgggcagccagtcattggcctggagctgatggtcaccaacctgccatcggacccagcccagccccaggctgatggggatgatgcccatgaagcccagctcctggtcatgcttcctgactcactgcactactcaggggtccgggccctggaccctgcggagaagccactctgcctgtccaatgagaatgcctcccatgttgagtgtgagctggggaaccccatgaagagaggtgcccaggtcaccttctacctcatccttagcacctccgggatcagcattgagaccacggaactggaggtagagctgctgttggccacgatcagtgagcaggagctgcatccagtctctgcacgagcccgtgtcttcattgagctgccactgtccattgcaggaatggccattccccagcaactcttcttctctggtgtggtgaggggcgagagagccatgcagtctgagcgggatgtgggcagcaaggtcaagtatgaggtcacggtttccaaccaaggccagtcgctcagaaccctgggctctgccttcctcaacatcatgtggcctcatgagattgccaatgggaagtggttgctgtacccaatgcaggttgagctggagggcgggcaggggcctgggcagaaagggctttgctctcccaggcccaacatcctccacctggatgtggacagtagggataggaggcggcgggagctggagccacctgagcagcaggagcctggtgagcggcaggagcccagcatgtcctggtggccagtgtcctctgctgagaagaagaaaaacatcaccctggactgcgcccggggcacggccaactgtgtggtgttcagctgcccactctacagctttgaccgcgcggctgtgctgcatgtctggggccgtctctggaacagcacctttctggaggagtactcagctgtgaagtccctggaagtgattgtccgggccaacatcacagtgaagtcctccataaagaacttgatgctccgagatgcctccacagtgatcccagtgatggtatacttggaccccatggctgtggtggcagaaggagtgccctggtgggtcatcctcctggctgtactggctgggctgctggtgctagcactgctggtgctgctcctgtggaagatgggattcttcaaacgggcgaagcaccccgaggccaccgtgccccagtaccatgcggtgaagattcctcgggaagaccgacagcagttcaaggaggagaagacgggcaccatcctgaggaacaactggggcagcccccggcgggagggcccggatgcacaccccatcctggctgctgacgggcatcccgagctgggccccgatgggcatccagggccaggcaccgcctaggttcccatgtcccagcctggcctgtggctgccctccatcccttccccagagatggctccttgggatgaagagggtagagtgggctgctggtgtcgcatcaagatttggcaggatcggcttcctcaggggcacagacctctcccacccacaagaactcctcccacccaacttccccttagagtgctgtgagatgagagtgggtaaatcagggacagggccatggggtagggtgagaagggcaggggtgtcctgatgcaaaggtggggagaagggatcctaatcccttcctctcccattcaccctgtgtaacaggaccccaaggacctgcctccccggaagtgccttaacctagagggtcggggaggaggttgtgtcactgactcaggctgctccttctctagtttcccctctcatctgaccttagtttgctgccatcagtctagtggtttcgtggtttcgtctatttattaaaaaatatttgagaacaaaacctctgcctctttgagtcttgctctggcatccccagcatctctgattctccctggtgcccccagctcaggaagaaggtggtagtggggagagagggtcaggggggcttggcagggatgcaggcaccatgacttttgtgaccagttcctagagacgcatgggtgtagcctcaggaggaaagcgagaggagctttaccatgggaacgaaggaaagggacaacattgggaggcaaacgttgggagactagtccagaaacttgcagttgaggatacaacagggtcctagtgtttcctccctgggtcagcgtagaagtagagctttttcactgtcgaaggcgggattgaagttagagattgccctggcagaggttggggagagagggactaggaggtggtacatgaatgtcttctctcattctgctaggtccctctcagtggaagatagataggctggtgggtg

SEQ ID NO: 277561 - DNA, 4474 bp, Homo sapiens
  misc_feature (4325)..(4325): n is a, c, g, or t
agtgggcgccggagctgcggctgctgtagttgtcctagccggtgctggggcggcggggtggcggagcggcgggcgggcgggagggctggcggggcgaacgtctgggagacgtctgaaagaccaacgagactttggagaccagagacgcgcctggggggacctggggcttggggcgtgcgagatttcccttgcattcgctgggagctcgcgcagggatcgtcccatggccggggctcggagccgcgacccttggggggcctccgggatttgctacctttttggctccctgctcgtcgaactgctcttctcacgggctgtcgccttcaatctggacgtgatgggtgccttgcgcaaggagggcgagccaggcagcctcttcggcttctctgtggccctgcaccggcagttgcagccccgaccccagagctggctgctggtgggtgctccccaggccctggctcttcctgggcagcaggcgaatcgcactggaggcctcttcgcttgcccgttgagcctggaggagactgactgctacagagtggacatcgaccagggagctgatatgcaaaaggaaagcaaggagaaccagtggttgggagtcagtgttcggagccaggggcctgggggcaagattgttacctgtgcacaccgatatgaggcaaggcagcgagtggaccagatcctggagacgcgggatatgattggtcgctgctttgtgctcagccaggacctggccatccgggatgagttggatggtggggaatggaagttctgtgagggacgcccccaaggccatgaacaatttgggttctgccagcagggcacagctgccgccttctcccctgatagccactacctcctctttggggccccaggaacctataattggaaggggttgctttttgtgaccaacattgatagctcagaccccgaccagctggtgtataaaactttggaccctgctgaccggctcccaggaccagccggagacttggccctcaatagctacttaggcttctctattgactcggggaaaggtctggtgcgtgcagaagagctgagctttgtggctggagccccccgcgccaaccacaagggtgctgtggtcatcctgcgcaaggacagcgccagtcgcctggtgcccgaggttatgctgtctggggagcgcctgacctccggctttggctactcactggctgtggctgacctcaacagtgatggctggccagacctgatagtgggtgccccctacttctttgagcgccaagaagagctggggggtgctgtgtatgtgtacttgaaccaggggggtcactgggctgggatctcccctctccggctctgcggctcccctgactccatgttcgggatcagcctggctgtcctgggggacctcaaccaagatggctttccagatattgcagtgggtgccccctttgatggtgatgggaaagtcttcatctaccatgggagcagcctgggggttgtcgccaaaccttcacaggtgctggagggcgaggctgtgggcatcaagagcttcggctactccctgtcaggcagcttggatatggatgggaaccaataccctgacctgctggtgggctccctggctgacaccgcagtgctcttcagggccagacccatcctccatgtctcccatgaggtctctattgctccacgaagcatcgacctggagcagcccaactgtgctggcggccactcggtctgtgtggacctaagggtctgtttcagctacattgcagtccccagcagctatagccctactgtggccctggactatgtgttagatgcggacacagaccggaggctccggggccaggttccccgtgtgacgttcctgagccgtaacctggaagaacccaagcaccaggcctcgggcaccgtgtggctgaagcaccagcatgaccgagtctgtggagacgccatgttccagctccaggaaaatgtcaaagacaagcttcgggccattgtagtgaccttgtcctacagtctccagacccctcggctccggcgacaggctcctggccaggggctgcctccagtggcccccatcctcaatgcccaccagcccagcacccagcgggcagagatccacttcctgaagcaaggctgtggtgaagacaagatctgccagagcaatctgcagctggtccacgcccgcttctgtacccgggtcagcgacacggaattccaacctctgcccatggatgtggatggaacaacagccctgtttgcactgagtgggcagccagtcattggcctggagctgatggtcaccaacctgccatcggacccagcccagccccaggctgatggggatgatgcccatgaagcccagctcctggtcatgcttcctgactcactgcactactcaggggtccgggccctggaccctgcggagaagccactctgcctgtccaatgagaatgcctcccatgttgagtgtgagctggggaaccccatgaagagaggtgcccaggtcaccttctacctcatccttagcacctccgggatcagcattgagaccacggaactggaggtagagctgctgttggccacgatcagtgagcaggagctgcatccagtctctgcacgagcccgtgtcttcattgagctgccactgtccattgcaggaatggccattccccagcaactcttcttctctggtgtggtgaggggcgagagagccatgcagtctgagcgggatgtgggcagcaaggtcaagtatgaggtcacggtttccaaccaaggccagtcgctcagaaccctgggctctgccttcctcaacatcatgtggcctcatgagattgccaatgggaagtggttgctgtacccaatgcaggttgagctggagggcgggcaggggcctgggcagaaagggctttgctctcccaggcccaacatcctccacctggatgtggacagtagggataggaggcggcgggagctggagccacctgagcagcaggagcctggtgagcggcaggagcccagcatgtcctggtggccagtgtcctctgctgagaagaagaaaaacatcaccctggactgcgcccggggcacggccaactgtgtggtgttcagctgcccactctacagctttgaccgcgcggctgtgctgcatgtctggggccgtctctggaacagcacctttctggaggagtactcagctgtgaagtccctggaagtgattgtccgggccaacatcacagtgaagtcctccataaagaacttgatgctccgagatgcctccacagtgatcccagtgatggtatacttggaccccatggctgtggtggcagaaggagtgccctggtgggtcatcctcctggctgtactggctgggctgctggtgctagcactgctggtgctgctcctgtggaagatgggattcttcaaacgggcgaagcaccccgaggccaccgtgccccagtaccatgcggtgaagattcctcgggaagaccgacagcagttcaaggaggagaagacgggcaccatcctgaggaacaactggggcagcccccggcgggagggcccggatgcacaccccatcctggctgctgacgggcatcccgagctgggccccgatgggcatccagggccaggcaccgcctaggttcccatgtcccagcctggcctgtggctgccctccatcccttccccagagatggctccttgggatgaagagggtagagtgggctgctggtgtcgcatcaagatttggcaggatcggcttcctcaggggcacagacctctcccacccacaagaactcctcccacccaacttccccttagagtgctgtgagatgagagtgggtaaatcagggacagggccatggggtagggtgagaagggcaggggtgtcctgatgcaaaggtggggagaagggatcctaatcccttcctctcccattcaccctgtgtaacaggaccccaaggacctgcctccccggaagtgccttaacctagagggtcggggaggaggttgtgtcactgactcaggctgctccttctctagtttcccctctcatctgaccttagtttgctgccatcagtctagtggtttcgtggtttcgtctatttattaaaaaatatttgagaacaaaaaaaagaagcactgcaagagcaccaaacactttttgtcgggcagcatatcggggcctttgaaagaaggtgttacttaaagaccatttctgttgggggcgcggggcgccccggggaggtgtactgtcaccttgggtggccaaggcggtggtcccccaaaagagagcactcggggcacagcgacacggtggctcgggggtnctccccaccaagtataaagaaccggcccggggggaacacccggaggcgtttgggaacaaacttcccaaagggggaggcccgaggagaccaacagggggtgcattcacacaggagcgccagggagagccgagattaaataccggagagag

SEQ ID NO: 277562 - DNA, 4109 bp, Homo sapiens
agtgggcgccggagctgcggctgctgtagttgtcctagccggtgctggggcggcggggtggcggagcggcgggcgggcgggagggctggcggggcgaacgtctgggagacgtctgaaagaccaacgagactttggagaccagagacgcgcctggggggacctggggcttggggcgtgcgagatttcccttgcattcgctgggagctcgcgcagggatcgtcccatggccggggctcggagccgcgacccttggggggcctccgggatttgctacctttttggctccctgctcgtcgaactgctcttctcacgggctgtcgccttcaatctggacgtgatgggtgccttgcgcaaggagggcgagccaggcagcctcttcggcttctctgtggccctgcaccggcagttgcagccccgaccccagagctggctgctggtgggtgctccccaggccctggctcttcctgggcagcaggcgaatcgcactggaggcctcttcgcttgcccgttgagcctggaggagactgactgctacagagtggacatcgaccagggagctgatatgcaaaaggaaagcaaggagaaccagtggttgggagtcagtgttcggagccaggggcctgggggcaagattgttacctgtgcacaccgatatgaggcaaggcagcgagtggaccagatcctggagacgcgggatatgattggtcgctgctttgtgctcagccaggacctggccatccgggatgagttggatggtggggaatggaagttctgtgagggacgcccccaaggccatgaacaatttgggttctgccagcagggcacagctgccgccttctcccctgatagccactacctcctctttggggccccaggaacctataattggaaggggttgctttttgtgaccaacattgatagctcagaccccgaccagctggtgtataaaactttggaccctgctgaccggctcccaggaccagccggagacttggccctcaatagctacttaggcttctctattgactcggggaaaggtctggtgcgtgcagaagagctgagctttgtggctggagccccccgcgccaaccacaagggtgctgtggtcatcctgcgcaaggacagcgccagtcgcctggtgcccgaggttatgctgtctggggagcgcctgacctccggctttggctactcactggctgtggctgacctcaacagtgatggctggccagacctgatagtgggtgccccctacttctttgagcgccaagaagagctggggggtgctgtgtatgtgtacttgaaccaggggggtcactgggctgggatctcccctctccggctctgcggctcccctgactccatgttcgggatcagcctggctgtcctgggggacctcaaccaagatggctttccagatattgcagtgggtgccccctttgatggtgatgggaaagtcttcatctaccatgggagcagcctgggggttgtcgccaaaccttcacaggtgctggagggcgaggctgtgggcatcaagagcttcggctactccctgtcaggcagcttggatatggatgggaaccaataccctgacctgctggtgggctccctggctgacaccgcagtgctcttcagggccagacccatcctccatgtctcccatgaggtctctattgctccacgaagcatcgacctggagcagcccaactgtgctggcggccactcggtctgtgtggacctaagggtctgtttcagctacattgcagtccccagcagctatagccctactgtggatgcggacacagaccggaggctccggggccaggttccccgtgtgacgttcctgagccgtaacctggaagaacccaagcaccaggcctcgggcaccgtgtggctgaagcaccagcatgaccgagtctgtggagacgccatgttccagctccaggaaaatgtcaaagacaagcttcgggccattgtagtgaccttgtcctacagtctccagacccctcggctccggcgacaggctcctggccaggggctgcctccagtggcccccatcctcaatgcccaccagcccagcacccagcgggcagagatccacttcctgaagcaaggctgtggtgaagacaagatctgccagagcaatctgcagctggtccacgcccgcttctgtacccgggtcagcgacacggaattccaacctctgcccatggatgtggatggaacaacagccctgtttgcactgagtgggcagccagtcattggcctggagctgatggtcaccaacctgccatcggacccagcccagccccaggctgatggggatgatgcccatgaagcccagctcctggtcatgcttcctgactcactgcactactcaggggtccgggccctggaccctgcggagaagccactctgcctgtccaatgagaatgcctcccatgttgagtgtgagctggggaaccccatgaagagaggtgcccaggtcaccttctacctcatccttagcacctccgggatcagcattgagaccacggaactggaggtagagctgctgttggccacgatcagtgagcaggagctgcatccagtctctgcacgagcccgtgtcttcattgagctgccactgtccattgcaggaatggccattccccagcaactcttcttctctggtgtggtgaggggcgagagagccatgcagtctgagcgggatgtgggcagcaaggtcaagtatgaggtcacggtttccaaccaaggccagtcgctcagaaccctgggctctgccttcctcaacatcatgtggcctcatgagattgccaatgggaagtggttgctgtacccaatgcaggttgagctggagggcgggcaggggcctgggcagaaagggctttgctctcccaggcccaacatcctccacctggatgtggacagtagggataggaggcggcgggagctggagccacctgagcagcaggagcctggtgagcggcaggagcccagcatgtcctggtggccagtgtcctctgctgagaagaagaaaaacatcaccctggactgcgcccggggcacggccaactgtgtggtgttcagctgcccactctacagctttgaccgcgcggctgtgctgcatgtctggggccgtctctggaacagcacctttctggaggagtactcagctgtgaagtccctggaagtgattgtccgggccaacatcacagtgaagtcctccataaagaacttgatgctccgagatgcctccacagtgatcccagtgatggtatacttggaccccatggctgtggtggcagaaggagtgccctggtgggtcatcctcctggctgtactggctgggctgctggtgctagcactgctggtgctgctcctgtggaagatgggattcttcaaacgggcgaagcaccccgaggccaccgtgccccagtaccatgcggtgaagattcctcgggaagaccgacagcagttcaaggaggagaagacgggcaccatcctgaggaacaactggggcagcccccggcgggagggcccggatgcacaccccatcctggctgctgacgggcatcccgagctgggccccgatgggcatccagggccaggcaccgcctaggttcccatgtcccagcctggcctgtggctgccctccatcccttccccagagatggctccttgggatgaagagggtagagtgggctgctggtgtcgcatcaagatttggcaggatcggcttcctcaggggcacagacctctcccacccacaagaactcctcccacccaacttccccttagagtgctgtgagatgagagtgggtaaatcagggacagggccatggggtagggtgagaagggcaggggtgtcctgatgcaaaggtggggagaagggatcctaatcccttcctctcccattcaccctgtgtaacaggaccccaaggacctgcctccccggaagtgccttaacctagagggtcggggaggaggttgtgtcactgactcaggctgctccttctctagtttcccctctcatctgaccttagtttgctgccatcagtctagtggtttcgtggtttcgtctatttattaaaaaatatttgagaacaaaa

SEQ ID NO: 277563 - DNA, 2418 bp, Homo sapiens
ggcaagagttcaaggattgagagaaagccctctcaggaggaccagtcagagggaagggctgagcctgcagaaaaggcagaaggtggaagaggacctgccgatggacttggagactgagatgagggtcagtgatggggccacgggggctcccatggcaaggaatagcaatccttcacagtacactaataatatgcagtctacatacatctcattggttagtcttcaaacctctgtgaggtaggaattatattagtctcattttatagatggagaactgaagcctagagaggttaagttacttggccaaggtaagtaatggtggagctgagatgagaacggaggtcccctgactcccagtcgtgtgtacagaggcctgaggcttggacgggtgtgatggggacctggggtgggaagagaggctcagggagtgaaggcaggtactgggggagcagactgggcgggggaatggtagggggaggtgttcagaacttagcaggagtggggtctgactctccagggatgtggatggaacaacagccctgtttgcactgagtgggcagccagtcattggcctggagctgatggtcaccaacctgccatcggacccagcccagccccaggctgatggggatgatgcccatgaagcccagctcctggtcatgcttcctgactcactgcactactcaggggtccgggccctggaccctgcggagaagccactctgcctgtccaatgagaatgcctcccatgttgagtgtgagctggggaaccccatgaagagaggtgcccaggtcaccttctacctcatccttagcacctccgggatcagcattgagaccacggaactggaggtagagctgctgttggccacgatcagtgagcaggagctgcatccagtctctgcacgagcccgtgtcttcattgagctgccactgtccattgcaggaatggccattccccagcaactcttcttctctggtgtggtgaggggcgagagagccatgcagtctgagcgggatgtgggcagcaaggtcaagtatgaggtcacggtttccaaccaaggccagtcgctcagaaccctgggctctgccttcctcaacatcatgtggcctcatgagattgccaatgggaagtggttgctgtacccaatgcaggttgagctggagggcgggcaggggcctgggcagaaagggctttgctctcccaggcccaacatcctccacctggatgtggacagtagggataggaggcggcgggagctggagccacctgagcagcaggagcctggtgagcggcaggagcccagcatgtcctggtggccagtgtcctctgctgagaagaagaaaaacatcaccctggactgcgcccggggcacggccaactgtgtggtgttcagctgcccactctacagctttgaccgcgcggctgtgctgcatgtctggggccgtctctggaacagcacctttctggaggagtactcagctgtgaagtccctggaagtgattgtccgggccaacatcacagtgaagtcctccataaagaacttgatgctccgagatgcctccacagtgatcccagtgatggtatacttggaccccatggctgtggtggcagaaggagtgccctggtgggtcatcctcctggctgtactggctgggctgctggtgctagcactgctggtgctgctcctgtggaagatgggattcttcaaacgggcgaagcaccccgaggccaccgtgccccagtaccatgcggtgaagattcctcgggaagaccgacagcagttcaaggaggagaagacgggcaccatcctgaggaacaactggggcagcccccggcgggagggcccggatgcacaccccatcctggctgctgacgggcatcccgagctgggccccgatgggcatccagggccaggcaccgcctaggttcccatgtcccagcctggcctgtggctgccctccatcccttccccagagatggctccttgggatgaagagggtagagtgggctgctggtgtcgcatcaagatttggcaggatcggcttcctcaggggcacagacctctcccacccacaagaactcctcccacccaacttccccttagagtgctgtgagatgagagtgggtaaatcagggacagggccatggggtagggtgagaagggcaggggtgtcctgatgcaaaggtggggagaagggatcctaatcccttcctctcccattcaccctgtgtaacaggaccccaaggacctgcctccccggaagtgccttaacctagagggtcggggaggaggttgtgtcactgactcaggctgctccttctctagtttcccctctcatctgaccttagtttgctgccatcagtctagtggtttcgtggtttcgtctatttattaaaaaatatttgagaacaaaa

SEQ ID NO: 277564 - DNA, 4240 bp, Homo sapiens
agtgggcgccggagctgcggctgctgtagttgtcctagccggtgctggggcggcggggtggcggagcggcgggcgggcgggagggctggcggggcgaacgtctgggagacgtctgaaagaccaacgagactttggagaccagagacgcgcctggggggacctggggcttggggcgtgcgagatttcccttgcattcgctgggagctcgcgcagggatcgtcccatggccggggctcggagccgcgacccttggggggcctccgggatttgctacctttttggctccctgctcgtcgaactgctcttctcacgggctgtcgccttcaatctggacgtgatgggtgccttgcgcaaggagggcgagccaggcagcctcttcggcttctctgtggccctgcaccggcagttgcagccccgaccccagagctggctgctggtgggtgctccccaggccctggctcttcctgggcagcaggcgaatcgcactggaggcctcttcgcttgcccgttgagcctggaggagactgactgctacagagtggacatcgaccagggagctgatatgcaaaaggaaagcaaggagaaccagtggttgggagtcagtgttcggagccaggggcctgggggcaagattgttacctgtgcacaccgatatgaggcaaggcagcgagtggaccagatcctggagacgcgggatatgattggtcgctgctttgtgctcagccaggacctggccatccgggatgagttggatggtggggaatggaagttctgtgagggacgcccccaaggccatgaacaatttgggttctgccagcagggcacagctgccgccttctcccctgatagccactacctcctctttggggccccaggaacctataattggaaggggttgctttttgtgaccaacattgatagctcagaccccgaccagctggtgtataaaactttggaccctgctgaccggctcccaggaccagccggagacttggccctcaatagctacttaggcttctctattgactcggggaaaggtctggtgcgtgcagaagagctgagctttgtggctggagccccccgcgccaaccacaagggtgctgtggtcatcctgcgcaaggacagcgccagtcgcctggtgcccgaggttatgctgtctggggagcgcctgacctccggctttggctactcactggctgtggctgacctcaacagtgatggctggccagacctgatagtgggtgccccctacttctttgagcgccaagaagagctggggggtgctgtgtatgtgtacttgaaccaggggggtcactgggctgggatctcccctctccggctctgcggctcccctgactccatgttcgggatcagcctggctgtcctgggggacctcaaccaagatggctttccagatattgcagtgggtgccccctttgatggtgatgggaaagtcttcatctaccatgggagcagcctgggggttgtcgccaaaccttcacaggtgctggagggcgaggctgtgggcatcaagagcttcggctactccctgtcaggcagcttggatatggatgggaaccaataccctgacctgctggtgggctccctggctgacaccgcagtgctcttcagggccagacccatcctccatgtctcccatgaggtctctattgctccacgaagcatcgacctggagcagcccaactgtgctggcggccactcggtctgtgtggacctaagggtctgtttcagctacattgcagtccccagcagctatagccctactgtggccctggactatgtgttagatgcggacacagaccggaggctccggggccaggttccccgtgtgacgttcctgagccgtaacctggaagaacccaagcaccaggcctcgggcaccgtgtggctgaagcaccagcatgaccgagtctgtggagacgccatgttccagctccaggaaaatgtcaaagacaagcttcgggccattgtagtgaccttgtcctacagtctccagacccctcggctccggcgacaggctcctggccaggggctgcctccagtggcccccatcctcaatgcccaccagcccagcacccagcgggcagagatccacttcctgaagcaaggctgtggtgaagacaagatctgccagagcaatctgcagctggtccacgcccgcttctgtacccgggtcagcgacacggaattccaacctctgcccatggatgtggatggaacaacagccctgtttgcactgagtgggcagccagtcattggcctggagctgatggtcaccaacctgccatcggacccagcccagccccaggctgatggggatgatgcccatgaagcccagctcctggtcatgcttcctgactcactgcactactcaggggtccgggccctggaccctgcggagaagccactctgcctgtccaatgagaatgcctcccatgttgagtgtgagctggggaaccccatgaagagaggtgcccaggtcaccttctacctcatccttagcacctccgggatcagcattgagaccacggaactggaggtagagctgctgttggccacgatcagtgagcaggagctgcatccagtctctgcacgagcccgtgtcttcattgagctgccactgtccattgcaggaatggccattccccagcaactcttcttctctggtgtggtgaggggcgagagagccatgcagtctgagcgggatgtgggcagcaaggtcaagtatgaggtcacggtttccaaccaaggccagtcgctcagaaccctgggctctgccttcctcaacatcatgtggcctcatgagattgccaatgggaagtggttgctgtacccaatgcaggttgagctggagggcgggcaggggcctgggcagaaagggctttgctctcccaggcccaacatcctccacctggatgtggacagtagggataggaggcggcgggagctggagccacctgagcagcaggagcctggtgagcggcaggagcccagcatgtcctggtggccagtgtcctctgctgagaagaagaaaaacatcaccctggactgcgcccggggcacggccaactgtgtggtgttcagctgcccactctacagctttgaccgcgcggctgtgctgcatgtctggggccgtctctggaacagcacctttctggaggagtactcagctgtgaagtccctggaagtgattgtccgggccaacatcacagtgaagtcctccataaagaacttgatgctccgagatgcctccacagtgatcccagtgatggtatacttggaccccatggctgtggtggcagaaggagtgccctggtgggtcatcctcctggctgtactggctgggctgctggtgctagcactgctggtgctgctcctgtggaagtgtggcttcttccatcggagcagccagagctcatcttttcccaccaactatcaccgggcctgtctggctgtgcagccttcagccatggaagttgggggtccagggactgtgggatgggattcttcaaacgggcgaagcaccccgaggccaccgtgccccagtaccatgcggtgaagattcctcgggaagaccgacagcagttcaaggaggagaagacgggcaccatcctgaggaacaactggggcagcccccggcgggagggcccggatgcacaccccatcctggctgctgacgggcatcccgagctgggccccgatgggcatccagggccaggcaccgcctaggttcccatgtcccagcctggcctgtggctgccctccatcccttccccagagatggctccttgggatgaagagggtagagtgggctgctggtgtcgcatcaagatttggcaggatcggcttcctcaggggcacagacctctcccacccacaagaactcctcccacccaacttccccttagagtgctgtgagatgagagtgggtaaatcagggacagggccatggggtagggtgagaagggcaggggtgtcctgatgcaaaggtggggagaagggatcctaatcccttcctctcccattcaccctgtgtaacaggaccccaaggacctgcctccccggaagtgccttaacctagagggtcggggaggaggttgtgtcactgactcaggctgctccttctctagtttcccctctcatctgaccttagtttgctgccatcagtctagtggtttcgtggtttcgtctatttattaaaaaatatttgagaacaaaa

SEQ ID NO: 277565 - DNA, 372 bp, Homo sapiens
ggatgataatgtgcaccttgtaggactattgcgaagcttaagtgagataagtgcctgacaagtagtaggtgctcaataaatgggactgtcattaggtaacataagcatcacttggggaagctactctgcctgtgctgtcaagtaagagattcccttccatgctgccccctccacgcatttcaaagctgaatagctcagatttggggcaggcagctattttggatataagattagtttgagaagacttcctggaggaggggagtttgaggtcaagtaaggaaaatgggagagatggcagtctcagcagggttgagctgagtggcttagacccctgtctgtccttatccctaggactgcgcccggggcacggcc

SEQ ID NO: 277566 - DNA, 338 bp, Homo sapiens
gtctttctgtctctggctgtgatctctctggtctctttttctctctccacctcttcttcttccaccattttctggcctttctgtggctctgtctccctactctgtggcccctactctggatgtcccctccctggtgtctcaccccaccccccacagggttgctttttgtgaccaacattgatagctcagaccccgaccagctggtgtataaaactttggaccctgctgaccggctcccaggaccagccggagacttggccctcaatagctacttaggtttgtaagctcccacctcctggactctaggggcatggcccagcctcccctccttccccagg

SEQ ID NO: 277567 - DNA, 363 bp, Homo sapiens
gttgggcaccattacatttataatttcaggaggtaaggggaagggagggagacatggggcatttaggagaagggtctccttccctgttcccttaggagtactcagctgtgaagtccctggaagtgattgtccgggccaacatcacagtgaagtcctccataaagaacttgatgctccgagatgcctccacagtggtgagctgcagggttgggggataggtggggaggactctcttctttcctgctccctccagttcttgttccattgacctcttgctccattgaccccttgctccccagatcccagtgatggtatacttggaccccatggctgtggtggcagaaggagtgccctggtgggtca

SEQ ID NO: 277568 - DNA, 3535 bp, Homo sapiens
ctctagaggatctctcgctatcatcggcaccccatgccttccaccccattgagctagtgcacacatgaatggggggtgcctcctttccctcgcacggccaagtgctcctcaacatgctggcatgggccccaagtgcacgctgggcctgcagctggggcctgcatgctccaacacactagcccacacctcatcactgccattcccgtctccgcacgctgctgctggctgagctgacactcgggttgctttttgtgaccaacattgatagctcagaccccgaccagctggtgtataaaactttggaccctgctgaccggctcccaggaccagccggagacttggccctcaatagctacttagggggactttccctgaggggatggatggtgggcacatattgaagaaagggctaatgttgttggcttctctattgactcggggaaaggtctggtgcgtgcagaagagctgagctttgtggctggagccccccgcgccaaccacaagggtgctgtggtcatcctgcgcaaggacagcgccagtcgcctggtgcccgaggttatgctgtctggggagcgcctgacctccggctttggctactcactggctgtggctgacctcaacagtgatggctggccagacctgatagtgggtgccccctacttctttgagcgccaagaagagctggggggtgctgtgtatgtgtacttgaaccaggggggtcactgggctgggatctcccctctccggctctgcggctcccctgactccatgttcgggatcagcctggctgtcctgggggacctcaaccaagatggctttccagatattgcagtgggtgccccctttgatggtgatgggaaagtcttcatctaccatgggagcagcctgggggttgtcgccaaaccttcacaggtgctggagggcgaggctgtgggcatcaagagcttcggctactccctgtcaggcagcttggatatggatgggaaccaataccctgacctgctggtgggctccctggctgacaccgcagtgctcttcagggccagacccatcctccatgtctcccatgaggtctctattgctccacgaagcatcgacctggagcagcccaactgtgctggcggccactcggtctgtgtggacctaagggtctgtttcagctacattgcagtccccagcagctatagccctactgtggccctggactatgtgttagatgcggacacagaccggaggctccggggccaggttccccgtgtgacgttcctgagccgtaacctggaagaacccaagcaccaggcctcgggcaccgtgtggctgaagcaccagcatgaccgagtctgtggagacgccatgttccagctccaggaaaatgtcaaagacaagcttcgggccattgtagtgaccttgtcctacagtctccagacccctcggctccggcgacaggctcctggccaggggctgcctccagtggcccccatcctcaatgcccaccagcccagcacccagcgggcagagatccacttcctgaagcaaggctgtggtgaagacaagatctgccagagcaatctgcagctggtccacgcccgcttctgtacccgggtcagcgacacggaattccaacctctgcccatggatgtggatggaacaacagccctgtttgcactgagtgggcagccagtcattggcctggagctgatggtcaccaacctgccatcggacccagcccagccccaggctgatggggatgatgcccatgaagcccagctcctggtcatgcttcctgactcactgcactactcaggggtccgggccctggaccctgcggagaagccactctgcctgtccaatgagaatgcctcccatgttgagtgtgagctggggaaccccatgaagagaggtgcccaggtcaccttctacctcatccttagcacctccgggatcagcattgagaccacggaactggaggtagagctgctgttggccacgatcagtgagcaggagctgcatccagtctctgcacgagcccgtgtcttcattgagctgccactgtccattgcaggaatggccattccccagcaactcttcttctctggtgtggtgaggggcgagagagccatgcagtctgagcgggatgtgggcagcaaggtcaagtatgaggtcacggtttccaaccaaggccagtcgctcagaaccctgggctctgccttcctcaacatcatgtggcctcatgagattgccaatgggaagtggttgctgtacccaatgcaggttgagctggagggcgggcaggggcctgggcagaaagggctttgctctcccaggcccaacatcctccacctggatgtggacagtagggataggaggcggcgggagctggagccacctgagcagcaggagcctggtgagcggcaggagcccagcatgtcctggtggccagtgtcctctgctgagaagaagaaaaacatcaccctggactgcgcccggggcacggccaactgtgtggtgttcagctgcccactctacagctttgaccgcgcggctgtgctgcatgtctggggccgtctctggaacagcacctttctggaggagtactcagctgtgaagtccctggaagtgattgtccgggccaacatcacagtgaagtcctccataaagaacttgatgctccgagatgcctccacagtgatcccagtgatggtatacttggaccccatggctgtggtggcagaaggagtgccctggtgggtcatcctcctggctgtactggctgggctgctggtgctagcactgctggtgctgctcctgtggaagatgggattcttcaaacgggcgaagcaccccgaggccaccgtgccccagtaccatgcggtgaagattcctcgggaagaccgacagcagttcaaggaggagaagacgggcaccatcctgaggaacaactggggcagcccccggcgggagggcccggatgcacaccccatcctggctgctgacgggcatcccgagctgggccccgatgggcatccagggccaggcaccgcctaggttcccatgtcccagcctggcctgtggctgccctccatcccttccccagagatggctccttgggatgaagagggtagagtgggctgctggtgtcgcatcaagatttggcaggatcggcttcctcaggggcacagacctctcccacccacaagaactcctcccacccaacttccccttagagtgctgtgagatgagagtgggtaaatcagggacagggccatggggtagggtgagaagggcaggggtgtcctgatgcaaaggtggggagaagggatcctaatcccttcctctcccattcaccctgtgtaacaggaccccaaggacctgcctccccggaagtgccttaacctagagggtcggggaggaggttgtgtcactgactcaggctgctccttctctagtttcccctctcatctgaccttagtttgctgccatcagtctagtggtttcgtggtttcgtctatttattaaaaaatatttgagaacaaaa

SEQ ID NO: 277569 - DNA, 2500 bp, Homo sapiens
ggcaagagttcaaggattgagagaaagccctctcaggaggaccagtcagagggaagggctgagcctgcagaaaaggcagaaggtggaagaggacctgccgatggacttggagactgagatgagggtcagtgatggggccacgggggctcccatggcaaggaatagcaatccttcacagtacactaataatatgcagtctacatacatctcattggttagtcttcaaacctctgtgaggtaggaattatattagtctcattttatagatggagaactgaagcctagagaggttaagttacttggccaaggtaagtaatggtggagctgagatgagaacggaggtcccctgactcccagtcgtgtgtacagaggcctgaggcttggacgggtgtgatggggacctggggtgggaagagaggctcagggagtgaaggcaggtactgggggagcagactgggcgggggaatggtagggggaggtgttcagaacttagcaggagtggggtctgactctccagggatgtggatggaacaacagccctgtttgcactgagtgggcagccagtcattggcctggagctgatggtcaccaacctgccatcggacccagcccagccccaggctgatggggatgatgcccatgaagcccagctcctggtcatgcttcctgactcactgcactactcaggggtccgggccctggaccctgcggtgaggacctgggggcaggatggggtggggtcttgaggggctccagtaacccagactgaccttgccttctctcccattccaggagaagccactctgcctgtccaatgagaatgcctcccatgttgagtgtgagctggggaaccccatgaagagaggtgcccaggtcaccttctacctcatccttagcacctccgggatcagcattgagaccacggaactggaggtagagctgctgttggccacgatcagtgagcaggagctgcatccagtctctgcacgagcccgtgtcttcattgagctgccactgtccattgcaggaatggccattccccagcaactcttcttctctggtgtggtgaggggcgagagagccatgcagtctgagcgggatgtgggcagcaaggtcaagtatgaggtcacggtttccaaccaaggccagtcgctcagaaccctgggctctgccttcctcaacatcatgtggcctcatgagattgccaatgggaagtggttgctgtacccaatgcaggttgagctggagggcgggcaggggcctgggcagaaagggctttgctctcccaggcccaacatcctccacctggatgtggacagtagggataggaggcggcgggagctggagccacctgagcagcaggagcctggtgagcggcaggagcccagcatgtcctggtggccagtgtcctctgctgagaagaagaaaaacatcaccctggactgcgcccggggcacggccaactgtgtggtgttcagctgcccactctacagctttgaccgcgcggctgtgctgcatgtctggggccgtctctggaacagcacctttctggaggagtactcagctgtgaagtccctggaagtgattgtccgggccaacatcacagtgaagtcctccataaagaacttgatgctccgagatgcctccacagtgatcccagtgatggtatacttggaccccatggctgtggtggcagaaggagtgccctggtgggtcatcctcctggctgtactggctgggctgctggtgctagcactgctggtgctgctcctgtggaagatgggattcttcaaacgggcgaagcaccccgaggccaccgtgccccagtaccatgcggtgaagattcctcgggaagaccgacagcagttcaaggaggagaagacgggcaccatcctgaggaacaactggggcagcccccggcgggagggcccggatgcacaccccatcctggctgctgacgggcatcccgagctgggccccgatgggcatccagggccaggcaccgcctaggttcccatgtcccagcctggcctgtggctgccctccatcccttccccagagatggctccttgggatgaagagggtagagtgggctgctggtgtcgcatcaagatttggcaggatcggcttcctcaggggcacagacctctcccacccacaagaactcctcccacccaacttccccttagagtgctgtgagatgagagtgggtaaatcagggacagggccatggggtagggtgagaagggcaggggtgtcctgatgcaaaggtggggagaagggatcctaatcccttcctctcccattcaccctgtgtaacaggaccccaaggacctgcctccccggaagtgccttaacctagagggtcggggaggaggttgtgtcactgactcaggctgctccttctctagtttcccctctcatctgaccttagtttgctgccatcagtctagtggtttcgtggtttcgtctatttattaaaaaatatttgagaacaaaa

SEQ ID NO: 277570 - DNA, 702 bp, Homo sapiens
ctccttgaactgctgtcggtcttcccgaggaatcttcaccgcatggtactggggcagaccgacagcagttcaaggaggagaagacgggcaccatcctgaggaacaactggggcagcccccggcgggagggcccggatgcacaccccatcctggctgctgacgggcatcccgagctgggccccgatgggcatccagggccaggcaccgcctaggttcccatgtcccagcctggcctgtggctgccctccatcccttccccagagatggctccttgggatgaagagggtagagtgggctgctggtgtcgcatcaagatttggcaggatcggcttcctcaggggcacagacctctcccacccacaagaactcctcccacccaacttccccttagagtgctgtgagatgagagtgggtaaatcagggacagggccatggggtagggtgagaagggcaggggtgtcctgatgcaaaggtggggagaagggatcctaatcccttcctctcccattcaccctgtgtaacaggaccccaaggacctgcctccccggaagtgccttaacctagagggtcggggaggaggttgtgtcactgactcaggctgctccttctctagtttcccctctcatctgaccttagtttgctgccatcagtctagtggtttcgtggtttcgtctatttattaaaaaatatttgagaacaaaa

SEQ ID NO: 277571 - DNA, 379 bp, Homo sapiens
gctgagggtcacctcaagccccacctgcccatgattcttctgatggagactcacaacaggctatggtctgggctatctctgtggggtgcaatgtctgctctctgtatcaatacagagggtgacaaacactatgtggatgccgaccggggctgcagagatttaacagtgccatggggtcccgattgcactcaccatccacaccatcatgtaggagaaggctgcgatccacagcgtggaggaagcaaacgtcaccatgaaccatttctcccagcgcggcttgttgcagttgggtacagtgaagtataagacgaaactcagcggccaggtgaacgcccatttcactgtttccagtttacccgctggaaaaatgaaaaaggcc

SEQ ID NO: 277572 - DNA, 628 bp, Homo sapiens
tatatggaggcggcggcggcggcgcgggggagggggcgggggcgcgatcgatggaatataattttcctcaaactcggaaaataaagttcagagctgatcaaatttgaaaacagatgtcgaatcgcgactctaaataaggtcaggctccgccccgccaagtcccacaccaccttctctggggaaaggcagctctcacctgggcagcccctggaggcttctacccctagaggggaaaataggtctcacggcaagacagcagtccccaggtggatattcaggggccaggacagctctgtcggatctcaccaaccccaccagcgcccaggtgctgagaccgaggtgctgagaggctagaagagaacttcagccctgcctgacagagaaggttcagcctcactcccgctcaccactcactcaggcaagtcgctaaacatccccgagcctcaagtttcctcatctgcaaaatgggacaataatgacctccctcctagagtggttgggaaggttaaaccgcagggcgcatggagcacagctggtactgcaccaagtaccaagtaaacacgcatttgctgtgagcttgctgcttccgaataatctcattaaaaatattaagaattttgccagataa

SEQ ID NO: 277573 - DNA, 329 bp, Homo sapiens
ccaagagatagagagactcagaatcaagacaggcagacatggacagggacaaggagacaggggcaggtggtggcaaaggtggaaatggagaaaggaaatgaaagtgagggtgggtgtaacttggccaaagtcccacagggatgaggtgagcctggacttgaatgcaggtcagtatgactctaggcccccgatatttgtactgtcagaggacagagcaagggccagagacagaaaaggaggaaagagacaagacaaggagacagacacagagtccaggatatggagaaactgagagagagtcagagagctgtaaagaccctgtgggagaa

SEQ ID NO: 277574 - DNA, 204 bp, Homo sapiens
cggccgcccggccgggctcggctcgcagatatatggaggcggcggcggcggcgcgggggagggggcgggggcgcgatcgatggaatataattttcctcaaactcggaaaataaagttcagagctgatcaaatttgaaaacagatgtcgaatcgcgactctaaataaggttcgatcccgggactgagggagtgggggtggggcgg

SEQ ID NO: 277575 - DNA, 634 bp, Homo sapiens
cttacccccatcctcacaccacctttgaggtaggaactgccatgatggatgcccatttcacagatgtggaaactgaggttctgacaggaaaagtaacttggccaaagtcccacagggatgaggtgagcctggacttgaatgcaggtcaggctccgccccgccaagtcccacaccaccttctctggggaaaggcagctctcacctgggcagcccctggaggcttctacccctagaggggaaaataggtctcacggcaagacagcagtccccaggtggatattcaggggccaggacagctctgtcggatctcaccaaccccaccagcgcccaggtgctgagaccgaggtgctgagaggctagaagagaacttcagccctgcctgacagagaaggttcagcctcactcccgctcaccactcactcaggcaagtcgctaaacatccccgagcctcaagtttcctcatctgcaaaatgggacaataatgacctccctcctagagtggttgggaaggttaaaccgcagggcgcatggagcacagctggtactgcaccaagtaccaagtaaacacgcatttgctgtgagcttgctgcttccgaataatctcattaaaaatattaagaattttgccagataa

SEQ ID NO: 277576 - DNA, 790 bp, Homo sapiens
cttacccccatcctcacaccacctttgaggtaggaactgccatgatggatgcccatttcacagatgtggaaactgaggttctgacaggaaaagtaacttggccaaagtcccacagggatgaggtgagcctggacttgaatgcagtggacgcgcggacaaacggacaggcgcgaggtggaggtggcgacgatgcgtccaggacccctgctggacacgcaagcctggaccgggactggaacacggacccgcacacacgcagcctggataggagatacacggacagagggacatatggatacagtcaggctccgccccgccaagtcccacaccaccttctctggggaaaggcagctctcacctgggcagcccctggaggcttctacccctagaggggaaaataggtctcacggcaagacagcagtccccaggtggatattcaggggccaggacagctctgtcggatctcaccaaccccaccagcgcccaggtgctgagaccgaggtgctgagaggctagaagagaacttcagccctgcctgacagagaaggttcagcctcactcccgctcaccactcactcaggcaagtcgctaaacatccccgagcctcaagtttcctcatctgcaaaatgggacaataatgacctccctcctagagtggttgggaaggttaaaccgcagggcgcatggagcacagctggtactgcaccaagtaccaagtaaacacgcatttgctgtgagcttgctgcttccgaataatctcattaaaaatattaagaattttgccagataa

SEQ ID NO: 277577 - DNA, 1233 bp, Homo sapiens
ctttattcaactttagttcaaagaagtgaccactcacatcacagaactctctgaggcatgctgggctaattgactctattgagatatcctttgttatgataaaaatcttctattcccctatacagatggtaccagccaagaggaaagtcactcgtgcctgtggtcaagcttcaggcaatcccagtgaccttgtgctgccttaactcacccctgtctcctgggaagaggtgcagaaggggaaagtgcttgggccttcctctcagtgacaccactcccctctttgtgtcactgccttgcttttgggctcagcgtcattaaagcactgctgcaccttagtgcacacactcctttctaggtcactgagacatgaagtgagtatcatttgtaatattcatacttttctctgtgaactggcagggggatggagaagggcaagaaagtgggagcagtgtctgctgggagggtggagaattaatttgcattaatttctcaccctgttaactggtgtgtcacttctctactcacacagcctccagtgtggatttagcaattacttagctcagcagagataatgtaccccataaaatggcagagacactggccagggctgggcccaggaattcagtatggataatattctaattctgtatgacaagctttaccataaatttgaatctgtaatttctgctttgatcaatttgatgtataaggagtggagccagtcaaatttggaaataaaatttcgaggttagaattccaattatgccggtgattcactgcataaaacatacgagcctcagtttcctttttcatctgaaataaaaggagattgactccaggatcttccaaggctgctattccaagagcaggttcataaaggtgattgtcaagctccagtgcaaatgctaataatctggaattttccttcaaaccatctgcctatgcaaaatacaactgggtcacactggaaaggagagagagagctctgattcatatgagaaatcaagaatcgaaccttcatcttgaagatataaaccttttgccatgtaaatgtgaaggaggaaaaaaatggaagagaatctacgattttaaaaggcatattttagtgggttacaatatgttataattgatatttcttactggcctaaaaacaacactaaaataatcctgaagagcagagtagctgtaaaaaaaaatcgcaataaaaaaatcctcccataataagctaaaatg

SEQ ID NO: 277578 - DNA, 1835 bp, Homo sapiens
  misc_feature (1029)..(1029): n is a, c, g, or t
ctttattcaactttagttcaaagaagtgaccactcacatcacagaactctctgaggcatgctgggctaattgactctattgagatatcctttgttatgataaaaatcttctattcccctatacagatggtaccagccaagaggaaagtcactcgtgcctgtggtcaagcttcaggcaatcccagtgaccttgtgctgccttaactcacccctgtctcctgggaagaggtgcagaaggggaaagtgcttgggccttcctctcagtgacaccactcccctctttgtgtcactgccttgcttttgggctcagcgtcattaaagcactgctgcaccttagtgcacacactcctttctaggtcactgagacatgaagtgagtatcatttgtaatattcatacttttctctgtgaactggcagggggatggagaagggcaagaaagtgggagcagtgtctgctgggagggtggagaattaatttgcattaatttctcaccctgttaactggtgtgtcacttctctactcacacagcctccagtgtggatttagcaattacttagctcagcagagataatgtaccccataaaatggcagagacactggccagggctgggcccaggaattcagtatggataatattctaattctgtatgacaaggtaaggcacaaacaagttagccatgtttttctctcaaaactatatatatcttactaggtatatcacagtgtattatatagacatacctatgtatgtttatatatttccataaagttttcttatcttatttttggtcttttcctttccactggactctaagcctcatgagggtaaaggttttgcctatttgttcactgttgtaactccagcacctagaacaatgtttgcccgatagtggacactctataagtatttgttgaatacctaaatccatattaagatcaactcttatgtttgaattagtctagaaatttgggggatgttggattatatgttccatttttaaaacaagatgtttataatcaagtgacangattttaaaagaacatcattttagttgaggtgccagtaaaattcgtgaatgctttatgctaaaaaaatattgggttacgtggcctcttaccttctgactcatcgttctgctttctttttcttagctttaccataaatttgaatctgtaatttctgctttgatcaatttgatgtataaggagtggagccagtcaaatttggaaataaaatttcgaggttagaattccaattatgccggtgattcactgcataaaacatacgagcctcagtttcctgtaagtgttcattttgctccaagccttcttttgagggaggatacacacgttgcccaaggcaccaagaataaaaactttcttcctgggctctttccctgtcatcagttttcatctgaaataaaaggagattgactccaggatcttccaaggctgctattccaagagcaggttcataaaggtgattgtcaagctccagtgcaaatgctaataatctggaattttccttcaaaccatctgcctatgcaaaatacaactgggtcacactggaaaggagagagagagctctgattcatatgagaaatcaagaatcgaaccttcatcttgaagatataaaccttttgccatgtaaatgtgaaggaggaaaaaaatggaagagaatctacgattttaaaaggcatattttagtgggttacaatatgttataattgatatttcttactggcctaaaaacaacactaaaataatcctgaagagcagagtagctgtaaaaaaaaatcgcaataaaaaaatcctcccataataagctaaaatg

SEQ ID NO: 277579 - DNA, 555 bp, Homo sapiens
ttcctatccaaataccaatgacttgaatcacattttctaggactgccacaaacaaaagatttatttggagacgaataaaaaggggccgtaggattacctacaaaaagttatttcctcctgagattgatggcacaaccttgtcagcaaattgctgttgcctctctcagttaccaaaaataacccgtaacaaacaccaggcttgggtgtaagttctttcctaagggaacaactcagcagagctgtttataactagagaggaggaaacaataatctgcaagatgtcgccaggtcggcaacgcgaactgactttgactgggggttcagctctgctcctgcgccgaggcgaggaccgcaggtttagcgcggtcccgcacacacctgccccgggcgggagggcaccgaggcgcgcgggacgcacgagagtcccgcccttcccgggtcgcccccgacccgggcagtcggatagggtcccgcacccgggccccacctcaccttcacgggcggaggcggcctggggaggccctctaaggcccccctcacgcccagcgcggccgc

SEQ ID NO: 277580 - DNA, 849 bp, Homo sapiens
ttcctatccaaataccaatgacttgaatcacattttctaggactgccacaaacaaaagatttatttggagacgaataaaaaggggccgtaggattacctacaaaaagttatttcctcctgagattgatggcacaaccttgtcagcaaattgctgttgcctctctcagttaccaaaaataacccgtaacaaacaccaggcttgggtgtaagttctttcctaagggaacaactcagcagagctgtttataactagagaggaggaaacaataatctgcaagatgtcgccagcagcagaatgagaacggttattagttaatagccatcagagacagaccaagtggaacacagtcctcggaaaaacgccactctgtagcattagtaattaaaacctcacaagacttctcagtcctttatgtggagctgggggcaggaagaattgcttctggaagctgatggagttggacatgtggctttctagaatctgtgcccagcttgtcaagaagttgaatcggtgcaaccagcgtttgtgaaagcagcatttcccatttcacataaagtcagcttctggccaactggacaagtctgaacaaatatgaaacccactaaaaggccagtgacaggtgcacacactactgactctggctagaggctgtggcaggaattggactcatgtcatccagcgacagttccaccagcatctcttgtggcttcccaaggaccagcctgaggcaaactcctcagtggtgtgaagactttccatgtcactggaaacccaccacagagttctaccaagtaaccatgcctccaccagtccacaacaaacttttaaggcctctccagttatgcctg

SEQ ID NO: 277581 - DNA, 3539 bp, Homo sapiens
ggcccctcgagcctcgaaccggaacctccaaatccgagacgctctgcttatgaggacctcgaaatatgccggccagtgaaaaaatcttatggctttgagggcttttggttggccaggggcagtaaaaatctcggagagctgacaccaagtcctcccctgccacgtagcagtggtaaagtccgaagctcaaattccgagaattgagctctgttgattcttagaactggggttcttagaagtggtgatgcaagaagtttctaggaaaggccggacaccaggttttgagcaaaattttggactgtgaagcaaggcattggtgaagacaaaatggcctcgccggctgacagctgtatccagttcacccgccatgccagtgatgttcttctcaaccttaatcgtctccggagtcgagacatcttgactgatgttgtcattgttgtgagccgtgagcagtttagagcccataaaacggtcctcatggcctgcagtggcctgttctatagcatctttacagaccagttgaaatgcaaccttagtgtgatcaatctagatcctgagatcaaccctgagggattctgcatcctcctggacttcatgtacacatctcggctcaatttgcgggagggcaacatcatggctgtgatggccacggctatgtacctgcagatggagcatgttgtggacacttgccggaagtttattaaggccagtgaagcagagatggtttctgccatcaagcctcctcgtgaagagttcctcaacagccggatgctgatgccccaagacatcatggcctatcggggtcgtgaggtggtggagaacaacctgccactgaggagcgcccctgggtgtgagagcagagcctttgcccccagcctgtacagtggcctgtccacaccgccagcctcttattccatgtacagccacctccctgtcagcagcctcctcttctccgatgaggagtttcgggatgtccggatgcctgtggccaaccccttccccaaggagcgggcactcccatgtgatagtgccaggccagtccctggtgagtacagccggccgactttggaggtgtcccccaatgtgtgccacagcaatatctattcacccaaggaaacaatcccagaagaggcacgaagtgatatgcactacagtgtggctgagggcctcaaacctgctgccccctcagcccgaaatgccccctacttcccttgtgacaaggccagcaaagaagaagagagaccctcctcggaagatgagattgccctgcatttcgagccccccaatgcacccctgaaccggaagggtctggttagtccacagagcccccagaaatctgactgccagcccaactcgcccacagagtcctgcagcagtaagaatgcctgcatcctccaggcttctggctcccctccagccaagagccccactgaccccaaagcctgcaactggaagaaatacaagttcatcgtgctcaacagcctcaaccagaatgccaaaccagaggggcctgagcaggctgagctgggccgcctttccccacgagcctacacggccccacctgcctgccagccacccatggagcctgagaaccttgacctccagtccccaaccaagctgagtgccagcggggaggactccaccatcccacaagccagccggctcaataacatcgttaacaggtccatgacgggctctccccgcagcagcagcgagagccactcaccactctacatgcaccccccgaagtgcacgtcctgcggctctcagtccccacagcatgcagagatgtgcctccacaccgctggccccacgttccctgaggagatgggagagacccagtctgagtactcagattctagctgtgagaacggggccttcttctgcaatgagtgtgactgccgcttctctgaggaggcctcactcaagaggcacacgctgcagacccacagtgacaaaccctacaagtgtgaccgctgccaggcctccttccgctacaagggcaacctcgccagccacaagaccgtccataccggtgagaaaccctatcgttgcaacatctgtggggcccagttcaaccggccagccaacctgaaaacccacactcgaattcactctggagagaagccctacaaatgcgaaacctgcggagccagatttgtacaggtggcccacctccgtgcccatgtgcttatccacactggtgagaagccctatccctgtgaaatctgtggcacccgtttccggcaccttcagactctgaagagccacctgcgaatccacacaggagagaaaccttaccattgtgagaagtgtaacctgcatttccgtcacaaaagccagctgcgacttcacttgcgccagaagcatggcgccatcaccaacaccaaggtgcaataccgcgtgtcagccactgacctgcctccggagctccccaaagcctgctgaagcatggagtgttgatgctttcgtctccagccccttctcagaatctacccaaaggatactgtaacactttacaatgttcatcccatgatgtagtgcctctttcatccactagtgcaaatcatagctgggggttgggggtggtgggggtcggggcctgggggactgggagccgcagcagctccccctcccccactgccataaaacattaagaaaatcatattgcttcttctcctatgtgtaaggtgaaccatgtcagcaaaaagcaaaatcattttatatgtcaaagcaggggagtatgcaaaagttctgacttgactttagtctgcaaaatgaggaatgtatatgttttgtgggaacagatgtttcttttgtatgtaaatgtgcattcttttaaaagacaagacttcagtatgttgtcaaagagagggctttaatttttttaaccaaaggtgaaggaatatatggcagagttgtaaatatataaatatatatatatatataaaataaatatatataaacctaaaaaagatatattaaaaatataaaactgcgttaaaggctcgattttgtatctgcaggcagacacggatctgagaatctttattgagaaagagcacttaagagaatattttaagtattgcatctgtataagtaagaaaatattttgtctaaaatgcctcagtgtatttgtatttttttgcaagtgaaggtttacaatttacaaagtgtgtattaaaaaaaacaaaaagaacaaaaaaatctgcagaaggaaaaatgtgtaattttgttctagttttcagtttgtatatacccgtacaacgtgtcctcacggtgccttttttcacggaagttttcaatgatgggcgagcgtgcaccatccctttttgaagtgtaggcagacacagggacttgaagttgttactaactaaactctctttgggaatgtttgtctcatcccattctgcgtcatgcttgtgttataactactccggagacagggtttggctgtgtctaaactgcattaccgcgttgtaaaatatagctgtacaaatataagaataaaatgttgaaaagtcaaactggaaaaaaat

SEQ ID NO: 277582 - DNA, 3371 bp, Homo sapiens
ggcccctcgagcctcgaaccggaacctccaaatccgagacgctctgcttatgaggacctcgaaatatgccggccagtgaaaaaatcttatggctttgagggcttttggttggccaggggcagtaaaaatctcggagagctgacaccaagtcctcccctgccacgtagcagtggtaaagtccgaagctcaaattccgagaattgagctctgttgattcttagaactggggttcttagaagtggtgatgcaagaagtttctaggaaaggccggacaccaggttttgagcaaaattttggactgtgaagcaaggcattggtgaagacaaaatggcctcgccggctgacagctgtatccagttcacccgccatgccagtgatgttcttctcaaccttaatcgtctccggagtcgagacatcttgactgatgttgtcattgttgtgagccgtgagcagtttagagcccataaaacggtcctcatggcctgcagtggcctgttctatagcatctttacagaccagttgaaatgcaaccttagtgtgatcaatctagatcctgagatcaaccctgagggattctgcatcctcctggacttcatgtacacatctcggctcaatttgcgggagggcaacatcatggctgtgatggccacggctatgtacctgcagatggagcatgttgtggacacttgccggaagtttattaaggccagtgaagcagagatggtttctgccatcaagcctcctcgtgaagagttcctcaacagccggatgctgatgccccaagacatcatggcctatcggggtcgtgaggtggtggagaacaacctgccactgaggagcgcccctgggtgtgagagcagagcctttgcccccagcctgtacagtggcctgtccacaccgccagcctcttattccatgtacagccacctccctgtcagcagcctcctcttctccgatgaggagtttcgggatgtccggatgcctgtggccaaccccttccccaaggagcgggcactcccatgtgatagtgccaggccagtccctggtgagtacagccggccgactttggaggtgtcccccaatgtgtgccacagcaatatctattcacccaaggaaacaatcccagaagaggcacgaagtgatatgcactacagtgtggctgagggcctcaaacctgctgccccctcagcccgaaatgccccctacttcccttgtgacaaggccagcaaagaagaagagagaccctcctcggaagatgagattgccctgcatttcgagccccccaatgcacccctgaaccggaagggtctggttagtccacagagcccccagaaatctgactgccagcccaactcgcccacagagtcctgcagcagtaagaatgcctgcatcctccaggcttctggctcccctccagccaagagccccactgaccccaaagcctgcaactggaagaaatacaagttcatcgtgctcaacagcctcaaccagaatgccaaaccagaggggcctgagcaggctgagctgggccgcctttccccacgagcctacacggccccacctgcctgccagccacccatggagcctgagaaccttgacctccagtccccaaccaagctgagtgccagcggggaggactccaccatcccacaagccagccggctcaataacatcgttaacaggtccatgacgggctctccccgcagcagcagcgagagccactcaccactctacatgcaccccccgaagtgcacgtcctgcggctctcagtccccacagcatgcagagatgtgcctccacaccgctggccccacgttccctgaggagatgggagagacccagtctgagtactcagattctagctgtggtgagaaaccctatcgttgcaacatctgtggggcccagttcaaccggccagccaacctgaaaacccacactcgaattcactctggagagaagccctacaaatgcgaaacctgcggagccagatttgtacaggtggcccacctccgtgcccatgtgcttatccacactggtgagaagccctatccctgtgaaatctgtggcacccgtttccggcaccttcagactctgaagagccacctgcgaatccacacaggagagaaaccttaccattgtgagaagtgtaacctgcatttccgtcacaaaagccagctgcgacttcacttgcgccagaagcatggcgccatcaccaacaccaaggtgcaataccgcgtgtcagccactgacctgcctccggagctccccaaagcctgctgaagcatggagtgttgatgctttcgtctccagccccttctcagaatctacccaaaggatactgtaacactttacaatgttcatcccatgatgtagtgcctctttcatccactagtgcaaatcatagctgggggttgggggtggtgggggtcggggcctgggggactgggagccgcagcagctccccctcccccactgccataaaacattaagaaaatcatattgcttcttctcctatgtgtaaggtgaaccatgtcagcaaaaagcaaaatcattttatatgtcaaagcaggggagtatgcaaaagttctgacttgactttagtctgcaaaatgaggaatgtatatgttttgtgggaacagatgtttcttttgtatgtaaatgtgcattcttttaaaagacaagacttcagtatgttgtcaaagagagggctttaatttttttaaccaaaggtgaaggaatatatggcagagttgtaaatatataaatatatatatatatataaaataaatatatataaacctaaaaaagatatattaaaaatataaaactgcgttaaaggctcgattttgtatctgcaggcagacacggatctgagaatctttattgagaaagagcacttaagagaatattttaagtattgcatctgtataagtaagaaaatattttgtctaaaatgcctcagtgtatttgtatttttttgcaagtgaaggtttacaatttacaaagtgtgtattaaaaaaaacaaaaagaacaaaaaaatctgcagaaggaaaaatgtgtaattttgttctagttttcagtttgtatatacccgtacaacgtgtcctcacggtgccttttttcacggaagttttcaatgatgggcgagcgtgcaccatccctttttgaagtgtaggcagacacagggacttgaagttgttactaactaaactctctttgggaatgtttgtctcatcccattctgcgtcatgcttgtgttataactactccggagacagggtttggctgtgtctaaactgcattaccgcgttgtaaaatatagctgtacaaatataagaataaaatgttgaaaagtcaaactggaaaaaaat

SEQ ID NO: 277583 - DNA, 3508 bp, Homo sapiens
ggcccctcgagcctcgaaccggaacctccaaatccgagacgctctgcttatgaggacctcgaaatatgccggccagtgaaaaaatcttatggctttgagggcttttggttggccaggggcagtaaaaatctcggagagctgacaccaagtcctcccctgccacgtagcagtggtaaagtccgaagctcaaattccgagaattgagctctgttgattcttagaactggggttcttagaagtggtgatgcaagaagtttctaggaaaggccggacaccaggttttgagcaaaattttggactgtgaagcaaggcattggtgaagacaaaatggcctcgccggctgacagctgtatccagttcacccgccatgccagtgatgttcttctcaaccttaatcgtctccggagtcgagacatcttgactgatgttgtcattgttgtgagccgtgagcagtttagagcccataaaacggtcctcatggcctgcagtggcctgttctatagcatctttacagaccagttgaaatgcaaccttagtgtgatcaatctagatcctgagatcaaccctgagggattctgcatcctcctggacttcatgtacacatctcggctcaatttgcgggagggcaacatcatggctgtgatggccacggctatgtacctgcagatggagcatgttgtggacacttgccggaagtttattaaggccagtgaagcagagatggtttctgccatcaagcctcctcgtgaagagttcctcaacagccggatgctgatgccccaagacatcatggcctatcggggtcgtgaggtggtggagaacaacctgccactgaggagcgcccctgggtgtgagagcagagcctttgcccccagcctgtacagtggcctgtccacaccgccagcctcttattccatgtacagccacctccctgtcagcagcctcctcttctccgatgaggagtttcgggatgtccggatgcctgtggccaaccccttccccaaggagcgggcactcccatgtgatagtgccaggccagtccctggtgagtacagccggccgactttggaggtgtcccccaatgtgtgccacagcaatatctattcacccaaggaaacaatcccagaagaggcacgaagtgatatgcactacagtgtggctgagggcctcaaacctgctgccccctcagcccgaaatgccccctacttcccttgtgacaaggccagcaaagaagaagagagaccctcctcggaagatgagattgccctgcatttcgagccccccaatgcacccctgaaccggaagggtctggttagtccacagagcccccagaaatctgactgccagcccaactcgcccacagagtcctgcagcagtaagaatgcctgcatcctccaggcttctggctcccctccagccaagagccccactgaccccaaagcctgcaactggaagaaatacaagttcatcgtgctcaacagcctcaaccagaatgccaaaccagaggggcctgagcaggctgagctgggccgcctttccccacgagcctacacggccccacctgcctgccagccacccatggagcctgagaaccttgacctccagtccccaaccaagctgagtgccagcggggaggactccaccatcccacaagccagccggctcaataacatcgttaacaggtccatgacgggctctccccgcagcagcagcgagagccactcaccactctacatgcaccccccgaagtgcacgtcctgcggctctcagtccccacagcatgcagagatgtgcctccacaccgctggccccacgttccctgaggagatgggagagacccagtctgagtactcagattctagctgtgagaacggggccttcttctgcaatgagtgtgactgccgcttctctgaggaggcctcactcaagaggcacacgctgcagacccacagtgacaaaccctacaagtgtgaccgctgccaggcctccttccgctacaagggcaacctcgccagccacaagaccgtccataccggtgagaaaccctatcgttgcaacatctgtggggcccagttcaaccggccagccaacctgaaaacccacactcgaattcactctggagagaagccctacaaatgcgaaacctgcggagccagatttgtacaggtggcccacctccgtgcccatgtgcttatccacactggtgagaagccctatccctgtgaaatctgtggcacccgtttccggcaccttcagactctgaagagccacctgcgaatccacacaggagagaaaccttaccattgtgagaagtgtaacctgcatttccgtcacaaaagccagctgcgacttcacttgcgccagaagcatggcgccatcaccaacaccaaggtgcaataccgcgtgtcagccactgacctgcctccggagctccccaaagcctgctgaagcatggagtgttgatgctttcgtctccagccccttctcagaatctacccaaaggatactgtaacactttacaatgttcatcccatgatgtagtgcctctttcatccactagtgcaaatcatagctgggggttgggggtggtgggggtcggggcctgggggactgggagccgcagcagctccccctcccccactgccataaaacattaagaaaatcatattgcttcttctcctatgtgtaaggtgaaccatgtcagcaaaaagcaaaatcattttatatgtcaaagcaggggagtatgcaaaagttctgacttgactttagtctgcaaaatgaggaatgtatatgttttgtgggaacagatgtttcttttgtatgtaaatgtgcattcttttaaaagacaagacttcagtatgttgtcaaagagagggctttaatttttttaaccaaaggtgaaggaatatatggcagagttgtaaatatataaatatatatatatatataaaataaatatatataaacctaaaaaagatatattaaaaatataaaactgcgttaaaggctcgattttgtatctgcaggcagacacggatctgagaatctttattgagaaagagcacttaagagaatattttaagtattgcatctgtataagtaagaaaatattttgtctaaaatgcctcagtgtatttgtatttttttgcaagtgaaggtttacaatttacaaagtgtgtattaaaaaaaacaaaaagaacaaaaaaatctgcagaaggaaaaatgtgtaattttgttctagttttcagtttgtatatacccgtacaacgtgtcctcacggtgccttttttcacggaagttttcaatgatgggcgagcgtgcaccatccctttttgaagtgtaggcagacacagggacttgaagttgttactaactaaactctctttgggaatgtttgtctcatcccattctgcgtcatgcttgtgttataactactccggaggttgttgtgagccgagatcacgccatttcactccagtcagggcaacaagagcgaaactccatctca

SEQ ID NO: 277584 - DNA, 2263 bp, Homo sapiens
  misc_feature (37)..(37): n is a, c, g, or t
tgactcttgaggatcccctgtgcagtcagatttctgntagtccacagagcccccagaaatctgactgccagcccaactcgcccacagagtcctgcagcagtaagaatgcctgcatcctccaggcttctggctcccctccagccaagagccccactgaccccaaagcctgcaactggaagaaatacaagttcatcgtgctcaacagcctcaaccagaatgccaaaccagaggggcctgagcaggctgagctgggccgcctttccccacgagcctacacggccccacctgcctgccagccacccatggagcctgagaaccttgacctccagtccccaaccaagctgagtgccagcggggaggactccaccatcccacaagccagccggctcaataacatcgttaacaggtccatgacgggctctccccgcagcagcagcgagagccactcaccactctacatgcaccccccgaagtgcacgtcctgcggctctcagtccccacagcatgcagagatgtgcctccacaccgctggccccacgttccctgaggagatgggagagacccagtctgagtactcagattctagctgtgagaacggggccttcttctgcaatgagtgtgactgccgcttctctgaggaggcctcactcaagaggcacacgctgcagacccacagtgacaaaccctacaagtgtgaccgctgccaggcctccttccgctacaagggcaacctcgccagccacaagaccgtccataccggtgagaaaccctatcgttgcaacatctgtggggcccagttcaaccggccagccaacctgaaaacccacactcgaattcactctggagagaagccctacaaatgcgaaacctgcggagccagatttgtacaggtggcccacctccgtgcccatgtgcttatccacactggtgagaagccctatccctgtgaaatctgtggcacccgtttccggcaccttcagactctgaagagccacctgcgaatccacacaggagagaaaccttaccattgtgagaagtgtaacctgcatttccgtcacaaaagccagctgcgacttcacttgcgccagaagcatggcgccatcaccaacaccaaggtgcaataccgcgtgtcagccactgacctgcctccggagctccccaaagcctgctgaagcatggagtgttgatgctttcgtctccagccccttctcagaatctacccaaaggatactgtaacactttacaatgttcatcccatgatgtagtgcctctttcatccactagtgcaaatcatagctgggggttgggggtggtgggggtcggggcctgggggactgggagccgcagcagctccccctcccccactgccataaaacattaagaaaatcatattgcttcttctcctatgtgtaaggtgaaccatgtcagcaaaaagcaaaatcattttatatgtcaaagcaggggagtatgcaaaagttctgacttgactttagtctgcaaaatgaggaatgtatatgttttgtgggaacagatgtttcttttgtatgtaaatgtgcattcttttaaaagacaagacttcagtatgttgtcaaagagagggctttaatttttttaaccaaaggtgaaggaatatatggcagagttgtaaatatataaatatatatatatatataaaataaatatatataaacctaaaaaagatatattaaaaatataaaactgcgttaaaggctcgattttgtatctgcaggcagacacggatctgagaatctttattgagaaagagcacttaagagaatattttaagtattgcatctgtataagtaagaaaatattttgtctaaaatgcctcagtgtatttgtatttttttgcaagtgaaggtttacaatttacaaagtgtgtattaaaaaaaacaaaaagaacaaaaaaatctgcagaaggaaaaatgtgtaattttgttctagttttcagtttgtatatacccgtacaacgtgtcctcacggtgccttttttcacggaagttttcaatgatgggcgagcgtgcaccatccctttttgaagtgtaggcagacacagggacttgaagttgttactaactaaactctctttgggaatgtttgtctcatcccattctgcgtcatgcttgtgttataactactccggagacagggtttggctgtgtctaaactgcattaccgcgttgtaaaatatagctgtacaaatataagaataaaatgttgaaaagtcaaactggaaaaaaat

SEQ ID NO: 277585 - DNA, 3923 bp, Homo sapiens
  misc_feature (3783)..(3786): n is a, c, g, or t
ggcccctcgagcctcgaaccggaacctccaaatccgagacgctctgcttatgaggacctcgaaatatgccggccagtgaaaaaatcttatggctttgagggcttttggttggccaggggcagtaaaaatctcggagagctgacaccaagtcctcccctgccacgtagcagtggtaaagtccgaagctcaaattccgagaattgagctctgttgattcttagaactggggttcttagaagtggtgatgcaagaagtttctaggaaaggccggacaccagctcttttaaaggatctgtcttctcaaggagcctagttggctatgcacaaggaaagcgccaaaagagctaaagggaggaagggaagagaaaacatttaactctcccatggtggttactgacccagcgtgggtgcggggagattgggatgggaagtccaggtctgggggcagccagcagttgtcagtttctcattgacagccctgctccttggagattgtttttgtgggtagtcttgtgtgtggcattggtggaatggctgaatctaggagacgcggcgtgtccagaacttgctggaaattggttttgagattttgggcaaggcctctcacccggagcctcagttccctccctaataaagcagggctgttataaggataagatgcaatcgtgagggggtgggaaaggactaagagctctgtaaaaatacaaaccaaatgctggtggtgcttccacacctgcggcatttggggtgggggtggtgacaacattgcccacactcaacccacacactcaggagttggggggggctggttcttaagacgagttggcttgcaaaggagtgaacttgagaaggacctgcgcctcgtgtatgtacatttgtttttggccaggcagaggcttacggtgaaaagcccaaggcccagctgacagtggacacaggggaatttgtttgtttgtttcaatccgcatctggagtgagtcattgccacttgtcatggtgaaatggcaaatctgggcttcctgtggttccagaagcctgcgactggaaatccacaagcgagctggtggttgaagctggttaaagaacagcctaggtattccagaagtgtttgaggatcccttccatgaaggaagagaggaaagtttttaagtaaacctcccactcccatgtgtcttcagctttcttttgcaaaggagaaaatccttgaagtttggtaaagaccgagttagtctatctctctttgcctatctcgagttgggctggggagaggaggagataggttcttttgtctttttctgtcttctcccttccccacttccttccctccagtccccactcactcacatgcacacactaaccttggagccgatgggattgagtgactggcacttgggaccacagagaaatgtcagagtgtttggttacagactcaaggaaacctctcattttagagtgctcatttggttttgagcaaaattttggactgtgaagcaaggcattggtgaagacaaaatggcctcgccggctgacagctgtatccagttcacccgccatgccagtgatgttcttctcaaccttaatcgtctccggagtcgagacatcttgactgatgttgtcattgttgtgagccgtgagcagtttagagcccataaaacggtcctcatggcctgcagtggcctgttctatagcatctttacagaccagttgaaatgcaaccttagtgtgatcaatctagatcctgagatcaaccctgagggattctgcatcctcctggacttcatgtacacatctcggctcaatttgcgggagggcaacatcatggctgtgatggccacggctatgtacctgcagatggagcatgttgtggacacttgccggaagtttattaaggccagtgaagcagagatggtttctgccatcaagcctcctcgtgaagagttcctcaacagccggatgctgatgccccaagacatcatggcctatcggggtcgtgaggtggtggagaacaacctgccactgaggagcgcccctgggtgtgagagcagagcctttgcccccagcctgtacagtggcctgtccacaccgccagcctcttattccatgtacagccacctccctgtcagcagcctcctcttctccgatgaggagtttcgggatgtccggatgcctgtggccaaccccttccccaaggagcgggcactcccatgtgatagtgccaggccagtccctggtgagtacagccggccgactttggaggtgtcccccaatgtgtgccacagcaatatctattcacccaaggaaacaatcccagaagaggcacgaagtgatatgcactacagtgtggctgagggcctcaaacctgctgccccctcagcccgaaatgccccctacttcccttgtgacaaggccagcaaagaagaagagagaccctcctcggaagatgagattgccctgcatttcgagccccccaatgcacccctgaaccggaagggtctggttagtccacagagcccccagaaatctgactgccagcccaactcgcccacagagtcctgcagcagtaagaatgcctgcatcctccaggcttctggctcccctccagccaagagccccactgaccccaaagcctgcaactggaagaaatacaagttcatcgtgctcaacagcctcaaccagaatgccaaaccagaggggcctgagcaggctgagctgggccgcctttccccacgagcctacacggccccacctgcctgccagccacccatggagcctgagaaccttgacctccagtccccaaccaagctgagtgccagcggggaggactccaccatcccacaagccagccggctcaataacatcgttaacaggtccatgacgggctctccccgcagcagcagcgagagccactcaccactctacatgcaccccccgaagtgcacgtcctgcggctctcagtccccacagcatgcagagatgtgcctccacaccgctggccccacgttccctgaggagatgggagagacccagtctgagtactcagattctagctgtgagaacggggccttcttctgcaatgagtgtgactgccgcttctctgaggaggcctcactcaagaggcacacgctgcagacccacagtgacaaaccctacaagtgtgaccgctgccaggcctccttccgctacaagggcaacctcgccagccacaagaccgtccataccggtgagaaaccctatcgttgcaacatctgtggggcccagttcaaccggccagccaacctgaaaacccacactcgaattcactctggagagaagccctacaaatgcgaaacctgcggagccagatttgtacaggtggcccacctccgtgcccatgtgcttatccacactggtgagaagccctatccctgtgaaatctgtggcacccgtttccggcaccttcagactctgaagagccacctgcgaatccacacaggagagaaaccttaccattgtgagaagtgtaacctgcatttccgtcacaaaagccagctgcgacttcacttgcgccagaagcatggcgccatcaccaacaccaaggtgcaataccgcgtgtcagccactgacctgcctccggagctccccaaagcctgctgaagcatggagtgttgatgctttcgtctccagccccttctcagaatctacccaaaggatactgtaacactttacaatgttcatcccatgatgtagtgcctctttcatccactagtgcaaatcatagctgggggttgggggtgggtggaggcnnnnccctccaacctctattatcaccgcgagcctcgtggaattcaatcctaagaggaagggagggtgagggttcttataataaaaaattaatcgaggtttgatccccatttactttcttgagtgggggctcgtaccctatt

SEQ ID NO: 277586 - DNA, 1606 bp, Homo sapiens
ctggaagcttcacctgtgaataccaacggggattctcacttgatcagaccggctccagctgtgaagacgtggacgagtgtgagggttaccaccgctgcccgcatggctgccagtacatcattgggggctacaggtgcagctgcccccaggcgcatggcagcaacactcgggaaagcagggaacggacatttgcacaacgctagcttatctgtcggcagaagcccggatgcatatgggttcttcacctggccttgtagaggcaagagctgccccagtccctcgtagggagaatcttcctctctgggtctttgagcaatgacatctttcttgggttgatgacagctaacagtttgcctctgatatccctgcagtgtgagaagtgtaacctgcatttccgtcacaaaagccagctgcgacttcacttgcgccagaagcatggcgccatcaccaacaccaaggtgcaataccgcgtgtcagccactgacctgcctccggagctccccaaagcctgctgaagcatggagtgttgatgctttcgtctccagccccttctcagaatctacccaaaggatactgtaacactttacaatgttcatcccatgatgtagtgcctctttcatccactagtgcaaatcatagctgggggttgggggtggtgggggtcggggcctgggggactgggagccgcagcagctccccctcccccactgccataaaacattaagaaaatcatattgcttcttctcctatgtgtaaggtgaaccatgtcagcaaaaagcaaaatcattttatatgtcaaagcaggggagtatgcaaaagttctgacttgactttagtctgcaaaatgaggaatgtatatgttttgtgggaacagatgtttcttttgtatgtaaatgtgcattcttttaaaagacaagacttcagtatgttgtcaaagagagggctttaatttttttaaccaaaggtgaaggaatatatggcagagttgtaaatatataaatatatatatatatataaaataaatatatataaacctaaaaaagatatattaaaaatataaaactgcgttaaaggctcgattttgtatctgcaggcagacacggatctgagaatctttattgagaaagagcacttaagagaatattttaagtattgcatctgtataagtaagaaaatattttgtctaaaatgcctcagtgtatttgtatttttttgcaagtgaaggtttacaatttacaaagtgtgtattaaaaaaaacaaaaagaacaaaaaaatctgcagaaggaaaaatgtgtaattttgttctagttttcagtttgtatatacccgtacaacgtgtcctcacggtgccttttttcacggaagttttcaatgatgggcgagcgtgcaccatccctttttgaagtgtaggcagacacagggacttgaagttgttactaactaaactctctttgggaatgtttgtctcatcccattctgcgtcatgcttgtgttataactactccggagacagggtttggctgtgtctaaactgcattaccgcgttgtaaaatatagctgtacaaatataagaataaaatgttgaaaagtcaaactggaaaaaaat

SEQ ID NO: 277587 - DNA, 2558 bp, Homo sapiens
ggcccctcgagcctcgaaccggaacctccaaatccgagacgctctgcttatgaggacctcgaaatatgccggccagtgaaaaaatcttatggctttgagggcttttggttggccaggggcagtaaaaatctcggagagctgacaccaagtcctcccctgccacgtagcagtggtaaagtccgaagctcaaattccgagaattgagctctgttgattcttagaactggggttcttagaagtggtgatgcaagaagtttctaggaaaggccggacaccaggttttgagcaaaattttggactgtgaagcaaggcattggtgaagacaaaatggcctcgccggctgacagctgtatccagttcacccgccatgccagtgatgttcttctcaaccttaatcgtctccggagtcgagacatcttgactgatgttgtcattgttgtgagccgtgagcagtttagagcccataaaacggtcctcatggcctgcagtggcctgttctatagcatctttacagaccagttgaaatgcaaccttagtgtgatcaatctagatcctgagatcaaccctgagggattctgcatcctcctggacttcatgtacacatctcggctcaatttgcgggagggcaacatcatggctgtgatggccacggctatgtacctgcagatggagcatgttgtggacacttgccggaagtttattaaggccagtgaagcagagatggtttctgccatcaagcctcctcgtgaagagttcctcaacagccggatgctgatgccccaagacatcatggcctatcggggtcgtgaggtggtggagaacaacctgccactgaggagcgcccctgggtgtgagagcagagcctttgcccccagcctgtacagtggcctgtccacaccgccagcctcttattccatgtacagccacctccctgtcagcagcctcctcttctccgatgaggagtttcgggatgtccggatgcctgtggccaaccccttccccaaggagcgggcactcccatgtgatagtgccaggccagtccctggtgagtacagccggccgactttggaggtgtcccccaatgtgtgccacagcaatatctattcacccaaggaaacaatcccagaagaggcacgaagtgatatgcactacagtgtggctgagggcctcaaacctgctgccccctcagcccgaaatgccccctacttcccttgtgacaaggccagcaaagaagaagagagaccctcctcggaagatgagattgccctgcatttcgagccccccaatgcacccctgaaccggaagggtctggttagtccacagagcccccagaaatctgactgccagcccaactcgcccacagagtcctgcagcagtaagaatgcctgcatcctccaggcttctggctcccctccagccaagagccccactgaccccaaagcctgcaactggaagaaatacaagttcatcgtgctcaacagcctcaaccagaatgccaaaccagaggggcctgagcaggctgagctgggccgcctttccccacgagcctacacggccccacctgcctgccagccacccatggagcctgagaaccttgacctccagtccccaaccaagctgagtgccagcggggaggactccaccatcccacaagccagccggctcaataacatcgttaacaggtccatgacgggctctccccgcagcagcagcgagagccactcaccactctacatgcaccccccgaagtgcacgtcctgcggctctcagtccccacagcatgcagagatgtgcctccacaccgctggccccacgttccctgaggagatgggagagacccagtctgagtactcagattctagctgtgagaacggggccttcttctgcaatgagtgtgactgccgcttctctgaggaggcctcactcaagaggcacacgctgcagacccacagtgacaaaccctacaagtgtgaccgctgccaggcctccttccgctacaagggcaacctcgccagccacaagaccgtccataccggtgagaaaccctatcgttgcaacatctgtggggcccagttcaaccggccagccaacctgaaaacccacactcgaattcactctggagagaagccctacaaatgcgaaacctgcggagccagatttgtacaggtggcccacctccgtgcccatgtgcttatccacactggtgagaagccctatccctgtgaaatctgtggcacccgtttccggcaccttcagactctgaagagccacctgcgaatccacacaggagagaaaccttaccattgtgagaagtgtaacctgcatttccgtcacaaaagccagctgcgacttcacttgcgccagaagcatggcgccatcaccaacaccaaggtgcaataccgcgtgtcagccactgacctgcctccggagctccccaaagcctgctgaagcatggagtgttgatgctttcgtctccagccccttctcagaacttttgcatactcccctgctttgacatataaaatgattttgctttttgctgacatggttcaacacgg

SEQ ID NO: 277588 - DNA, 2358 bp, Homo sapiens
ggcccctcgagcctcgaaccggaacctccaaatccgagacgctctgcttatgaggacctcgaaatatgccggccagtgaaaaaatcttatggctttgagggcttttggttggccaggggcagtaaaaatctcggagagctgacaccaagtcctcccctgccacgtagcagtggtaaagtccgaagctcaaattccgagaattgagctctgttgattcttagaactggggttcttagaagtggtgatgcaagaagtttctaggaaaggccggacaccaggttttgagcaaaattttggactgtgaagcaaggcattggtgaagacaaaatggcctcgccggctgacagctgtatccagttcacccgccatgccagtgatgttcttctcaaccttaatcgtctccggagtcgagacatcttgactgatgttgtcattgttgtgagccgtgagcagtttagagcccataaaacggtcctcatggcctgcagtggcctgttctatagcatctttacagaccagttgaaatgcaaccttagtgtgatcaatctagatcctgagatcaaccctgagggattctgcatcctcctggacttcatgtacacatctcggctcaatttgcgggagggcaacatcatggctgtgatggccacggctatgtacctgcagatggagcatgttgtggacacttgccggaagtttattaaggccagtgaagcagagatggtttctgccatcaagcctcctcgtgaagagttcctcaacagccggatgctgatgccccaagacatcatggcctatcggggtcgtgaggtggtggagaacaacctgccactgaggagcgcccctgggtgtgagagcagagcctttgcccccagcctgtacagtggcctgtccacaccgccagcctcttattccatgtacagccacctccctgtcagcagcctcctcttctccgatgaggagtttcgggatgtccggatgcctgtggccaaccccttccccaaggagcgggcactcccatgtgatagtgccaggccagtccctggtgagtacagccggccgactttggaggtgtcccccaatgtgtgccacagcaatatctattcacccaaggaaacaatcccagaagaggcacgaagtgatatgcactacagtgtggctgagggcctcaaacctgctgccccctcagcccgaaatgccccctacttcccttgtgacaaggccagcaaagaagaagagagaccctcctcggaagatgagattgccctgcatttcgagccccccaatgcacccctgaaccggaagggtctggttagtccacagagcccccagaaatctgactgccagcccaactcgcccacagagtcctgcagcagtaagaatgcctgcatcctccaggcttctggctcccctccagccaagagccccactgaccccaaagcctgcaactggaagaaatacaagttcatcgtgctcaacagcctcaaccagaatgccaaaccagaggggcctgagcaggctgagctgggccgcctttccccacgagcctacacggccccacctgcctgccagccacccatggagcctgagaaccttgacctccagtccccaaccaagctgagtgccagcggggaggactccaccatcccacaagccagccggctcaataacatcgttaacaggtccatgacgggctctccccgcagcagcagcgagagccactcaccactctacatgcaccccccgaagtgcacgtcctgcggctctcagtccccacagcatgcagagatgtgcctccacaccgctggccccacgttccctgaggagatgggagagacccagtctgagtactcagattctagctgtgagaacggggccttcttctgcaatgagtgtgactgccgcttctctgaggaggcctcactcaagaggcacacgctgcagacccacagtgacaaaccctacaagtgtgaccgctgccaggcctccttccgctacaagggcaacctcgccagccacaagaccgtccataccggtatggccctgccccacacgacccgaactctccacaattattggggcaggacagggagaggatcctagagaaagctgtgtggggcctggagacctggtggggcaaggcaggaggcaggccccatcctggcctgaacgaggggtctaaccctgtcttgtctttgcttagtgactcgactcatctactccctgtatcctttgtctttcctctgagatgctctatcctgcttttctgcctttgctggggtcagaagtgttaatcccactgtacaggtgaagagactaagtctgggaaagacaaatagattcaatttttgtaaagcc

SEQ ID NO: 277589 - DNA, 1570 bp, Homo sapiens
ggcccctcgagcctcgaaccggaacctccaaatccgagacgctctgcttatgaggacctcgaaatatgccggccagtgaaaaaatcttatggctttgagggcttttggttggccaggggcagtaaaaatctcggagagctgacaccaagtcctcccctgccacgtagcagtggtaaagtccgaagctcaaattccgagaattgagctctgttgattcttagaactggggttcttagaagtggtgatgcaagaagtttctaggaaaggccggacaccagctcttttaaaggatctgtcttctcaaggagcctagttggctatgcacaaggaaagcgccaaaagagctaaagggaggaagggaagagaaaacatttaactctcccatggtggttactgacccagcgtgggtgcggggagattgggatgggaagtccaggtctgggggcagccagcagttgtcagtttctcattgacagccctgctccttggagattgtttttgtgggtagtcttgtgtgtggcattggtggaatggctgaatctaggagacgcggcgtgtccagaacttgctggaaattggttttgagattttgggcaaggcctctcacccggagcctcagttccctccctaataaagcagggctgttataaggataagatgcaatcgtgagggggtgggaaaggactaagagctctgtaaaaatacaaaccaaatgctggtggtgcttccacacctgcggcatttggggtgggggtggtgacaacattgcccacactcaacccacacactcaggagttggggggggctggttcttaagacgagttggcttgcaaaggagtgaacttgagaaggacctgcgcctcgtgtatgtacatttgtttttggccaggcagaggcttacggtgaaaagcccaaggcccagctgacagtggacacaggggaatttgtttgtttgtttcaatccgcatctggagtgagtcattgccacttgtcatggtgaaatggcaaatctgggcttcctgtggttccagaagcctgcgactggaaatccacaagcgagctggtggttgaagctggttaaagaacagcctaggtattccagaagtgtttgaggatcccttccatgaaggaagagaggaaagtttttaagtaaacctcccactcccatgtgtcttcagctttcttttgcaaaggagaaaatccttgaagtttggtaaagaccgagttagtctatctctctttgcctatctcgagttgggctggggagaggaggagataggttcttttgtctttttctgtcttctcccttccccacttccttccctccagtccccactcactcacatgcacacactaaccttggagccgatgggattgagtgactggcacttgggaccacagagaaatgtcagagtgtttggttacagactcaaggaaacctctcattttagagtgctcatttggtaagactcagcagcctggaatggggcaaagtgtttgtgtgggggaaggaacttaaaaatgagattcacccacatcagggtgctgtcttgcatgttctacagcacgt

SEQ ID NO: 277590 - DNA, 390 bp, Homo sapiens
caaaactaaatgtgtatgtcctaaaataagactatagtggacaatcttacattcgttaaatcaatttctgtttgctttcttctcttctctgtaggttttgagcaaaattttggactgtgaagcaaggcattgggtaagtaaataaaattatatgctttaaaatgttgggacaaactgtttcttttgaatttgccaatacatgtgtctctgtgaactttgccactgttcattatatgagacaaggataaccagttccctctacatcactcctagtcctcatccttcacctctgtattagactgtcttaccacttgcatggtcaatcattgttactctttctttgtacaaactaatttagccagctaatgttcaccaacaatatgctagctc

SEQ ID NO: 277591 - DNA, 4724 bp, Homo sapiens
ggcccctcgagcctcgaaccggaacctccaaatccgagacgctctgcttatgaggacctcgaaatatgccggccagtgaaaaaatcttatggctttgagggcttttggttggccaggggcagtaaaaatctcggagagctgacaccaagtcctcccctgccacgtagcagtggtaaagtccgaagctcaaattccgagaattgagctctgttgattcttagaactggggttcttagaagtggtgatgcaagaagtttctaggaaaggccggacaccagctcttttaaaggatctgtcttctcaaggagcctagttggctatgcacaaggaaagcgccaaaagagctaaagggaggaagggaagagaaaacatttaactctcccatggtggttactgacccagcgtgggtgcggggagattgggatgggaagtccaggtctgggggcagccagcagttgtcagtttctcattgacagccctgctccttggagattgtttttgtgggtagtcttgtgtgtggcattggtggaatggctgaatctaggagacgcggcgtgtccagaacttgctggaaattggttttgagattttgggcaaggcctctcacccggagcctcagttccctccctaataaagcagggctgttataaggataagatgcaatcgtgagggggtgggaaaggactaagagctctgtaaaaatacaaaccaaatgctggtggtgcttccacacctgcggcatttggggtgggggtggtgacaacattgcccacactcaacccacacactcaggagttggggggggctggttcttaagacgagttggcttgcaaaggagtgaacttgagaaggacctgcgcctcgtgtatgtacatttgtttttggccaggcagaggcttacggtgaaaagcccaaggcccagctgacagtggacacaggggaatttgtttgtttgtttcaatccgcatctggagtgagtcattgccacttgtcatggtgaaatggcaaatctgggcttcctgtggttccagaagcctgcgactggaaatccacaagcgagctggtggttgaagctggttaaagaacagcctaggtattccagaagtgtttgaggatcccttccatgaaggaagagaggaaagtttttaagtaaacctcccactcccatgtgtcttcagctttcttttgcaaaggagaaaatccttgaagtttggtaaagaccgagttagtctatctctctttgcctatctcgagttgggctggggagaggaggagataggttcttttgtctttttctgtcttctcccttccccacttccttccctccagtccccactcactcacatgcacacactaaccttggagccgatgggattgagtgactggcacttgggaccacagagaaatgtcagagtgtttggttacagactcaaggaaacctctcattttagagtgctcatttggttttgagcaaaattttggactgtgaagcaaggcattggtgaagacaaaatggcctcgccggctgacagctgtatccagttcacccgccatgccagtgatgttcttctcaaccttaatcgtctccggagtcgagacatcttgactgatgttgtcattgttgtgagccgtgagcagtttagagcccataaaacggtcctcatggcctgcagtggcctgttctatagcatctttacagaccagttgaaatgcaaccttagtgtgatcaatctagatcctgagatcaaccctgagggattctgcatcctcctggacttcatgtacacatctcggctcaatttgcgggagggcaacatcatggctgtgatggccacggctatgtacctgcagatggagcatgttgtggacacttgccggaagtttattaaggccagtgaagcagagatggtttctgccatcaagcctcctcgtgaagagttcctcaacagccggatgctgatgccccaagacatcatggcctatcggggtcgtgaggtggtggagaacaacctgccactgaggagcgcccctgggtgtgagagcagagcctttgcccccagcctgtacagtggcctgtccacaccgccagcctcttattccatgtacagccacctccctgtcagcagcctcctcttctccgatgaggagtttcgggatgtccggatgcctgtggccaaccccttccccaaggagcgggcactcccatgtgatagtgccaggccagtccctggtgagtacagccggccgactttggaggtgtcccccaatgtgtgccacagcaatatctattcacccaaggaaacaatcccagaagaggcacgaagtgatatgcactacagtgtggctgagggcctcaaacctgctgccccctcagcccgaaatgccccctacttcccttgtgacaaggccagcaaagaagaagagagaccctcctcggaagatgagattgccctgcatttcgagccccccaatgcacccctgaaccggaagggtctggttagtccacagagcccccagaaatctgactgccagcccaactcgcccacagagtcctgcagcagtaagaatgcctgcatcctccaggcttctggctcccctccagccaagagccccactgaccccaaagcctgcaactggaagaaatacaagttcatcgtgctcaacagcctcaaccagaatgccaaaccagaggggcctgagcaggctgagctgggccgcctttccccacgagcctacacggccccacctgcctgccagccacccatggagcctgagaaccttgacctccagtccccaaccaagctgagtgccagcggggaggactccaccatcccacaagccagccggctcaataacatcgttaacaggtccatgacgggctctccccgcagcagcagcgagagccactcaccactctacatgcaccccccgaagtgcacgtcctgcggctctcagtccccacagcatgcagagatgtgcctccacaccgctggccccacgttccctgaggagatgggagagacccagtctgagtactcagattctagctgtgagaacggggccttcttctgcaatgagtgtgactgccgcttctctgaggaggcctcactcaagaggcacacgctgcagacccacagtgacaaaccctacaagtgtgaccgctgccaggcctccttccgctacaagggcaacctcgccagccacaagaccgtccataccggtgagaaaccctatcgttgcaacatctgtggggcccagttcaaccggccagccaacctgaaaacccacactcgaattcactctggagagaagccctacaaatgcgaaacctgcggagccagatttgtacaggtggcccacctccgtgcccatgtgcttatccacactggtgagaagccctatccctgtgaaatctgtggcacccgtttccggcaccttcagactctgaagagccacctgcgaatccacacaggagagaaaccttaccattgtgagaagtgtaacctgcatttccgtcacaaaagccagctgcgacttcacttgcgccagaagcatggcgccatcaccaacaccaaggtgcaataccgcgtgtcagccactgacctgcctccggagctccccaaagcctgctgaagcatggagtgttgatgctttcgtctccagccccttctcagaatctacccaaaggatactgtaacactttacaatgttcatcccatgatgtagtgcctctttcatccactagtgcaaatcatagctgggggttgggggtggtgggggtcggggcctgggggactgggagccgcagcagctccccctcccccactgccataaaacattaagaaaatcatattgcttcttctcctatgtgtaaggtgaaccatgtcagcaaaaagcaaaatcattttatatgtcaaagcaggggagtatgcaaaagttctgacttgactttagtctgcaaaatgaggaatgtatatgttttgtgggaacagatgtttcttttgtatgtaaatgtgcattcttttaaaagacaagacttcagtatgttgtcaaagagagggctttaatttttttaaccaaaggtgaaggaatatatggcagagttgtaaatatataaatatatatatatatataaaataaatatatataaacctaaaaaagatatattaaaaatataaaactgcgttaaaggctcgattttgtatctgcaggcagacacggatctgagaatctttattgagaaagagcacttaagagaatattttaagtattgcatctgtataagtaagaaaatattttgtctaaaatgcctcagtgtatttgtatttttttgcaagtgaaggtttacaatttacaaagtgtgtattaaaaaaaacaaaaagaacaaaaaaatctgcagaaggaaaaatgtgtaattttgttctagttttcagtttgtatatacccgtacaacgtgtcctcacggtgccttttttcacggaagttttcaatgatgggcgagcgtgcaccatccctttttgaagtgtaggcagacacagggacttgaagttgttactaactaaactctctttgggaatgtttgtctcatcccattctgcgtcatgcttgtgttataactactccggagacagggtttggctgtgtctaaactgcattaccgcgttgtaaaatatagctgtacaaatataagaataaaatgttgaaaagtcaaactggaaaaaaat

SEQ ID NO: 277592 - DNA, 4209 bp, Homo sapiens
tcccagctactcgggaggctgaggcaagagaatcgcttgaacccgggaggcggaggttacagtcggctgagatcgcgccactgcactccagcctgggcaacagagtgagactctgtgtcaaaaacaaaaacaaaatttaaatttaaatttaaaaagaccctatctatacagaaagaaaagaagaaaatacaaaccaaatgctggtggtgcttccacacctgcggcatttggggtgggggtggtgacaacattgcccacactcaacccacacactcaggagttggggggggctggttcttaagacgagttggcttgcaaaggagtgaacttgagaaggacctgcgcctcgtgtatgtacatttgtttttggccaggcagaggcttacggtgaaaagcccaaggcccagctgacagtggacacaggggaatttgtttgtttgtttcaatccgcatctggagtgagtcattgccacttgtcatggtgaaatggcaaatctgggcttcctgtggttccagaagcctgcgactggaaatccacaagcgagctggtggttgaagctggttaaagaacagcctaggtattccagaagtgtttgaggatcccttccatgaaggaagagaggaaagtttttaagtaaacctcccactcccatgtgtcttcagctttcttttgcaaaggagaaaatccttgaagtttggtaaagaccgagttagtctatctctctttgcctatctcgagttgggctggggagaggaggagataggttcttttgtctttttctgtcttctcccttccccacttccttccctccagtccccactcactcacatgcacacactaaccttggagccgatgggattgagtgactggcacttgggaccacagagaaatgtcagagtgtttggttacagactcaaggaaacctctcattttagagtgctcatttggttttgagcaaaattttggactgtgaagcaaggcattggtgaagacaaaatggcctcgccggctgacagctgtatccagttcacccgccatgccagtgatgttcttctcaaccttaatcgtctccggagtcgagacatcttgactgatgttgtcattgttgtgagccgtgagcagtttagagcccataaaacggtcctcatggcctgcagtggcctgttctatagcatctttacagaccagttgaaatgcaaccttagtgtgatcaatctagatcctgagatcaaccctgagggattctgcatcctcctggacttcatgtacacatctcggctcaatttgcgggagggcaacatcatggctgtgatggccacggctatgtacctgcagatggagcatgttgtggacacttgccggaagtttattaaggccagtgaagcagagatggtttctgccatcaagcctcctcgtgaagagttcctcaacagccggatgctgatgccccaagacatcatggcctatcggggtcgtgaggtggtggagaacaacctgccactgaggagcgcccctgggtgtgagagcagagcctttgcccccagcctgtacagtggcctgtccacaccgccagcctcttattccatgtacagccacctccctgtcagcagcctcctcttctccgatgaggagtttcgggatgtccggatgcctgtggccaaccccttccccaaggagcgggcactcccatgtgatagtgccaggccagtccctggtgagtacagccggccgactttggaggtgtcccccaatgtgtgccacagcaatatctattcacccaaggaaacaatcccagaagaggcacgaagtgatatgcactacagtgtggctgagggcctcaaacctgctgccccctcagcccgaaatgccccctacttcccttgtgacaaggccagcaaagaagaagagagaccctcctcggaagatgagattgccctgcatttcgagccccccaatgcacccctgaaccggaagggtctggttagtccacagagcccccagaaatctgactgccagcccaactcgcccacagagtcctgcagcagtaagaatgcctgcatcctccaggcttctggctcccctccagccaagagccccactgaccccaaagcctgcaactggaagaaatacaagttcatcgtgctcaacagcctcaaccagaatgccaaaccagaggggcctgagcaggctgagctgggccgcctttccccacgagcctacacggccccacctgcctgccagccacccatggagcctgagaaccttgacctccagtccccaaccaagctgagtgccagcggggaggactccaccatcccacaagccagccggctcaataacatcgttaacaggtccatgacgggctctccccgcagcagcagcgagagccactcaccactctacatgcaccccccgaagtgcacgtcctgcggctctcagtccccacagcatgcagagatgtgcctccacaccgctggccccacgttccctgaggagatgggagagacccagtctgagtactcagattctagctgtgagaacggggccttcttctgcaatgagtgtgactgccgcttctctgaggaggcctcactcaagaggcacacgctgcagacccacagtgacaaaccctacaagtgtgaccgctgccaggcctccttccgctacaagggcaacctcgccagccacaagaccgtccataccggtgagaaaccctatcgttgcaacatctgtggggcccagttcaaccggccagccaacctgaaaacccacactcgaattcactctggagagaagccctacaaatgcgaaacctgcggagccagatttgtacaggtggcccacctccgtgcccatgtgcttatccacactggtgagaagccctatccctgtgaaatctgtggcacccgtttccggcaccttcagactctgaagagccacctgcgaatccacacaggagagaaaccttaccattgtgagaagtgtaacctgcatttccgtcacaaaagccagctgcgacttcacttgcgccagaagcatggcgccatcaccaacaccaaggtgcaataccgcgtgtcagccactgacctgcctccggagctccccaaagcctgctgaagcatggagtgttgatgctttcgtctccagccccttctcagaatctacccaaaggatactgtaacactttacaatgttcatcccatgatgtagtgcctctttcatccactagtgcaaatcatagctgggggttgggggtggtgggggtcggggcctgggggactgggagccgcagcagctccccctcccccactgccataaaacattaagaaaatcatattgcttcttctcctatgtgtaaggtgaaccatgtcagcaaaaagcaaaatcattttatatgtcaaagcaggggagtatgcaaaagttctgacttgactttagtctgcaaaatgaggaatgtatatgttttgtgggaacagatgtttcttttgtatgtaaatgtgcattcttttaaaagacaagacttcagtatgttgtcaaagagagggctttaatttttttaaccaaaggtgaaggaatatatggcagagttgtaaatatataaatatatatatatatataaaataaatatatataaacctaaaaaagatatattaaaaatataaaactgcgttaaaggctcgattttgtatctgcaggcagacacggatctgagaatctttattgagaaagagcacttaagagaatattttaagtattgcatctgtataagtaagaaaatattttgtctaaaatgcctcagtgtatttgtatttttttgcaagtgaaggtttacaatttacaaagtgtgtattaaaaaaaacaaaaagaacaaaaaaatctgcagaaggaaaaatgtgtaattttgttctagttttcagtttgtatatacccgtacaacgtgtcctcacggtgccttttttcacggaagttttcaatgatgggcgagcgtgcaccatccctttttgaagtgtaggcagacacagggacttgaagttgttactaactaaactctctttgggaatgtttgtctcatcccattctgcgtcatgcttgtgttataactactccggagacagggtttggctgtgtctaaactgcattaccgcgttgtaaaatatagctgtacaaatataagaataaaatgttgaaaagtcaaactggaaaaaaat

SEQ ID NO: 277593 - DNA, 3477 bp, Homo sapiens
ggcccctcgagcctcgaaccggaacctccaaatccgagacgctctgcttatgaggacctcgaaatatgccggccagtgaaaaaatcttatggctttgagggcttttggttggccaggggcagtaaaaatctcggagagctgacaccaagtcctcccctgccacgtagcagtggtaaagtccgaagctcaaattccgagaattgagctctgttgattcttagaactggggttcttagaagtggtgatgcaagaagtttctaggaaaggccggacaccaggttttgagcaaaattttggactgtgaagcaaggcattggtgaagacaaaatggcctcgccggctgacagctgtatccagttcacccgccatgccagtgatgttcttctcaaccttaatcgtctccggagtcgagacatcttgactgatgttgtcattgttgtgagccgtgagcagtttagagcccataaaacggtcctcatggcctgcagatcctgagatcaaccctgagggattctgcatcctcctggacttcatgtacacatctcggctcaatttgcgggagggcaacatcatggctgtgatggccacggctatgtacctgcagatggagcatgttgtggacacttgccggaagtttattaaggccagtgaagcagagatggtttctgccatcaagcctcctcgtgaagagttcctcaacagccggatgctgatgccccaagacatcatggcctatcggggtcgtgaggtggtggagaacaacctgccactgaggagcgcccctgggtgtgagagcagagcctttgcccccagcctgtacagtggcctgtccacaccgccagcctcttattccatgtacagccacctccctgtcagcagcctcctcttctccgatgaggagtttcgggatgtccggatgcctgtggccaaccccttccccaaggagcgggcactcccatgtgatagtgccaggccagtccctggtgagtacagccggccgactttggaggtgtcccccaatgtgtgccacagcaatatctattcacccaaggaaacaatcccagaagaggcacgaagtgatatgcactacagtgtggctgagggcctcaaacctgctgccccctcagcccgaaatgccccctacttcccttgtgacaaggccagcaaagaagaagagagaccctcctcggaagatgagattgccctgcatttcgagccccccaatgcacccctgaaccggaagggtctggttagtccacagagcccccagaaatctgactgccagcccaactcgcccacagagtcctgcagcagtaagaatgcctgcatcctccaggcttctggctcccctccagccaagagccccactgaccccaaagcctgcaactggaagaaatacaagttcatcgtgctcaacagcctcaaccagaatgccaaaccagaggggcctgagcaggctgagctgggccgcctttccccacgagcctacacggccccacctgcctgccagccacccatggagcctgagaaccttgacctccagtccccaaccaagctgagtgccagcggggaggactccaccatcccacaagccagccggctcaataacatcgttaacaggtccatgacgggctctccccgcagcagcagcgagagccactcaccactctacatgcaccccccgaagtgcacgtcctgcggctctcagtccccacagcatgcagagatgtgcctccacaccgctggccccacgttccctgaggagatgggagagacccagtctgagtactcagattctagctgtgagaacggggccttcttctgcaatgagtgtgactgccgcttctctgaggaggcctcactcaagaggcacacgctgcagacccacagtgacaaaccctacaagtgtgaccgctgccaggcctccttccgctacaagggcaacctcgccagccacaagaccgtccataccggtgagaaaccctatcgttgcaacatctgtggggcccagttcaaccggccagccaacctgaaaacccacactcgaattcactctggagagaagccctacaaatgcgaaacctgcggagccagatttgtacaggtggcccacctccgtgcccatgtgcttatccacactggtgagaagccctatccctgtgaaatctgtggcacccgtttccggcaccttcagactctgaagagccacctgcgaatccacacaggagagaaaccttaccattgtgagaagtgtaacctgcatttccgtcacaaaagccagctgcgacttcacttgcgccagaagcatggcgccatcaccaacaccaaggtgcaataccgcgtgtcagccactgacctgcctccggagctccccaaagcctgctgaagcatggagtgttgatgctttcgtctccagccccttctcagaatctacccaaaggatactgtaacactttacaatgttcatcccatgatgtagtgcctctttcatccactagtgcaaatcatagctgggggttgggggtggtgggggtcggggcctgggggactgggagccgcagcagctccccctcccccactgccataaaacattaagaaaatcatattgcttcttctcctatgtgtaaggtgaaccatgtcagcaaaaagcaaaatcattttatatgtcaaagcaggggagtatgcaaaagttctgacttgactttagtctgcaaaatgaggaatgtatatgttttgtgggaacagatgtttcttttgtatgtaaatgtgcattcttttaaaagacaagacttcagtatgttgtcaaagagagggctttaatttttttaaccaaaggtgaaggaatatatggcagagttgtaaatatataaatatatatatatatataaaataaatatatataaacctaaaaaagatatattaaaaatataaaactgcgttaaaggctcgattttgtatctgcaggcagacacggatctgagaatctttattgagaaagagcacttaagagaatattttaagtattgcatctgtataagtaagaaaatattttgtctaaaatgcctcagtgtatttgtatttttttgcaagtgaaggtttacaatttacaaagtgtgtattaaaaaaaacaaaaagaacaaaaaaatctgcagaaggaaaaatgtgtaattttgttctagttttcagtttgtatatacccgtacaacgtgtcctcacggtgccttttttcacggaagttttcaatgatgggcgagcgtgcaccatccctttttgaagtgtaggcagacacagggacttgaagttgttactaactaaactctctttgggaatgtttgtctcatcccattctgcgtcatgcttgtgttataactactccggagacagggtttggctgtgtctaaactgcattaccgcgttgtaaaatatagctgtacaaatataagaataaaatgttgaaaagtcaaactggaaaaaaat

SEQ ID NO: 277594 - DNA, 3021 bp, Homo sapiens
ggcccctcgagcctcgaaccggaacctccaaatccgagacgctctgcttatgaggacctcgaaatatgccggccagtgaaaaaatcttatggctttgagggcttttggttggccaggggcagtaaaaatctcggagagctgacaccaagtcctcccctgccacgtagcagtggtaaagtccgaagctcaaattccgagaattgagctctgttgattcttagaactggggttcttagaagtggtgatgcaagaagtttctaggaaaggccggacaccaggttttgagcaaaattttggactgtgaagcaaggcattggtgaagacaaaatggcctcgccggctgacagctgtatccagttcacccgccatgccagtgatgttcttctcaaccttaatcgtctccggagtcgagacatcttgactgatgttgtcattgttgtgagccgtgagcagtttagagcccataaaacggtcctcatggcctgcagtggcctgttctatagcatctttacagaccagttgaaatgcaaccttagtgtgatcaatctagatcctgagatcaaccctgagggattctgcatcctcctggacttcatgtacacatctcggctcaatttgcgggagggcaacatcatggctgtgatggccacggctatgtacctgcagatggagcatgttgtggacacttgccggaagtttattaaggccagtgaagcagagatggtttctgccatcaagcctcctcgtgaagagttcctcaacagccggatgctgatgccccaagacatcatggcctatcggggtcgtgaggtggtggagaacaacctgccactgaggagcgcccctgggtgtgagagcagagcctttgcccccagcctgtacagtggcctgtccacaccgccagcctcttattccatgtacagccacctccctgtcagcagcctcctcttctccgatgaggagtttcgggatgtccggatgcctgtggccaaccccttccccaaggagcgggcactcccatgtgatagtgccaggccagtccctggtgagtacaccacccatggagcctgagaaccttgacctccagtccccaaccaagctgagtgccagcggggaggactccaccatcccacaagccagccggctcaataacatcgttaacaggtccatgacgggctctccccgcagcagcagcgagagccactcaccactctacatgcaccccccgaagtgcacgtcctgcggctctcagtccccacagcatgcagagatgtgcctccacaccgctggccccacgttccctgaggagatgggagagacccagtctgagtactcagattctagctgtgagaacggggccttcttctgcaatgagtgtgactgccgcttctctgaggaggcctcactcaagaggcacacgctgcagacccacagtgacaaaccctacaagtgtgaccgctgccaggcctccttccgctacaagggcaacctcgccagccacaagaccgtccataccggtgagaaaccctatcgttgcaacatctgtggggcccagttcaaccggccagccaacctgaaaacccacactcgaattcactctggagagaagccctacaaatgcgaaacctgcggagccagatttgtacaggtggcccacctccgtgcccatgtgcttatccacactggtgagaagccctatccctgtgaaatctgtggcacccgtttccggcaccttcagactctgaagagccacctgcgaatccacacaggagagaaaccttaccattgtgagaagtgtaacctgcatttccgtcacaaaagccagctgcgacttcacttgcgccagaagcatggcgccatcaccaacaccaaggtgcaataccgcgtgtcagccactgacctgcctccggagctccccaaagcctgctgaagcatggagtgttgatgctttcgtctccagccccttctcagaatctacccaaaggatactgtaacactttacaatgttcatcccatgatgtagtgcctctttcatccactagtgcaaatcatagctgggggttgggggtggtgggggtcggggcctgggggactgggagccgcagcagctccccctcccccactgccataaaacattaagaaaatcatattgcttcttctcctatgtgtaaggtgaaccatgtcagcaaaaagcaaaatcattttatatgtcaaagcaggggagtatgcaaaagttctgacttgactttagtctgcaaaatgaggaatgtatatgttttgtgggaacagatgtttcttttgtatgtaaatgtgcattcttttaaaagacaagacttcagtatgttgtcaaagagagggctttaatttttttaaccaaaggtgaaggaatatatggcagagttgtaaatatataaatatatatatatatataaaataaatatatataaacctaaaaaagatatattaaaaatataaaactgcgttaaaggctcgattttgtatctgcaggcagacacggatctgagaatctttattgagaaagagcacttaagagaatattttaagtattgcatctgtataagtaagaaaatattttgtctaaaatgcctcagtgtatttgtatttttttgcaagtgaaggtttacaatttacaaagtgtgtattaaaaaaaacaaaaagaacaaaaaaatctgcagaaggaaaaatgtgtaattttgttctagttttcagtttgtatatacccgtacaacgtgtcctcacggtgccttttttcacggaagttttcaatgatgggcgagcgtgcaccatccctttttgaagtgtaggcagacacagggacttgaagttgttactaactaaactctctttgggaatgtttgtctcatcccattctgcgtcatgcttgtgttataactactccggagacagggtttggctgtgtctaaactgcattaccgcgttgtaaaatatagctgtacaaatataagaataaaatgttgaaaagtcaaactggaaaaaaat

SEQ ID NO: 277595 - DNA, 1591 bp, Homo sapiens
actccgaccccaccgcaggttgtactggccccacgttccctgaggagatgggagagacccagtctgagtactcagattctagctgtggtgagaaaccctatcgttgcaacatctgtggggcccagttcaaccggccagccaacctgaaaacccacactcgaattcactctggagagaagccctacaaatgcgaaacctgcggagccagatttgtacaggtggcccacctccgtgcccatgtgcttatccacactggtgagaagccctatccctgtgaaatctgtggcacccgtttccggcaccttcagactctgaagagccacctgcgaatccacacaggagagaaaccttaccattgtgagaagtgtaacctgcatttccgtcacaaaagccagctgcgacttcacttgcgccagaagcatggcgccatcaccaacaccaaggtgcaataccgcgtgtcagccactgacctgcctccggagctccccaaagcctgctgaagcatggagtgttgatgctttcgtctccagccccttctcagaatctacccaaaggatactgtaacactttacaatgttcatcccatgatgtagtgcctctttcatccactagtgcaaatcatagctgggggttgggggtggtgggggtcggggcctgggggactgggagccgcagcagctccccctcccccactgccataaaacattaagaaaatcatattgcttcttctcctatgtgtaaggtgaaccatgtcagcaaaaagcaaaatcattttatatgtcaaagcaggggagtatgcaaaagttctgacttgactttagtctgcaaaatgaggaatgtatatgttttgtgggaacagatgtttcttttgtatgtaaatgtgcattcttttaaaagacaagacttcagtatgttgtcaaagagagggctttaatttttttaaccaaaggtgaaggaatatatggcagagttgtaaatatataaatatatatatatatataaaataaatatatataaacctaaaaaagatatattaaaaatataaaactgcgttaaaggctcgattttgtatctgcaggcagacacggatctgagaatctttattgagaaagagcacttaagagaatattttaagtattgcatctgtataagtaagaaaatattttgtctaaaatgcctcagtgtatttgtatttttttgcaagtgaaggtttacaatttacaaagtgtgtattaaaaaaaacaaaaagaacaaaaaaatctgcagaaggaaaaatgtgtaattttgttctagttttcagtttgtatatacccgtacaacgtgtcctcacggtgccttttttcacggaagttttcaatgatgggcgagcgtgcaccatccctttttgaagtgtaggcagacacagggacttgaagttgttactaactaaactctctttgggaatgtttgtctcatcccattctgcgtcatgcttgtgttataactactccggagacagggtttggctgtgtctaaactgcattaccgcgttgtaaaatatagctgtacaaatataagaataaaatgttgaaaagtcaaactggaaaaaaat

SEQ ID NO: 277596 - DNA, 1942 bp, Homo sapiens
caagggaaaagctagaagaaccttcccaggtaatctgaagtagcccctcaggttccagagagggaaactgaggcccagagaaggagagtgacttgtccaggttccgcaggcagataatcctaatgacaaagctggttctaaagcccaggcttcctggaatctccccctctcctatcccacacctggcattgttgctactccgtgccaccacttgtttcttggccctggtcccctgcgaggtatgcaggtgcgtgtgtgagagagggctgacagatgtgggggcaggcccctggattctctctctcacattccctaagggaaaggaaaacacaagtggcctcagggaggagcaggctgcttagaaatccaggagccacggactgcagagaccttccttattgaatatggcttttctttttccctttttcttggtaataggtgagaaaccctatcgttgcaacatctgtggggcccagttcaaccggccagccaacctgaaaacccacactcgaattcactctggagagaagccctacaaatgcgaaacctgcggagccagatttgtacaggtggcccacctccgtgcccatgtgcttatccacactggtgagaagccctatccctgtgaaatctgtggcacccgtttccggcaccttcagactctgaagagccacctgcgaatccacacaggagagaaaccttaccattgtgagaagtgtaacctgcatttccgtcacaaaagccagctgcgacttcacttgcgccagaagcatggcgccatcaccaacaccaaggtgcaataccgcgtgtcagccactgacctgcctccggagctccccaaagcctgctgaagcatggagtgttgatgctttcgtctccagccccttctcagaatctacccaaaggatactgtaacactttacaatgttcatcccatgatgtagtgcctctttcatccactagtgcaaatcatagctgggggttgggggtggtgggggtcggggcctgggggactgggagccgcagcagctccccctcccccactgccataaaacattaagaaaatcatattgcttcttctcctatgtgtaaggtgaaccatgtcagcaaaaagcaaaatcattttatatgtcaaagcaggggagtatgcaaaagttctgacttgactttagtctgcaaaatgaggaatgtatatgttttgtgggaacagatgtttcttttgtatgtaaatgtgcattcttttaaaagacaagacttcagtatgttgtcaaagagagggctttaatttttttaaccaaaggtgaaggaatatatggcagagttgtaaatatataaatatatatatatatataaaataaatatatataaacctaaaaaagatatattaaaaatataaaactgcgttaaaggctcgattttgtatctgcaggcagacacggatctgagaatctttattgagaaagagcacttaagagaatattttaagtattgcatctgtataagtaagaaaatattttgtctaaaatgcctcagtgtatttgtatttttttgcaagtgaaggtttacaatttacaaagtgtgtattaaaaaaaacaaaaagaacaaaaaaatctgcagaaggaaaaatgtgtaattttgttctagttttcagtttgtatatacccgtacaacgtgtcctcacggtgccttttttcacggaagttttcaatgatgggcgagcgtgcaccatccctttttgaagtgtaggcagacacagggacttgaagttgttactaactaaactctctttgggaatgtttgtctcatcccattctgcgtcatgcttgtgttataactactccggagacagggtttggctgtgtctaaactgcattaccgcgttgtaaaatatagctgtacaaatataagaataaaatgttgaaaagtcaaactggaaaaaaat

SEQ ID NO: 277597 - DNA, 2569 bp, Homo sapiens
ggcccctcgagcctcgaaccggaacctccaaatccgagacgctctgcttatgaggacctcgaaatatgccggccagtgaaaaaatcttatggctttgagggcttttggttggccaggggcagtaaaaatctcggagagctgacaccaagtcctcccctgccacgtagcagtggtaaagtccgaagctcaaattccgagaattgagctctgttgattcttagaactggggttcttagaagtggtgatgcaagaagtttctaggaaaggccggacaccaggttttgagcaaaattttggactgtgaagcaaggcattggtgaagacaaaatggcctcgccggctgacagctgtatccagttcacccgccatgccagtgatgttcttctcaaccttaatcgtctccggagtcgagacatcttgactgatgttgtcattgttgtgagccgtgagcagtttagagcccataaaacggtcctcatggcctgcagtggcctgttctatagcatctttacagaccagttgaaatgcaaccttagtgtgatcaatctagatcctgagatcaaccctgagggattctgcatcctcctggacttcatgtacacatctcggctcaatttgcgggagggcaacatcatggctgtgatggccacggctatgtacctgcagatggagcatgttgtggacacttgccggaagtttattaaggccagtgaagcagagatggtttctgccatcaagcctcctcgtgaagagttcctcaacagccggatgctgatgccccaagacatcatggcctatcggggtcgtgaggtggtggagaacaacctgccactgaggagcgcccctgggtgtgagagcagagcctttgcccccagcctgtacagtggcctgtccacaccgccagcctcttattccatgtacagccacctccctgtcagcagcctcctcttctccgatgaggagtttcgggatgtccggatgcctgtggccaaccccttccccaaggagcgggcactcccatgtgatagtgccaggccagtccctggtgagtacagccggccgactttggaggtgtcccccaatgtgtgccacagcaatatctattcacccaaggaaacaatcccagaagaggcacgaagtgatatgcactacagtgtggctgagggcctcaaacctgctgccccctcagcccgaaatgccccctacttcccttgtgacaaggccagcaaagaagaagagagaccctcctcggaagatgagattgccctgcatttcgagccccccaatgcacccctgaaccggaagggtctggttagtccacagagcccccagaaatctgactgccagcccaactcgcccacagagtcctgcagcagtaagaatgcctgcatcctccaggcttctggctcccctccagccaagagccccactgaccccaaagcctgcaactggaagaaatacaagttcatcgtgctcaacagcctcaaccagaatgccaaaccagaggggcctgagcaggctgagctgggccgcctttccccacgagcctacacggccccacctgcctgccagccacccatggagcctgagaaccttgacctccagtccccaaccaagctgagtgccagcggggaggactccaccatcccacaagccagccggctcaataacatcgttaacaggtccatgacgggctctccccgcagcagcagcgagagccactcaccactctacatgcaccccccgaagtgcacgtcctgcggctctcagtccccacagcatgcagagatgtgcctccacaccgctggccccacgttccctgaggagatgggagagacccagtctgagtactcagattctagctgtgagaacggggccttcttctgcaatgagtgtgactgccgcttctctgaggaggcctcactcaagaggcacacgctgcagacccacagtgacaaaccctacaagtgtgaccgctgccaggcctccttccgctacaagggcaacctcgccagccacaagaccgtccataccggtgagaaaccctatcgttgcaacatctgtggggcccagttcaaccggccagccaacctgaaaacccacactcgaattcactctggagagaagccctacaaatgcgaaacctgcggagccagatttgtacaggtggcccacctccgtgcccatgtgcttatccacactggtgagaagccctatccctgtgaaatctgtggcacccgtttccggcaccttcagactctgaagagccacctgcgaatccacacaggagagaaaccttaccattgtgagaagtgtaacctgcatttccgtcacaaaagccagctgcgacttcacttgcgccagaagcatggcgccatcaccaacaccaaggtgcaataccgcgtgtcagccactgacctgcctccggagcatcccattctgcgtcatgcttgtgttataactactccggagacagggtttggctgtgtctaaactgcattaccgcgttgtaaaatatagctgtacaaatataagaataaaatgttgaaaagtcaaactggaaaaaaat

SEQ ID NO: 277598 - DNA, 2771 bp, Homo sapiens
ggcccctcgagcctcgaaccggaacctccaaatccgagacgctctgcttatgaggacctcgaaatatgccggccagtgaaaaaatcttatggctttgagggcttttggttggccaggggcagtaaaaatctcggagagctgacaccaagtcctcccctgccacgtagcagtggtaaagtccgaagctcaaattccgagaattgagctctgttgattcttagaactggggttcttagaagtggtgatgcaagaagtttctaggaaaggccggacaccaggttttgagcaaaattttggactgtgaagcaaggcattggtgaagacaaaatggcctcgccggctgacagctgtatccagttcacccgccatgccagtgatgttcttctcaaccttaatcgtctccggagtcgagacatcttgactgatgttgtcattgttgtgagccgtgagcagtttagagcccataaaacggtcctcatggcctgcagtggcctgttctatagcatctttacagaccagttgaaatgcaaccttagtgtgatcaatctagatcctgagatcaaccctgagggattctgcatcctcctggacttcatgtacacatctcggctcaatttgcgggagggcaacatcatggctgtgatggccacggctatgtacctgcagatggagcatgttgtggacacttgccggaagtttattaaggccagtgaagcagagatggtttctgccatcaagcctcctcgtgaagagttcctcaacagccggatgctgatgccccaagacatcatggcctatcggggtcgtgaggtggtggagaacaacctgccactgaggagcgcccctgggtgtgagagcagagcctttgcccccagcctgtacagtggcctgtccacaccgccagcctcttattccatgtacagccacctccctgtcagcagcctcctcttctccgatgaggagtttcgggatgtccggatgcctgtggccaaccccttccccaaggagcgggcactcccatgtgatagtgccaggccagtccctggtgagtacagccggccgactttggaggtgtcccccaatgtgtgccacagcaatatctattcacccaaggaaacaatcccagaagaggcacgaagtgatatgcactacagtgtggctgagggcctcaaacctgctgccccctcagcccgaaatgccccctacttcccttgtgacaaggccagcaaagaagaagagagaccctcctcggaagatgagattgccctgcatttcgagccccccaatgcacccctgaaccggaagggtctggttagtccacagagcccccagaaatctgactgccagcccaactcgcccacagagtcctgcagcagtaagaatgcctgcatcctccaggcttctggctcccctccagccaagagccccactgaccccaaagcctgcaactggaagaaatacaagttcatcgtgctcaacagcctcaaccagaatgccaaaccagaggggcctgagcaggctgagctgggccgcctttccccacgagcctacacggccccacctgcctgccagccacccatggagcctgagaaccttgacctccagtccccaaccaagctgagtgccagcggggaggactccaccatcccacaagccagccggctcaataacatcgttaacaggtccatgacgggctctccccgcagcagcagcgagagccactcaccactctacatgcaccccccgaagtgcacgtcctgcggctctcagtccccacagcatgcagagatgtgcctccacaccgctggccccacgttccctgaggagatgggagagacccagtctgagtactcagattctagctgtgagaacggggccttcttctgcaatgagtgtgactgccgcttctctgaggaggcctcactcaagaggcacacgctgcagacccacagtgacaaaccctacaagtgtgaccgctgccaggcctccttccgctacaagggcaacctcgccagccacaagaccgtccataccggtgagaaaccctatcgttgcaacatctgtggggcccagttcaaccggccagccaacctgaaaacccacactcgaattcactctggagagaagccctacaaatgcgaaacctgcggagccagatttgtacaggtggcccacctccgtgcccatgtgcttatccacactggtgagaagccctatccctgtgaaatctgtggcacccgtttccggcaccttcagactctgaagagccacctgcgaatccacacaggagagaaaccttaccatgtacgtaagcctcttgaggccgctctctgacctgcggggatgtggagggcagggaaggaggtggagcgcagggaaggaggtggagcagggaggcagtggaactgtttgctcccatctcaagcacacagtggggcaaccactacgctaatggttggaagacctagatctgggcccaatggccagacaccctgcttgaccttgtcccaagcattaggggactcatctttaaaatgagggtatgggactaggtgatctgggccttaggagaggagtctagactgtggatacatagacttgattcactccacctagattcattcatttcacaaatacttattgattgcctcctggacaccccatactgggctagatgcacatttaagaggagctaaggtgtttgagaaggaacagtcttaggaggaggagaacaaaaagaatgttataagaattaatgatgttacaggaaa

SEQ ID NO: 277599 - DNA, 489 bp, Homo sapiens
agttggttagtttcacaagaaatgccagtaaaagtttaataaggaacatcttccatattcagcaggaacaaggaacaagactacaacacaagcactgaatgaaacagaaaagcatgctcacggcagatgcttattccattcatgttaacatttaacacatctgttaaacagggtgctctaagccctatttttgacagtgactaaaaatgatgtattctaactaggataagtagaaatcaagggaaaagaggttgaatctgaatacacaaatttatatagctcattcctagaacactacactgtcctgtgttttcgataaattaactatacatatgcattttacttcaagatagggaaaagcagaagtttaatgatttttttttttacaattgttgtcaaagctgtttggatttttaaatgtaaatactgaggactaagaaatcttgttaagaagcagggtcgacgcggccgcgaatttagtagtagtag

SEQ ID NO: 277600 - DNA, 506 bp, Homo sapiens
cagacgggaaggaactaacatattcaagcttacttctggctgtgtcactgacccaacagaggccagtaggtccagcatggcaagcatggctccaggatgaatgatgactgcatcagaactctgcagagatgaagttgtcacatgtagtttcaggtctgagaagcagccaagaaatcgaacagcatctgccaacttctcatactgaatctctgttttgaagaaatgagagttggctggctcatagcgcattgctgcagtcaacgtgcagaacacagtgtgaagaagttcaaacacttgattctggttcactttctcccagccattcttgggtggacagctcaaagatctttccatagcaacgagcaaggatgtaatgtacacaaatcctccaactttcctaaaaactgttcttgaacgatggctttctcgaaggaccgacaggagggcctacaggagacaaaagaaaaaacaaatgaaaatacacataattcaaaaaaaaaaaaaaa

SEQ ID NO: 277601 - DNA, 1923 bp, Homo sapiens
agttggttagtttcacaagaaatgccagtaaaagtttaataaggaacatcttccatattcagcaggaacaaggaacaagactacaacacaagcactgaatgaaacagaaaagcatgctcacggcagatgcttattccattcatgttaacatttaacacatctgttaaacagggtgctctaagccctatttttgacagtgactaaaaatgatgtattctaactaggataagtagaaatcaagggaaaagaggttgaatctgaatacacaaatttatatagctcattcctagaacactacactgtcctgtgttttcgataaattaactatacatatgcattttacttcaagatagggaaaagcagaagtttaatgatttttttttttacaattgttgtcaaagctgtttggatttttaaatgtaaatactgaggactaagaaatcttgttaagaagcaggaaatatctcagttgatacttcaaagcagatattccacagaaaaggacacaaaacctattacaagctctatccaatgtagttacatggtctattgatgagggcagttcatttattttatgtagtaaaactatggtaagttaaaagcaataacacttggggcataaattagaagtattattttcaaagtgacatcttcattgaaaacacagttgaagcactgaaaataagtgatctagatgaagtggctctcctacaatctgcctgagaaccctggattcccccactgtagaatgtgtcacactatatgtaattgtttatttatgtgtctacattttagctaaaagatagcaaggaccaagacagccctgtgtagagctgaatcctcaatgcctagcacagtgacttggcatgcagcagctttttgttaagtacttatttcatgaaggaatgagtaaatattgagtctgatggcctcttgaacttgacggttcaagacactgacacctctctttgggaactatatcattttttgaggagtatgatatgtggagaatgatggagtacgtgtctggaaataagaataatcataatgatgttctattgataacacatatcaataagtccagatgcaccttttgaggctaaaaagaaaaaaaacaacagtaaacactatcattaaaggaaacttcatagaaactgttccaataactgcaatgagaactaattgaacctgaatttacaaatagtacacaggcttccatgctaaaaaaaaaaaaaaacaataccagagcaagagtaatattcaaaaataaagtgatacacttcaaacaaataggagaagagtcatctgttttcatattcttttggattaactcataattcaagtcttaatgttgaagtcatgcttagtatacaccctttaattcagaggacagagcagagccatacctgtcaaaagaatctgtggctactttgtaaagataaataaaaagtttactgcagtgccgtaacgtgggtgacactgattctattgagattacatcttcctctaaaagtctttgaaatggctgtgtatttgaggggaagacattcatggcgcttatttttcttaggtctgagaagcagccaagaaatcgaacagcatctgccaacttctcatactgaatctctgttttgaagaaatgagagttggctggctcatagcgcattgctgcagtcaacgtgcagaacacagtgtgaagaagttcaaacacttgattctggttcactttctcccagccattcttgggtggacagctcaaagatctttccatagcaacgagcaaggatgtaatgtacacaaatcctccaactttcctaaaaactgttcttgaacgatggctttctcgaaggaccgacaggagggcctacaggagacaaaagaaaaaacaaatgaaaatacacataattcaaaaaaaaaaaaaaa

SEQ ID NO: 277602 - DNA, 1085 bp, Homo sapiens
ggagcgagccagcatgtggtacacccgggacagcgtgtccaggaagcccaggtggcccgaggaggtggcagacagcacacggaggccatcggggctgacacagactgagctgacggggccctcgtgctctgtgggtggggtggggtcaggggcctccagggccaccccggggtgagccgcatgctcaggcttcgggtccccgacaccccagcaaatgcactccctgctgctcaaagtcccaggctccacacggctgcaagatgcagctccctcgaggccaccactcttaggctaggcgggacccaggctgaggggcttcacacactacccacgtcccaccgggcccttccgtgaggctgccctgcgggccgccctggcatcagccgccccagggctctggatatgccacttggccccgttggcaccctgtgcagccaggagccagggcggctgacagcagagccccggggactgggccttccccgccccagcatccaggcgaggctctcccggagttgggagagcgtgcccacagcatcacctgcctccaggagcaccgaggagaagtccaggggccagagccgcaagaagccgtcctcagagcccacagcacacatggccggggagacgctgaggctgctgatggcaatgccggggcctgggggcagggaggcgtcagtgcctcggtgtccctgccaccctggccacgtggtgggcgccctcttacctgagctgaaggtctgcttctgtgggtggggaccgcctggagtccgtgtggggagcaggcggcgggcatgccgcacgaccatgcgctgacagtcaatctccaagatgtggccactgcggctgcacacgaagctgcccgaggaggcggcagggaagtccacggggcaggaacgcagcaccccgccacgcagccgccagagccgcacactgccctgcccgcacgacgccatcctgcaaggaatgaggactgagcactgccgcagctcgcagcgccctgacccaccgggagacgcagagacgcacagccaagccagggggaggtgctcgggcctcggcccccactccgggcccagaccctc

SEQ ID NO: 277603 - DNA, 471 bp, Homo sapiens
agatctaccaattaggaaattagctgtgatttagaaaatttaatatttcgatgccatactttcctaatctgcaaaatttttgtaaatacctgtgacctagtgtcgtgagcgcttagcaacacctgacacccactaagctctcagccagtggttctgaaagtggttctagaccagcaacaacagcagtagcagcagcacctgtgaacttgttagaaatgcaaagtttcaggcccattccagttctactgaatctgaaactcgaagggaacagcaacctatgttttaataaaccccaagatggtcgccagagaaccatgatgacaaagaggatcatggagaacagcaagcgccagatggcatcgtctacccacagctcccgccagtcctacaatacaggggagaagtacaacattcatacacattatcttaaccccttgttcataaagcctttggcatagaacaaaaatcaaa

SEQ ID NO: 277604 - DNA, 464 bp, Homo sapiens
agatctaccaattaggaaattagctgtgatttagaaaatttaatatttcgatgccatactttcctaatctgcaaaatttttgtaaatacctgtgacctagtgtcgtgagcgcttagcaacacctgacacccactaagctctcagccagtggttctgaaagtggttctagaccagcaacaacagcagtagcagcagcacctgtgaacttgttagaaatgcaaagtttcaggcccattccagttctactgaatctgaaactcgaagggaacagcaacctatgttttaataaaccccaagaactatggctccttaactcagaagggcccttttttctcaaaacaacctctgcaagatgtaaccttgacttcccaggaaaatgaaaggtagttaacaatttcccccatcacctatgtaactccctaaataaataaaaattacaggcagttgctcctggagattacata

SEQ ID NO: 277605 - DNA, 633 bp, Homo sapiens
agatctaccaattaggaaattagctgtgatttagaaaatttaatatttcgatgccatactttcctaatctgcaaaatttttgtaaatacctgtgacctagtgtcgtgagcgcttagcaacacctgacacccactaagctctcagccagtggttctgaaagtggttctagaccagcaacaacagcagtagcagcagcacctgtgaacttgttagaaatgcaaagtttcaggcccattccagttctactgaatctgaaactcgaagggaacagcaacctatgttttaataaaccccaaggtgtatacccagtgacatgaatcctggatcataagaagagagaccgaacaccaggaaagaaaatacagatttccccagactctacctgctatcaccattttgttgtaatacaccttaactcagagtaaacagaagagtccaagaacctctggttgtttgcagatggtcgccagagaaccatgatgacaaagaggatcatggagaacagcaagcgccagatggcatcgtctacccacagctcccgccagtcctacaatacaggggagaagtacaacattcatacacattatcttaaccccttgttcataaagcctttggcatagaacaaaaatcaaa

SEQ ID NO: 277606 - DNA, 699 bp, Homo sapiens
agatctaccaattaggaaattagctgtgatttagaaaatttaatatttcgatgccatactttcctaatctgcaaaatttttgtaaatacctgtgacctagtgtcgtgagcgcttagcaacacctgacacccactaagctctcagccagtggttctgaaagtggttctagaccagcaacaacagcagtagcagcagcacctgtgaacttgttagaaatgcaaagtttcaggcccattccagttctactgaatctgaaactcgaagggaacagcaacctatgttttaataaaccccaaggtgtatacccagtgacatgaatcctggatcataagacagaaacaatgtgttactacatttttgttgctggggaaaagaactgacttgatgtacttcctcagaagagagaccgaacaccaggaaagaaaatacagatttccccagactctacctgctatcaccattttgttgtaatacaccttaactcagagtaaacagaagagtccaagaacctctggttgtttgcagatggtcgccagagaaccatgatgacaaagaggatcatggagaacagcaagcgccagatggcatcgtctacccacagctcccgccagtcctacaatacaggggagaagtacaacattcatacacattatcttaaccccttgttcataaagcctttggcatagaacaaaaatcaaa

SEQ ID NO: 277607 - DNA, 626 bp, Homo sapiens
atattaagagtaatgttctttcaaacgctaatatttgcatgggaagttggaatatacagtgggaaagcttgacatattgcttttcttataaaattggaaagtattagcaatgcgtaagtgtgcatttatttgttcagaaaatttgtcagaaacctacgatgtacaaaacacaaacatggttcctaaactctgtcatgaaagaatggtatattagtaacatttgagtcataatttagaaggttttatgattatgacagtccatgaactcttaagaatattttaaaatgttctttaaaatgattgactctaatttgtaactagaagaatgcttgaaatgatttttcacccctgtctgtatttaaaggtctcagaacctcaggatctccagcgttgtccttactgatcattctttatgtgaaactctctctttttgtggtcattctggtcaccacaggatttgttttcttccagaggataaatcatgtcaggtaggaatatttattaagcggaagtaaatcatcataaaggtcttcatccttgttgtcttcacattgagtagactcaaataagagctatctggctgggaggagccaagatggccgaacaggaacagctccggtctacag

SEQ ID NO: 277608 - DNA, 470 bp, Homo sapiens
gtctactgtgacctgccatgtctcccatttgactggcaacaagagtctgtccgtaaagtttgaattcaggtctcagaacctcaggatctccagcgttgtccttactgatcattctttatgtgaaactctctctttttgtggtcattctggtcaccacaggatttgttttcttccagaggataaatcatgtcaggtaggaaaaaagttctttaaagaagaaggaagggtcttcttttgcttctcctccttgtctctggactgcaacattggtgagatgagtgatggtccagcagtgaacttgggccatggatgatgttaaggatagaagccactcagtaggatagaagaaaagaaagatggaagaaggatcctgggcttgatgaccatgaagtttccctataaaccctcaaccacctattcattgacttcttttgtgttagagtgaataaaattttgttcatgccagtgtt

SEQ ID NO: 277609 - DNA, 850 bp, Homo sapiens
gggaaacgggagggagacagaatttaaataagtaatatctcatcagatccatttgatttttaactagcgaagaaaaagtcattttccagatatggtgagggagagaattttttttaactctgcgactacttcgtaaagcccaaggtcatgatgtagcatattcacactctaaacgtgagtttcccctgcagaaaataatctacaccaacccataattattctttacgatgatccaccttttataatgtagatgtttaaaataaaaaccaaaggaatgaccaatgagagccacagtccctaggaagaactgtaaatgaagacgaatccacatggcacaggatttctcccaacatcctcaaacgggaatcatccgaaggcatcgattctacagcccaaagcctttgtccacaactcccaggggtcagagcttccttctttcgcgccaggccaaagttgctacgtgggatccgatgttgtcgccagactttcagccaaaatcagccttcaaattaacctggaccgcccaacctccgtgcctttccgttacgccgtctcaagggcaaacattccaccctaactcgccagagggtgaactgcccccagatctaactgaaaacacttgcccttctcaagcctaacgagctgggcctgcagcgcttttctgccaccactgactacgatgacatagcaaagaaaaaaatatacctatgaaatccttcgagatcttcactctcaagatccctgggaagcgcacatacaccaccacatggaagctgacgggaaaggaagagtcggtgttttagcaagaaaagagggtgccctaacggcaggagctacgctagatactggc

SEQ ID NO: 277610 - DNA, 2065 bp, Homo sapiens
  misc_feature (12)..(12): n is a, c, g, or t
  misc_feature (17)..(17): n is a, c, g, or t
  misc_feature (19)..(19): n is a, c, g, or t
  misc_feature (28)..(28): n is a, c, g, or t
atgattcctcgncattntnggccccctngatccatttgttctcaagaggtagaagaaacagtatccacagtggactccggggctcctacagacttggcacagcttcctacagtcttgaaacagccctgttgttctgtcatggccagtgggcagtttgtgaacaaactgcaagaggaagtgatctgccccatctgcctggacattctgcagaaacctgtcaccatcgactgtgggcacaatttctgcctcaaatgcatcactcagattggggaaacatcatgtggatttttcaaatgtcccctctgcaaaacttccgtaaggaagagacgcaatcaggttcaactcgctgttgcggaatctggtggagaaaatccaagctctacaagcctctgaggtgcagtccaaaaggaaagaggctacatgcccgaggcaccaggagatgttccactatttctgcgaggatgatgggaagttcctctgttttgtgtgtcgtgaatccaaggaccacaaatcccataatgtcagcttgatcgaagaagctgcccagaattatcaggggcagattcaagagcagatccaagtcttgcagcaaaaggagaaggagacagtacaagtgaaggcacaaggtgtacacagggtcgatgtcttcacggaccaggtagaacatgagaagcaaaggatcctcacagaatttgaactcctgcatcaagtcctagaggaggagaagaatttcctgctatcacggatttactggctgggtcatgagggaacggaagcggggaaacactatgttgcctccactgagccacagttgaacgatctcaagaagctcgttgattccctgaagaccaagcagaacatgccacccaggcagctgctggaggatatcaaagtcgtcttgtgcagaagtgaagagtttcagtttctcaacccaacccctgttcctctggaactggagaaaaaactcagtgaagcaaaatcaagacacgactccatcacagggagcctgaaaaaattcaaagaccaactccaggctgataggaaaaaagatgaaaacagattcttcaaaagcatgaataaaaatgacatgaagagctggggcttgttacagaaaaataatcataaaatgaacaaaacctcagagcccgggtcatcttctgcaggcggcagaactacatcggggccaccaaatcaccactcttcagccccatcccactccctgtttcgggcctcgtctgctgggaaagtcacttttccagtatgtctcctggcctcttatgatgagatttctggtcaaggagcgagctctcaggatacgaagacatttgacgttgcgctgtccgaggagctccatgcggcactgagtgagtggctgacagcgatccgggcttggttttgtgaggttccttcaagctaagccagctcagagaacacggggagcggtggtgctacacggacttcggagcatagagtggcgctgagtgagtggctgagaccgaccacggttcttgacttagtggaattgggtcgaaggagtggagaatgggagggctcgggctactgagagtggagatgggggcgggggtggtggtgaagagagttggagaaggaatggacgaattcttgagcaaaaggaggggaagagacaatctccagccacccgccccacgcttgacttcttatcactttggctgtggtgccgcctagtggaaaaaggaagtccctgcagcagtccccgcactctttaagcagctgtttaccgaaggcaccagttcagccaggagtgaaatccggagaggagcaacgccagcctgggtcacagtccatcaaaccccatgagcccgaccactctcgctcttccttacattcccacgtcccccttctctcccaacccctcatatcagcaagggaaattaattaatgagatttgataaatcagtagatagaatgaggtccccattctgaaatatttagcagactggaaccaccacgcaagcctctgtagggggtggatggagacacttctaactttaataaactgcgactgaacgtggaaaaaaaaaaa

SEQ ID NO: 277611 - DNA, 1970 bp, Homo sapiens
tctagaggatccgccaagaggtagaagaaacagtatccacagtggactccggggctcctacagacttggcacagcttcctacagtcttgaaacagccctgttgttctgtcatggccagtgggcagtttgtgaacaaactgcaagaggaagtgatctgccccatctgcctggacattctgcagaaacctgtcaccatcgactgtgggcacaatttctgcctcaaatgcatcactcagattggggaaacatcatgtggatttttcaaatgtcccctctgcaaaacttccgtaaggaagagacgcaatcaggttcaactcgctgttgcggaatctggtggagaaaatccaagctctacaagcctctgaggtgcagtccaaaaggaaagaggctacatgcccgaggcaccaggagatgttccactatttctgcgaggatgatgggaagttcctctgttttgtgtgtcgtgaatccaaggaccacaaatcccataatgtcagcttgatcgaagaagctgcccagaattatcaggggcagattcaagagcagatccaagtcttgcagcaaaaggagaaggagacagtacaagtgaaggcacaaggtgtacacagggtcgatgtcttcacggaccaggtagaacatgagaagcaaaggatcctcacagaatttgaactcctgcatcaagtcctagaggaggagaagaatttcctgctatcacggatttactggctgggtcatgagggaacggaagcggggaaacactatgttgcctccactgagccacagttgaacgatctcaagaagctcgttgattccctgaagaccaagcagaacatgccacccaggcagctgctggagaactggagaaaaaactcagtgaagcaaaatcaagacacgactccatcacagggagcctgaaaaaattcaaagaccaactccaggctgataggaaaaaagatgaaaacagattcttcaaaagcatgaataaaaatgacatgaagagctggggcttgttacagaaaaataatcataaaatgaacaaaacctcagagcccgggtcatcttctgcaggcggcagaactacatcggggccaccaaatcaccactcttcagccccatcccactccctgtttcgggcctcgtctgctgggaaagtcacttttccagtatgtctcctggcctcttatgatgagatttctggtcaaggagcgagctctcaggatacgaagacatttgacgttgcgctgtccgaggagctccatgcggcactgagtgagtggctgacagcgatccgggcttggttttgtgaggttccttcaagctaagccagctcagagaacacggggagcggtggtgctacacggacttcggagcatagagtggcgctgagtgagtggctgagaccgaccacggttcttgacttagtggaattgggtcgaaggagtggagaatgggagggctcgggctactgagagtggagatgggggcgggggtggtggtgaagagagttggagaaggaatggacgaattcttgagcaaaaggaggggaagagacaatctccagccacccgccccacgcttgacttcttatcactttggctgtggtgccgcctagtggaaaaaggaagtccctgcagcagtccccgcactctttaagcagctgtttaccgaaggcaccagttcagccaggagtgaaatccggagaggagcaacgccagcctgggtcacagtccatcaaaccccatgagcccgaccactctcgctcttccttacattcccacgtcccccttctctcccaacccctcatatcagcaagggaaattaattaatgagatttgataaatcagtagatagaatgaggtccccattctgaaatatttagcagactggaaccaccacgcaagcctctgtagggggtggatggagacacttctaactttaataaactgcgactgaacgtggaaaaaaaaaaa

SEQ ID NO: 277612 - DNA, 1236 bp, Homo sapiens
  misc_feature (1)..(1): n is a, c, g, or t
  misc_feature (3)..(5): n is a, c, g, or t
  misc_feature (180)..(180): n is a, c, g, or t
ngnnngaggtaaaaagagactgtaaaagatagcaataatttttataatacatgttgaaataacattttgagaatattgagttaaataaaatatataattaaagttaattttactagtttctttctactttttaaatgtgactactagaaaatttaaaaatatataagtggctcacattcntgactcagattacattcatcattcatactggacagtgctgggctaggcagtcaccacaggaaagcagaaagggcatctctcaagggttgcataccttcctggtccaataagaatatgagagtcaaatgcagcttctacttctcccaggcatttcaaattagtgccttgctgtgtgatagtgagttctttgctcaacccctctggactctcaccatttcatcccattctttattccccagaccaactccaggctgataggaaaaaagatgaaaacagattcttcaaaagcatgaataaaaatgacatgaagagctggggcttgttacagaaaaataatcataaaatgaacaaaacctcagagcccgggtcatcttctgcaggcggcagaactacatcggggccaccaaatcaccactcttcagccccatcccactccctgtttcgggcctcgtctgctgggaaagtcacttttccagtatgtctcctggcctcttatgatgagatttctggtcaaggagcgagctctcaggatacgaagacatttgacgttgcgctgtccgaggagctccatgcggcactgagtgagtggctgacagcgatccgggcttggttttgtgaggttccttcaagctaagccagctcagagaacacggggagcggtggtgctacacggacttcggagcatagagtggcgctgatggaaaaaggaagtccctgcagcagtccccgcactctttaagcagctgtttaccgaaggcaccagttcagccaggagtgaaatccggagaggagcaacgccagcctgggtcacagtccatcaaaccccatgagcccgaccactctcgctcttccttacattcccacgtcccccttctctcccaacccctcatatcagcaagggaaattaattaatgagatttgataaatcagtagatagaatgaggtccccattctgaaatatttagcagactggaaccaccacgcaagcctctgtagggggtggatggagacacttctaactttaataaactgcgactgaacgtggaaaaaaaaaaa

SEQ ID NO: 277613 - DNA, 827 bp, Homo sapiens
  misc_feature (1)..(1): n is a, c, g, or t
  misc_feature (3)..(5): n is a, c, g, or t
  misc_feature (180)..(180): n is a, c, g, or t
ngnnngaggtaaaaagagactgtaaaagatagcaataatttttataatacatgttgaaataacattttgagaatattgagttaaataaaatatataattaaagttaattttactagtttctttctactttttaaatgtgactactagaaaatttaaaaatatataagtggctcacattcntgactcagattacattcatcattcatactggacagtgctgggctaggcagtcaccacaggaaagcagaaagggcatctctcaagggttgcataccttcctggtccaataagaatatgagagtcaaatgcagcttctacttctcccaggcatttcaaattagtgccttgctgtgtgatagtgagttctttgctcaacccctctggactctcaccatttcatcccattctttattccccagaccaactccaggctgataggaaaaaagatgaaaacagattcttcaaaagcatgaataaaaatgacatgaagagctgtaagtgagaaatgatggttggttgcttctgccatttggggaaagtgagaaaaggggaagaattgtgtctctatgattacatgaaggccagatataagtgaatgccgattcctcagcccattgagagaacaggcatatggttgttttattattttaaactcaggtaactcacaaaacagtcactaatcccaaactttgaagtattcagaagtaatagaaaattacaaatgtatttcttcactcctagagacagggaggaaaaagtgggacaagaaggaggcagctccacctctgtagtatttgctgcccctacagggcaccaggtttcgaggc

SEQ ID NO: 277614 - DNA, 430 bp, Homo sapiens
aacgttccccaaccaccgtccgagctgccccactcttcgcccggtcactgatgcagaggctgtcaggcctctctgcgcacgaaacccatcacagcacctgggccagcagccagtgccgggctgtcctcttcccaccccaaggcggtcctcttgagtctccacaccgcctctttcggatccgtcacagtccatcaaaccccatgagcccgaccactctcgctcttccttacattcccacgtcccccttctctcccaacccctcatatcagcaagggaaattaattaatgagatttgataaatcagtagatagaatgaggtccccattctgaaatatttagcagactggaaccaccacgcaagcctctgtagggggtggatggagacacttctaactttaataaactgcgactgaacgtggaaaaaaaaaaa

SEQ ID NO: 277615 - DNA, 796 bp, Homo sapiens
  misc_feature (1)..(1): n is a, c, g, or t
  misc_feature (3)..(5): n is a, c, g, or t
  misc_feature (180)..(180): n is a, c, g, or t
ngnnngaggtaaaaagagactgtaaaagatagcaataatttttataatacatgttgaaataacattttgagaatattgagttaaataaaatatataattaaagttaattttactagtttctttctactttttaaatgtgactactagaaaatttaaaaatatataagtggctcacattcntgactcagattacattcatcattcatactggacagtgctgggctaggcagtcaccacaggaaagcagaaagggcatctctcaagggttgcataccttcctggtccaataagaatatgagagtcaaatgcagcttctacttctcccaggcatttcaaattagtgccttgctgtgtgatagtgagttctttgctcaacccctctggactctcaccatttcatcccattctttattccccagaccaactccaggctgataggaaaaaagatgaaaacagattcttcaaaagcatgaataaaaatgacatgaagagctggggcttgttacagaaaaataatcataaaatgaacaaaacctcagagcccgggtcatcttctgcaggtaagagtcctgtctctgaatactaagggacctctaagtctacaggtggtcaaaatgctgtatccacccaattccactaaatggaataaatgaataaatgaatgaattcatttattccatttcctcagttcctccccaaattacacctctgccaggaaacagagggcgctccgacttgttcaggtgtactttcttgagtttcacctccatccctcctgctgtatgtagagctcagc

SEQ ID NO: 277616 - DNA, 202 bp, Homo sapiens
gcatggtggcacagccctgtaatcccagctacttgggaggctgaggcaggagaatcgcttgaacctgggaggcggaggttgcagtgagctgagattgcaccactgctcactccactgaaatggaactgtgactcatacatgccaacaatccctgggcccttctagtgccaggcttctggctgagtactttccacgcatcagt

SEQ ID NO: 277617 - DNA, 1839 bp, Homo sapiens
  misc_feature (12)..(12): n is a, c, g, or t
  misc_feature (17)..(17): n is a, c, g, or t
  misc_feature (19)..(19): n is a, c, g, or t
  misc_feature (28)..(28): n is a, c, g, or t
atgattcctcgncattntnggccccctngatccatttgttctcaagaggtagaagaaacagtatccacagtggactccggggctcctacagacttggcacagcttcctacagtcttgaaacagccctgttgttctgtcatggccagtgggcagtttgtgaacaaactgcaagaggaagtgatctgccccatctgcctggacattctgcagaaacctgtcaccatcgactgtgggcacaatttctgcctcaaatgcatcactcagattggggaaacatcatgtggatttttcaaatgtcccctctgcaaaacttccgtaaggaagagacgcaatcaggttcaactcgctgttgcggaatctggtggagaaaatccaagctctacaagcctctgaggtgcagtccaaaaggaaagaggctacatgcccgaggcaccaggagatgttccactatttctgcgaggatgatgggaagttcctctgttttgtgtgtcgtgaatccaaggaccacaaatcccataatgtcagcttgatcgaagaagctgcccagaattatcaggggcagattcaagagcagatccaagtcttgcagcaaaaggagaaggagacagtacaagtgaaggcacaaggtgtacacagggtcgatgtcttcacggaccaggtagaacatgagaagcaaaggatcctcacagaatttgaactcctgcatcaagtcctagaggaggagaagaatttcctgctatcacggatttactggctgggtcatgagggaacggaagcggggaaacactatgttgcctccactgagccacagttgaacgatctcaagaagctcgttgattccctgaagaccaagcagaacatgccacccaggcagctgctggaggatatcaaagtcgtcttgtgcagaagtgaagagtttcagtttctcaacccaacccctgttcctctggaactggagaaaaaactcagtgaagcaaaatcaagacacgactccatcacagggagcctgaaaaaattcaaagaccaactccaggctgataggaaaaaagatgaaaacagattcttcaaaagcatgaataaaaatgacatgaagagctggggcttgttacagaaaaataatcataaaatgaacaaaacctcagagcccgggtcatcttctgcaggcggcagaactacatcggggccaccaaatcaccactcttcagccccatcccactccctgtttcgggcctcgtctgctgggaaagtcacttttccagtatgtctcctggcctcttatgatgagatttctggtcaaggagcgagctctcaggatacgaagacatttgacgttgcgctgtccgaggagctccatgcggcactgagtgagtggctgacagcgatccgggcttggttttgtgaggttccttcaagctaagccagctcagagaacacggggagcggtggtgctacacggacttcggagcatagagtggcgctgatggaaaaaggaagtccctgcagcagtccccgcactctttaagcagctgtttaccgaaggcaccagttcagccaggagtgaaatccggagaggagcaacgccagcctgggtcacagtccatcaaaccccatgagcccgaccactctcgctcttccttacattcccacgtcccccttctctcccaacccctcatatcagcaagggaaattaattaatgagatttgataaatcagtagatagaatgaggtccccattctgaaatatttagcagactggaaccaccacgcaagcctctgtagggggtggatggagacacttctaactttaataaactgcgactgaacgtggaaaaaaaaaaa

SEQ ID NO: 277618 - DNA, 1430 bp, Homo sapiens
  misc_feature (12)..(12): n is a, c, g, or t
  misc_feature (17)..(17): n is a, c, g, or t
  misc_feature (19)..(19): n is a, c, g, or t
  misc_feature (28)..(28): n is a, c, g, or t
atgattcctcgncattntnggccccctngatccatttgttctcaagaggtagaagaaacagtatccacagtggactccggggctcctacagacttggcacagcttcctacagtcttgaaacagccctgttgttctgtcatggccagtgggcagtttgtgaacaaactgcaagaggaagtgatctgccccatctgcctggacattctgcagaaacctgtcaccatcgactgtgggcacaatttctgcctcaaatgcatcactcagattggggaaacatcatgtggatttttcaaatgtcccctctgcaaaacttccgtaaggaagagacgcaatcaggttcaactcgctgttgcggaatctggtggagaaaatccaagctctacaagcctctgaggtgcagtccaaaaggaaagaggctacatgcccgaggcaccaggagatgttccactatttctgcgaggatgatgggaagttcctctgttttgtgtgtcgtgaatccaaggaccacaaatcccataatgtcagcttgatcgaagaagctgcccagaattatcaggggcagattcaagagcagatccaagtcttgcagcaaaaggagaaggagacagtacaagtgaaggcacaaggtgtacacagggtcgatgtcttcacggaccaggtagaacatgagaagcaaaggatcctcacagaatttgaactcctgcatcaagtcctagaggaggagaagaatttcctgctatcacggatttactggctgggtcatgagggaacggaagcggggaaacactatgttgcctccactgagccacagttgaacgatctcaagaagctcgttgattccctgaagaccaagcagaacatgccacccaggcagctgctggaggatatcaaagtcgtcttgtgcagaagtgaagagtttcagtttctcaacccaacccctgttcctctggaactggagaaaaaactcagtgaagcaaaatcaagacacgactccatcacagggagcctgaaaaaattcaaagaccaactccaggctgataggaaaaaagatgaaaacagattcttcaaaagcatgaataaaaatgacatgaagagctgtaagtgagaaatgatggttggttgcttctgccatttggggaaagtgagaaaaggggaagaattgtgtctctatgattacatgaaggccagatataagtgaatgccgattcctcagcccattgagagaacaggcatatggttgttttattattttaaactcaggtaactcacaaaacagtcactaatcccaaactttgaagtattcagaagtaatagaaaattacaaatgtatttcttcactcctagagacagggaggaaaaagtgggacaagaaggaggcagctccacctctgtagtatttgctgcccctacagggcaccaggtttcgaggc

SEQ ID NO: 277619 - DNA, 2053 bp, Homo sapiens
attacacattcaaagtatccatttgttctcaagaggtagcaagaaacagtatccacagtggactccggggctcctacagacttggcacagcttcctacagtcttgaaacagccctgttgttctgtcatggccagtgggcagtttgtgaacaaactgcaagaggaagtgatctgccccatctgcctggacattctgcagaaacctgtcaccatcgactgtgggcacaatttctgcctcaaatgcatcactcagattggggaaacatcatgtggatttttcaaatgtcccctctgcaaaacttccgtaaggaagagacgcaatcaggttcaactcgctgttgcggaatctggtggagaaaatccaagctctacaagcctctgaggtgcagtccaaaaggaaagaggctacatgcccgaggcaccaggagatgttccactatttctgcgaggatgatgggaagttcctctgttttgtgtgtcgtgaatccaaggaccacaaatcccataatgtcagcttgatcgaagaagctgcccagaattatcaggggcagattcaagagcagatccaagtcttgcagcaaaaggagaaggagacagtacaagtgaaggcacaaggtgtacacagggtcgatgtcttcacggaccaggtagaacatgagaagcaaaggatcctcacagaatttgaactcctgcatcaagtcctagaggaggagaagaatttcctgctatcacggatttactggctgggtcatgagggaacggaagcggggaaacactatgttgcctccactgagccacagttgaacgatctcaagaagctcgttgattccctgaagaccaagcagaacatgccacccaggcagctgctggaggatatcaaagtcgtcttgtgcagaagtgaagagtttcagtttctcaacccaacccctgttcctctggaactggagaaaaaactcagtgaagcaaaatcaagacacgactccatcacagggagcctgaaaaaattcaaagaccaactccaggctgataggaaaaaagatgaaaacagattcttcaaaagcatgaataaaaatgacatgaagagctggggcttgttacagaaaaataatcataaaatgaacaaaacctcagagcccgggtcatcttctgcaggcggcagaactacatcggggccaccaaatcaccactcttcagccccatcccactccctgtttcgggcctcgtctgctgggaaagtcacttttccagtatgtctcctggcctcttatgatgagatttctggtcaaggagcgagctctcaggatacgaagacatttgacgttgcgctgtccgaggagctccatgcggcactgagtgagtggctgacagcgatccgggcttggttttgtgaggttccttcaagctaagccagctcagagaacacggggagcggtggtgctacacggacttcggagcatagagtggcgctgagtgagtggctgagaccgaccacggttcttgacttagtggaattgggtcgaaggagtggagaatgggagggctcgggctactgagagtggagatgggggcgggggtggtggtgaagagagttggagaaggaatggacgaattcttgagcaaaaggaggggaagagacaatctccagccacccgccccacgcttgacttcttatcactttggctgtggtgccgcctagtggaaaaaggaagtccctgcagcagtccccgcactctttaagcagctgtttaccgaaggcaccagttcagccaggagtgaaatccggagaggagcaacgccagcctgggtcacagtccatcaaaccccatgagcccgaccactctcgctcttccttacattcccacgtcccccttctctcccaacccctcatatcagcaagggaaattaattaatgagatttgataaatcagtagatagaatgaggtccccattctgaaatatttagcagactggaaccaccacgcaagcctctgtagggggtggatggagacacttctaactttaataaactgcgactgaacgtggaaaaaaaaaaa

SEQ ID NO: 277620 - DNA, 2017 bp, Homo sapiens
  misc_feature (12)..(12): n is a, c, g, or t
  misc_feature (17)..(17): n is a, c, g, or t
  misc_feature (19)..(19): n is a, c, g, or t
  misc_feature (28)..(28): n is a, c, g, or t
atgattcctcgncattntnggccccctngatccatttgttctcaagaggtagaagaaacagtatccacagtggactccggggctcctacagacttggcacagcttcctacagtcttgaaacagccctgttgttctgtcatggccagtgggcagtttgtgaacaaactgcaagaggaagtgatctgccccatctgcctggacattctgcagaaacctgtcaccatcgactgtgggcacaatttctgcctcaaatgcatcactcagattggggaaacatcatgtggatttttcaaatgtcccctctgcaaaacttccgtaaggaagagacgcaatcaggttcaactcgctgttgcggaatctggtggagaaaatccaagctctacaagcctctgaggtgcagtccaaaaggaaagaggctacatgcccgaggcaccaggagatgttccactatttctgcgaggatgatgggaagttcctctgttttgtgtgtcgtgaatccaaggaccacaaatcccataatgtcagcttgatcgaagaagctgcccagaattatcaggggcagattcaagagcagatccaagtcttgcagcaaaaggagaaggagacagtacaagtgaaggcacaaggtgtacacagggtcgatgtcttcacggaccaggtagaacatgagaagcaaaggatcctcacagaatttgaactcctgcatcaagtcctagaggaggagaagaatttcctgctatcacggatttactggctgggtcatgagggaacggaagcggggaaacactatgttgcctccactgagccacagttgaacgatctcaagaagctcgttgattccctgaagaccaagcagaacatgccacccaggcagctgctggagccaacccctgttcctctggaactggagaaaaaactcagtgaagcaaaatcaagacacgactccatcacagggagcctgaaaaaattcaaagaccaactccaggctgataggaaaaaagatgaaaacagattcttcaaaagcatgaataaaaatgacatgaagagctggggcttgttacagaaaaataatcataaaatgaacaaaacctcagagcccgggtcatcttctgcaggcggcagaactacatcggggccaccaaatcaccactcttcagccccatcccactccctgtttcgggcctcgtctgctgggaaagtcacttttccagtatgtctcctggcctcttatgatgagatttctggtcaaggagcgagctctcaggatacgaagacatttgacgttgcgctgtccgaggagctccatgcggcactgagtgagtggctgacagcgatccgggcttggttttgtgaggttccttcaagctaagccagctcagagaacacggggagcggtggtgctacacggacttcggagcatagagtggcgctgagtgagtggctgagaccgaccacggttcttgacttagtggaattgggtcgaaggagtggagaatgggagggctcgggctactgagagtggagatgggggcgggggtggtggtgaagagagttggagaaggaatggacgaattcttgagcaaaaggaggggaagagacaatctccagccacccgccccacgcttgacttcttatcactttggctgtggtgccgcctagtggaaaaaggaagtccctgcagcagtccccgcactctttaagcagctgtttaccgaaggcaccagttcagccaggagtgaaatccggagaggagcaacgccagcctgggtcacagtccatcaaaccccatgagcccgaccactctcgctcttccttacattcccacgtcccccttctctcccaacccctcatatcagcaagggaaattaattaatgagatttgataaatcagtagatagaatgaggtccccattctgaaatatttagcagactggaaccaccacgcaagcctctgtagggggtggatggagacacttctaactttaataaactgcgactgaacgtggaaaaaaaaaaa

SEQ ID NO: 277621 - DNA, 1448 bp, Homo sapiens
  misc_feature (12)..(12): n is a, c, g, or t
  misc_feature (17)..(17): n is a, c, g, or t
  misc_feature (19)..(19): n is a, c, g, or t
  misc_feature (28)..(28): n is a, c, g, or t
atgattcctcgncattntnggccccctngatccatttgttctcaagaggtagaagaaacagtatccacagtggactccggggctcctacagacttggcacagcttcctacagtcttgaaacagccctgttgttctgtcatggccagtgggcagtttgtgaacaaactgcaagaggaagtgatctgccccatctgcctggacattctgcagaaacctgtcaccatcgactgtgggcacaatttctgcctcaaatgcatcactcagattggggaaacatcatgtggatttttcaaatgtcccctctgcaaaacttccgtaaggaagagacgcaatcaggttcaactcgctgttgcggaatctggtggagaaaatccaagctctacaagcctctgaggtgcagtccaaaaggaaagaggctacatgcccgaggcaccaggagatgttccactatttctgcgaggatgatgggaagttcctctgttttgtgtgtcgtgaatccaaggaccacaaatcccataatgtcagcttgatcgaagaagctgcccagaattatcaggggcagattcaagagcagatccaagtcttgcagcaaaaggagaaggagacagtacaagtgaaggcacaaggtgtacacagggtcgatgtcttcacggaccaggtagaacatgagaagcaaaggatcctcacagaatttgaactcctgcatcaagtcctagaggaggagaagaatttcctgctatcacggatttactggctgggtcatgagggaacggaagcggggaaacactatgttgcctccactgagccacagttgaacgatctcaagaagctcgttgattccctgaagaccaagcagaacatgccacccaggcagctgctggaggatatcaaagtcgtcttgtgcaggtatgatgggccaccccaaatgtattttgcctactgattcatccacatacaattctcagcgtatatccaaatgcagtcaacattcctctctcagaaatacccacccacctctaactctgcattcatacatttaggctgcagctggggaatgcctatgccaaccatattagcacgtggttggttgttaaagaaaccagctgttttctcagccttcctccttcttcagcacagattctactatttcctgaatgcccccttgctcaactgaatagctcctgggtcccctactctgtctccctgaccctgtttttttccctcctctctgtctccatctcccatcttcatttccatatctccctatgccctacctcactcctgccccatatccctagccctgactttctgactcccagctcactatcccttaaccgccaggtcttcttctttttttttttttttttgagatggagctttgctcttgttgctcaggctggagtgcagtggtgcaatctcagctcactgcaacctttgtctcccaggtt

SEQ ID NO: 277622 - DNA, 1070 bp, Homo sapiens
attacacattcaaagtatccatttgttctcaagaggtagcaagaaacagtatccacagtggactccggggctcctacagacttggcacagcttcctacagtcttgaaacagccctgttgttctgtcatggccagtgggcagtttgtgaacaaactgcaagaggaagtgatctgccccatctgcctggacattctgcagaaacctgtcaccatcgactgtgggcacaatttctgcctcaaatgcatcactcagattggggaaacatcatgtggatttttcaaatgtcccctctgcaaaacttccgtaaggaagagacgcaatcaggttcaactcgctgttgcggaatctggtggagaaaatccaagctctacaagcctctgaggtgcagtccaaaaggaaagaggctacatgcccgaggcaccaggagatgttccactatttctgcgaggatgatgggaagttcctctgttttgtgtgtcgtgaatccaaggaccacaaatcccataatgtcagcttgatcgaagaagctgcccagaattatcaggggcagattcaagagcagatccaagtcttgcagcaaaaggagaaggagacagtacaagtgaaggcacaaggtgtacacagggtcgatgtcttcacggtaagaaaaactccatcccacgatctctggaagcagaaacatctctgccaaagctcctggaatcccctattacactgacccctcagaaaaagatccagtgagccatgtcctctcctctgcgcctcagcacctgaccggccaggcggcatcacctcccgcgtcggcctcgctattacagcgggctgactgctcagtctccaccggcagacaaggtggggcacggaaaacccgcgctggtcttagaatcgcaagtacaggtttttaaggccgagctgcgccctcaacggattccccagttagaaaatgaagacattggccgggcgcggtggctcacgccagtaatcacagcactctgggaggctgaggatcgcttgagcccaggagtttgagaccagcctgggcaacatagcgagactctcctcttaattaa

SEQ ID NO: 277623 - DNA, 357 bp, Homo sapiens
ctcaaccccatatctcagatcctccttctcccacacctcatcccctgatctcaccaaccagctcaaccacatcttcctagaagtgaagagtttcagtttctcaacccaacccctgttcctctggaactggagaaaaaactcagtgaagcaaaatcaagacacgactccatcacagggagcctgaaaaaattcaaaggtaaggaagaggctgtattttctctattcacctacttccaggagattctctccctgctcactccactgaaatggaactgtgactcatacatgccaacaatccctgggcccttctagtgccaggcttctggctgagtactttccacgcatcagtatgcctcc

SEQ ID NO: 277624 - DNA, 927 bp, Homo sapiens
aacgttccccaaccaccgtccgagctgccccactcttcgcccggtcactgatgcagaggctgtcaggcctctctgcgcacgaaacccatcacagcacctgggccagcagccagtgccgggctgtcctcttcccaccccaaggcggtcctcttgagtctccacaccgcctctttcggatccctcctcatcctgaggacttcaggttgccggctcctcacttgggtcctgcgcacctcgggcttctcacagagtagccgtctccattctacggatagggaaacagaggaccagagccccgaaagtcgtacgccccaaagcccctgagagtggtctccaaatgctagtgctgtggctctggaaagattcattttatttcctgcaacaaaggcagcctcagagaactggcctccgagccttttccgtgcagacccccaatctttcaagacaccacagaccaattcagttggcaaaagccctaagaacagtacaccccaaaccaatggaataaaaaagtttgtttagttgagactgcagaactcttagctggcttacagatttctaaggcagcatttggcacctctgtttgctgtttggctcctctttcggcctctagagctgactgcagatccaatctccttgtcacatcctggtctgcaaactgagacctcacaggggcctttacaccgtagggcaactccttatgccgttgtcacactgaagctagaattctcaaagctggagcacttaggtgtctgcattttagaggtcccagcctgaatatatgcacaagcagggttttgttctgagctcagtgaagaggactgctgtgactccagctcttctgacatattagatgtgtaaaatgcaagattctcttccagccttgactggaggtgatgtggcaatgtgtgtacgcaagaaaagtcc

SEQ ID NO: 277625 - DNA, 524 bp, Homo sapiens
ctcaccaaccagctcaaccacatcttcctagaagtgaagagtttcagtttctcaacccaacccctgttcctctggaactggagaaaaaactcagtgaagcaaaatcaagacacgactccatcacagggagcctgaaaaaattcaaagaccaactccaggctgataggaaaaaagatgaaaacagattcttcaaaagcatgaataaaaatgacatgaagagctggggcttgttacagaaaaataatcataaaatgaacaaaacctcagagcccgggtcatcttctgcaggtaagagtcctgtctctgaatactaagggacctctaagtctacaggtggtcaaaatgctgtatccacccaattccactaaatggaataaatgaataaatgaatgaattcatttattccatttcctcagttcctccccaaattacacctctgccaggaaacagagggcgctccgacttgttcaggtgtactttcttgagtttcacctccatccctcctgctgtatgtagagctcagc

SEQ ID NO: 277626 - DNA, 1617 bp, Homo sapiens
ggaatggaaaggatgtgaaaatttgactcagaaggtttgggctcaagcccagtcttgtgagtttactgtacaacctgcaaggaatcactttacctctctgagcctcaggggcagattcaagagcagatccaagtcttgcagcaaaaggagaaggagacagtacaagtgaaggcacaaggtgtacacagggtcgatgtcttcacggaccaggtagaacatgagaagcaaaggatcctcacagaatttgaactcctgcatcaagtcctagaggaggagaagaatttcctgctatcacggatttactggctgggtcatgagggaacggaagcggggaaacactatgttgcctccactgagccacagttgaacgatctcaagaagctcgttgattccctgaagaccaagcagaacatgccacccaggcagctgctggaggatatcaaagtcgtcttgtgcagaagtgaagagtttcagtttctcaacccaacccctgttcctctggaactggagaaaaaactcagtgaagcaaaatcaagacacgactccatcacagggagcctgaaaaaattcaaagaccaactccaggctgataggaaaaaagatgaaaacagattcttcaaaagcatgaataaaaatgacatgaagagctggggcttgttacagaaaaataatcataaaatgaacaaaacctcagagcccgggtcatcttctgcaggcggcagaactacatcggggccaccaaatcaccactcttcagccccatcccactccctgtttcgggcctcgtctgctgggaaagtcacttttccagtatgtctcctggcctcttatgatgagatttctggtcaaggagcgagctctcaggatacgaagacatttgacgttgcgctgtccgaggagctccatgcggcactgagtgagtggctgacagcgatccgggcttggttttgtgaggttccttcaagctaagccagctcagagaacacggggagcggtggtgctacacggacttcggagcatagagtggcgctgagtgagtggctgagaccgaccacggttcttgacttagtggaattgggtcgaaggagtggagaatgggagggctcgggctactgagagtggagatgggggcgggggtggtggtgaagagagttggagaaggaatggacgaattcttgagcaaaaggaggggaagagacaatctccagccacccgccccacgcttgacttcttatcactttggctgtggtgccgcctagtggaaaaaggaagtccctgcagcagtccccgcactctttaagcagctgtttaccgaaggcaccagttcagccaggagtgaaatccggagaggagcaacgccagcctgggtcacagtccatcaaaccccatgagcccgaccactctcgctcttccttacattcccacgtcccccttctctcccaacccctcatatcagcaagggaaattaattaatgagatttgataaatcagtagatagaatgaggtccccattctgaaatatttagcagactggaaccaccacgcaagcctctgtagggggtggatggagacacttctaactttaataaactgcgactgaacgtggaaaaaaaaaaa

SEQ ID NO: 277627 - DNA, 643 bp, Homo sapiens
cagaacccaacaaactcaaaatacattacatttaccactaaaaaacagtagctatgagagagagaatttgatctcaggaagtaatcaaacagaattatcatctgggatttctgaatcatcccattttattccgtatgttcgaacaaatgagatctattaccttgatcccgatgcaccattgtctgggccttcaacccaggaccctcagtaccaaaattcacaagactgtggccaaaaacgacagctatttgattctgactgtgtcagggatccacttcttaatcctaacatggtgaaaaatagggatcgacagcaagcaatccttaagggactttcagaactgagacagggccttctccagaagcaaaaggagttggaaagtagtctcctgcctttagctgaaaatcaagaagagagttttggttcttcattttaaatgtagaaaatcaaatccttcacatttgatttgtgtcttccaaattataaaatgtgctcactggctcaactgtatttttcaaatagcctagatttacttatttttttaaatgctcattaaaaacttgtatactatgtagtaaaatgctgtacttgttctatacaataaaacagatacttcttttgtaaaagcttagtagtaaaaaaa

SEQ ID NO: 277628 - DNA, 604 bp, Homo sapiens
ttgtctgggccttcaacccaggaccctcagtaccaaaattcacaaggtaagtaaatattaagcattctaactgtaaaaattgaagacccatgtaaaccccgtcaacaactttaaattccaaattagtaattcctgcacttagttctataaagtttcttgaatatgtcttaaatttttcttagtactttcctaggatacatacttattataatgactcctgacaatattatatagcacagggctatgtcattttactaatgtaattgactgacttgttactttcatctggctttagactgtggccaaaaacgacagctatttgattctgactgtgtcagggatccacttcttaatcctaacatggtgaaaaatagggatcgacagcaagcaatccttaagggactttcagaactgagacaggtatgagctttttcaagtgtagatatgtctgttctttatgtggcgtgggcggttgggggaacctgttgaacggtttgttttaagttacttcggtgcatcccaggatttaacaaaaatatttcagttcctgtatgtttgttagacacaaataaaatgggactttcctaagacttgcttttacact

SEQ ID NO: 277629 - DNA, 479 bp, Homo sapiens
cagaacccaacaaactcaaaatacattacatttaccactaaaaaacagtagctatgagagagagaatttgatctcaggaagtaatcaaacagaattatcatctgggatttctgaatcatcccattttattccgtatgttcgaacaaatgagatctattaccttgatcccgatgcaccattgtctgggccttcaacccaggaccctcagtaccaaaattcacaagactgtggccaaaaacgacagctatttgattctgactgtgtcagggatccacttcttaatcctaacatggtgaaaaatagggatcgacagcaagcaatccttaagggactttcagaactgagacaggtatgagctttttcaagtgtagatatgtctgttctttatgtggcgtgggcggttgggggaacctgttgaacggtttgttttaagttacttcggtgcatcccaggatttaacaaaaatatttcagttcctg

SEQ ID NO: 277630 - DNA, 1368 bp, Homo sapiens
ttgaccacaatgcaggctgcatcttagacagggtctcactctgtcgcccaagctggagtgcagcagtgctatcacagctcactgcagcctcgaactcccggggtcaagcaatcctccctcagcttcccgtttctgaggttacagcccaaagtctcctcagcaacacttcctgtgagactacaggaatgaagggtgcctgtgtgatcagtcagatcaatcagcacatggaaactgagaaagacagatttaaagtccaaggagtttttgttgcaagttgtgcacatgttagatgcttcatttacaatataaccacagctggaactgaaaagaaacaaagacaatgataaaatgtgatgccctaagctacaaatttcatctgtagcagaaaaagaattgtcactaaaaactctacgacagtgtgtggaaaacttactgagtgttcagtgctatgcggtctacaagacagtcgtaaaaaacagtaaaacacactttctacgcagccattctcaggagtcatctgaaactgcgtacaccagtcctctgcctgccctccttccctccctctgccaagccctcgaggtccatcccagtctcatttccttgctggggccctcccttctcgtatcccagcctgcagcctttctctcttggaacagcagcagagtgcacgcctcaggactgactggtgctgttgcatcagctccttattctcacctccctggctgggagttctgagggcaggaactgtgtcttgtgcctggaaagcacgagttcaacagctgctcactggatgggcctgcacggggccttctctacaaatacagaaagccttgcaaggctggccgggtagcacccagatgctattaacactgctggtgatacactctcctctctttcagtgatttatgctattccatatttctgaagcaagccttactttagcaattttaaacagggaaactaattcaaatttctcaaataggggaaatgaactgaagatagtggtttcttatctagccacagatcacttggtctagcaaattttagatgcttttcctcagatatcaataataaatgtacaggaaaaaaattagtttttcaatttttgaaaactatttttcaaaaaatgaatacaaggccttacacagcatcctccacattacttttttcaactttaataccacatcataaaatgttttaaaaattcagaggtcaatatcttgactgtggcaatagatacacaaacttacaagtgtgataaaactaatgagaacacacacacacgactgcatgtgaacctggaggaatctgaatacgaccagtggattgaatggtgttgatatcctggctgtgacatggtactatcac

SEQ ID NO: 277631 - DNA, 626 bp, Homo sapiens
actgtggggctctggggaagaggaaatcacagatgaaacttcttcctggaagtaacttcacatcaatgtttaacacacaggtctgctgtcccgaccttcctgaggaggcaggaaatgcacacgggcaaagggacaagaatgaggatttcagacgcaaggaatggggatggcaaacttgtaggccaggtgccagggcagggcagccacaggccccctcaggatatagggaggaggccaatggaaggggctgccctgcaggttcaagggaggagcatgaaggcagtggtggaaggaaggtcttgccagaggggagagcagaaactgtaagggacccaggctcagagggacccatgaccaccatggctgtggtgcacaggtgagggtgagatggaggcaaggtccactgcctttgaggaaggctcaacatggacaaggtgggggcaagggagacttggctgtgaggcaggaggggcaggtaggctgtggtgccagagacgttttctacgaggtccgtatcccagggagaagcaatggtgtgggcttcagagtggcatggcaatgccccaagtagggaggtggatggaccagttggtgtcccctggggtgggctggtggcaagggtctta

SEQ ID NO: 277632 - DNA, 160 bp, Homo sapiens
tctctggaaaagtgaacgtaaaataaatgactaaaatcatgactaacctgaagctatagcgaagaacaactttacctcatggcatctcaatcttttatcagtaaagaggggtccatgataacgtgtcctacctacctcacaagacaaaataaccacgtca

SEQ ID NO: 277633 - DNA, 2063 bp, Homo sapiens
gcggccgcgcttggcgggctcagaggtcttgctcctggggaagctgagaatctccgcgcggtggactgtggccggccaaccgaaattggcgcgaaacgtcgccccccacgtgaccggcgccactgcgtgcgggccaatcggacaaggcggccttcttcacctcccgctagccgcaagccaatcaccgtgcgggcctagaatgagtgacggggaggcggtgcgggcgtcggaagggaatctccgggcggggtagtgcaggcgccgggtttcccgcggtccgagctggcgcgggcggaggagaatcgctcttaaagggccagcgcacacgcgttcttttgttccggggccgcagggcggggcaggcccgactttcgccgtcttcttgtctactctccagaacggccatgatttcccaattcttcattctgtcctccaagggggacccgctcatctacaaagacttccgcggggacagtggcggccgggatgtggccgagctcttctaccggaagctgacgggactgccaggagacgagtccccggttgtcatgcatcaccatggccgtcatttcattcacatcagacacagcggcctctatttggtggtcacaacttcagaaaacgtttctcccttcagcctcctagaactgctctccaggttggccacccttctgggcgattactgtggctccctgggcgaggggaccatctcccgcaatgtggctctggtatacgaactcctggatgaagtgctggactatggctatgtacagaccacatccacggagatgctgaggaatttcatccagacggaagctgtggtcagcaagcccttcagcctctttgacctcagcagcgttggcttgtttggggctgagacacaacagagcaaagtggcccccagcagtgcagccagccgccccgtcctgtccagtcgctctgaccagagccaaaagaatgaagtttttttggatgtggtcgagagattgtctgtactgatagcatctaatggatccctgctgaaggtggatgtgcagggagagattcggctcaagagcttccttcctagcggctctgagatgcgcattggcttgacggaagagttttgtgtggggaagtcagagctgagaggttatgggccaggaatccgggtcgatgaagtctcgtttcacagctctgtgaatctggacgaatttgagtctcatcgaatcctccgcttgcaaccacctcagggcgagctgactgtgatgcggtaccaactctccgatgacctcccctcaccgctccccttccggctcttcccctctgtgcagtgggaccgaggctcaggccggctccaggtttatctaaagttgcgatgtgacctgctctcaaagagccaagccctcaatgtcaggctgcacctccccctgcctcgaggggtggtcagcctgtctcaggagctgagcagcccagagcagaaggctgagctggcagagggagcccttcgctgggacctgcctcgggtgcaaggaggctctcaactctcaggccttttccagatggacgtcccagggcccccaggacctcccagccatgggctctccacctcggcctctcctctggggctgggccctgccagtctctccttcgagcttccccggcacacgtgctctggcctccaggtccgattcctcaggctggccttcaggccatgcggcaatgccaacccccacaagtgggtgcgacacctaagccacagcgacgcctatgtcattcggatctgaggctccccaaacgaggacacgacggccaaggtggcagtttgtcccacgggaggacagtcgtttcttttccagcctcctggccttcggactctgaatctgggcaggaagagtcctcagtcccaagaccaggagggggcaatgggcccagcctttctgtggtatctgatgcaggaaggactgcagtggatcagaacttacaaaccaaacttttattctgagaaactggctgtacaatatctaaaaagaaagtgacatgaaggaagcaatctacaacttccttccgcttagcgagcatgc

SEQ ID NO: 277634 - DNA, 339 bp, Homo sapiens
  misc_feature (320)..(320): n is a, c, g, or t
tatccacaacatgtctgtcaaggccatgaggtttcctcccaaatcgtacaacaaggacttgaagtctcgtttcacagctctgtgaatctggacgaatttgagtctcatcgaatcctccgcttgcaaccacctcagggcgagctgacttactgtacagcaggcaggagggtgggcaggcaacctccccgggcagggtcctggccagcagtgtgggagcaggaggggaaggatagttctgtgtactcctttagggagtgggggactagaactgggatgtcttggcttgtatgttttttgaagcttcgattatgatttttaancaataaaaagttctccaca

SEQ ID NO: 277635 - DNA, 1698 bp, Homo sapiens
gcggccgcgcttggcgggctcagaggtcttgctcctggggaagctgagaatctccgcgcggtggactgtggccggccaaccgaaattggcgcgaaacgtcgccccccacgtgaccggcgccactgcgtgcgggccaatcggacaaggcggccttcttcacctcccgctagccgcaagccaatcaccgtgcgggcctagaatgagtgacggggaggcggtgcgggcgtcggaagggaatctccgggcggggtagtgcaggcgccgggtttcccgcggtccgagctggcgcgggcggaggagaatcgctcttaaagggccagcgcacacgcgttcttttgttccggggccgcagggcggggcaggcccgactttcgccgtcttcttgtctactctccagaacggccatgatttcccaattcttcattctgtcctccaagggggacccgctcatctacaaagacttccgcggggacagtggcggccgggatgtggccgagctcttctaccggaagctgacgggactgccaggagacgagtccccggttgtcatgcatcaccatggccgtcatttcattcacatcagacacagcggcctctatttggtggtcacaacttcagaaaacgtttctcccttcagcctcctagaactgctctccaggttggccacccttctgggcgattactgtggctccctgggcgaggggaccatctcccgcaatgtggctctggtatacgaactcctggatgaagtgctggactatggctatgtacagaccacatccacggagatgctgaggaatttcatccagacggaagctgtggtcagcaagcccttcagcctctttgacctcagcagcgttggcttgtttggggctgagacacaacagagcaaagtggcccccagcagtgcagccagccgccccgtcctgtccagtcgctctgaccagagccaaaagaatgaagtttttttggatgtggtcgagagattgtctgtactgatagcatctaatggatccctgctgaaggtggatgtgcagggagagattcggctcaagagcttccttcctagcggctctgagatgcgcattggcttgacggaagagttttgtgtggggaagtcagagctgagaggttatgggccaggaatccgggtcgatgaagtctcgtttcacagctctgtgaatctggacgaatttgagtctcatcgaatcctccgcttgcaaccacctcagggcgagctgactgtgatgcggtaccaactctccgatgacctcccctcaccgctccccttccggctcttcccctctgtgcagtgggaccgaggctcaggccggctccaggtttatctaaagttgcgatgtgacctgctctcaaagagccaagccctcaatgtcaggctgcacctccccctgcctcgaggggtggtcagcctgtctcaggagctgagcagcccagagcagaaggctgagctggcagagggagcccttcgctgggacctgcctcgggtgcaaggaggctctcaactctcaggccttttccagaggcctaacatcgtgtcccagctcagccaagcctgcgatggagccataacgagtcgtccagggcgtcttctcgtccacccagctctgtaaggggaaggaaataaactaagatgaaggggtctgaaaggatgattgacagggacctaagtctttcata

SEQ ID NO: 277636 - DNA, 1468 bp, Homo sapiens
gcggccgcgcttggcgggctcagaggtcttgctcctggggaagctgagaatctccgcgcggtggactgtggccggccaaccgaaattggcgcgaaacgtcgccccccacgtgaccggcgccactgcgtgcgggccaatcggacaaggcggccttcttcacctcccgctagccgcaagccaatcaccgtgcgggcctagaatgagtgacggggaggcggtgcgggcgtcggaagggaatctccgggcggggtagtgcaggcgccgggtttcccgcggtccgagctggcgcgggcggaggagaatcgctcttaaagggccagcgcacacgcgttcttttgttccggggccgcagggcggggcaggcccgactttcgccgtcttcttgtctactctccagaacggccatgatttcccaattcttcattctgtcctccaagggggacccgctcatctacaaagacttccgcggggacagtggcggccgggatgtggccgagctcttctaccggaagctgacgggactgccaggagacgagtccccggttgtcatgcatcaccatggccgtcatttcattcacatcagacacagcggcctctatttggtggtcacaacttcagaaaacgtttctcccttcagcctcctagaactgctctccaggttggccacccttctgggcgattactgtggctccctgggcgaggggaccatctcccgcaatgtggctctggtatacgaactcctggatgaagtgctggactatggctatgtacagaccacatccacggagatgctgaggaatttcatccagacggaagctgtggtcagcaagcccttcagcctctttgacctcagcagcgttggcttgtttggggctgagacacaacagagcaaagtggcccccagcagtgcagccagccgccccgtcctgtccagtcgctctgaccagagccaaaagaatgaagtttttttggatgtggtcgagagattgtctgtactgatagcatctaatggatccctgctgaaggtggatgtgcagggagagattcggctcaagagcttccttcctagcggctctgagatgcgcattggcttgacggaagagttttgtgtggggaagtcagagctgagaggttatgggccaggaatccgggtcgatgaagtctcgtttcacagctctgtgaatctggacgaatttgagtctcatcgaatcctccgcttgcaaccacctcagggcgagctgactgtgatgcggtaccaactctccgatgacctcccctcaccgctccccttccggctcttcccctctgtgcagtgggaccgaggctcaggccggctccaggtttatctaaagttgcgatgtgacctgctctcaaagagccaagccctcaatgtcaggctgcacctccccctgcctcgaggggtggtcagcctgtctcaggagcggtggagcagggatcctctagatca

SEQ ID NO: 277637 - DNA, 2211 bp, Homo sapiens
gcggccgcgcttggcgggctcagaggtcttgctcctggggaagctgagaatctccgcgcggtggactgtggccggccaaccgaaattggcgcgaaacgtcgccccccacgtgaccggcgccactgcgtgcgggccaatcggacaaggcggccttcttcacctcccgctagccgcaagccaatcaccgtgcgggcctagaatgagtgacggggaggcggtgcgggcgtcggaagggaatctccgggcggggtagtgcaggcgccgggtttcccgcggtccgagctggcgcgggcggaggagaatcgctcttaaagggccagcgcacacgcgttcttttgttccggggccgcagggcggggcaggcccgactttcgccgtcttcttgtctactctccagaacggccatgatttcccaattcttcattctgtcctccaagggggacccgctcatctacaaagacttccgcggggacagtggcggccgggatgtggccgagctcttctaccggaagctgacgggactgccaggagacgagtccccggttgtcatgctgggcgtggtggcgggcgcctgtaatcccatctactcgggaagctgaggcttgagaatcgcttgaatccaagaggcagaggttgcagtgagccgagatccggacaccgcactccagcctgggagacagagcgagactccctctcgggcatcaccatggccgtcatttcattcacatcagacacagcggcctctatttggtggtcacaacttcagaaaacgtttctcccttcagcctcctagaactgctctccaggttggccacccttctgggcgattactgtggctccctgggcgaggggaccatctcccgcaatgtggctctggtatacgaactcctggatgaagtgctggactatggctatgtacagaccacatccacggagatgctgaggaatttcatccagacggaagctgtggtcagcaagcccttcagcctctttgacctcagcagcgttggcttgtttggggctgagacacaacagagcaaagtggcccccagcagtgcagccagccgccccgtcctgtccagtcgctctgaccagagccaaaagaatgaagtttttttggatgtggtcgagagattgtctgtactgatagcatctaatggatccctgctgaaggtggatgtgcagggagagattcggctcaagagcttccttcctagcggctctgagatgcgcattggcttgacggaagagttttgtgtggggaagtcagagctgagaggttatgggccaggaatccgggtcgatgaagtctcgtttcacagctctgtgaatctggacgaatttgagtctcatcgaatcctccgcttgcaaccacctcagggcgagctgactgtgatgcggtaccaactctccgatgacctcccctcaccgctccccttccggctcttcccctctgtgcagtgggaccgaggctcaggccggctccaggtttatctaaagttgcgatgtgacctgctctcaaagagccaagccctcaatgtcaggctgcacctccccctgcctcgaggggtggtcagcctgtctcaggagctgagcagcccagagcagaaggctgagctggcagagggagcccttcgctgggacctgcctcgggtgcaaggaggctctcaactctcaggccttttccagatggacgtcccagggcccccaggacctcccagccatgggctctccacctcggcctctcctctggggctgggccctgccagtctctccttcgagcttccccggcacacgtgctctggcctccaggtccgattcctcaggctggccttcaggccatgcggcaatgccaacccccacaagtgggtgcgacacctaagccacagcgacgcctatgtcattcggatctgaggctccccaaacgaggacacgacggccaaggtggcagtttgtcccacgggaggacagtcgtttcttttccagcctcctggccttcggactctgaatctgggcaggaagagtcctcagtcccaagaccaggagggggcaatgggcccagcctttctgtggtatctgatgcaggaaggactgcagtggatcagaacttacaaaccaaacttttattctgagaaactggctgtacaatatctaaaaagaaagtgacatgaaggaagcaatctacaacttccttccgcttagcgagcatgc

SEQ ID NO: 277638 - DNA, 2084 bp, Homo sapiens
gcggccgcgcttggcgggctcagaggtcttgctcctggggaagctgagaatctccgcgcggtggactgtggccggccaaccgaaattggcgcgaaacgtcgccccccacgtgaccggcgccactgcgtgcgggccaatcggacaaggcggccttcttcacctcccgctagccgcaagccaatcaccgtgcgggcctagaatgagtgacggggaggcggtgcgggcgtcggaagggaatctccgggcggggtagtgcaggcgccgggtttcccgcggtccgagctggcgcgggcggaggagaatcgctcttaaagggccagcgcacacgcgttcttttgttccggggccgcagggcggggcaggcccgactttcgccgtcttcttgtctactctccagaacggccatgatttcccaattcttcattctgtcctccaagggggacccgctcatctacaaagacttccgcggggacagtggcggccgggatgtggccgagctcttctaccggaagctgacgggactgccaggagacgagtccccggttgtcatggtaaccagtggcgggaggcggcatcaccatggccgtcatttcattcacatcagacacagcggcctctatttggtggtcacaacttcagaaaacgtttctcccttcagcctcctagaactgctctccaggttggccacccttctgggcgattactgtggctccctgggcgaggggaccatctcccgcaatgtggctctggtatacgaactcctggatgaagtgctggactatggctatgtacagaccacatccacggagatgctgaggaatttcatccagacggaagctgtggtcagcaagcccttcagcctctttgacctcagcagcgttggcttgtttggggctgagacacaacagagcaaagtggcccccagcagtgcagccagccgccccgtcctgtccagtcgctctgaccagagccaaaagaatgaagtttttttggatgtggtcgagagattgtctgtactgatagcatctaatggatccctgctgaaggtggatgtgcagggagagattcggctcaagagcttccttcctagcggctctgagatgcgcattggcttgacggaagagttttgtgtggggaagtcagagctgagaggttatgggccaggaatccgggtcgatgaagtctcgtttcacagctctgtgaatctggacgaatttgagtctcatcgaatcctccgcttgcaaccacctcagggcgagctgactgtgatgcggtaccaactctccgatgacctcccctcaccgctccccttccggctcttcccctctgtgcagtgggaccgaggctcaggccggctccaggtttatctaaagttgcgatgtgacctgctctcaaagagccaagccctcaatgtcaggctgcacctccccctgcctcgaggggtggtcagcctgtctcaggagctgagcagcccagagcagaaggctgagctggcagagggagcccttcgctgggacctgcctcgggtgcaaggaggctctcaactctcaggccttttccagatggacgtcccagggcccccaggacctcccagccatgggctctccacctcggcctctcctctggggctgggccctgccagtctctccttcgagcttccccggcacacgtgctctggcctccaggtccgattcctcaggctggccttcaggccatgcggcaatgccaacccccacaagtgggtgcgacacctaagccacagcgacgcctatgtcattcggatctgaggctccccaaacgaggacacgacggccaaggtggcagtttgtcccacgggaggacagtcgtttcttttccagcctcctggccttcggactctgaatctgggcaggaagagtcctcagtcccaagaccaggagggggcaatgggcccagcctttctgtggtatctgatgcaggaaggactgcagtggatcagaacttacaaaccaaacttttattctgagaaactggctgtacaatatctaaaaagaaagtgacatgaaggaagcaatctacaacttccttccgcttagcgagcatgc

SEQ ID NO: 277639 - DNA, 1931 bp, Homo sapiens
gcggccgcgcttggcgggctcagaggtcttgctcctggggaagctgagaatctccgcgcggtggactgtggccggccaaccgaaattggcgcgaaacgtcgccccccacgtgaccggcgccactgcgtgcgggccaatcggacaaggcggccttcttcacctcccgctagccgcaagccaatcaccgtgcgggcctagaatgagtgacggggaggcggtgcgggcgtcggaagggaatctccgggcggggtagtgcaggcgccgggtttcccgcggtccgagctggcgcgggcggaggagaatcgctcttaaagggccagcgcacacgcgttcttttgttccggggccgcagggcggggcaggcccgactttcgccgtcttcttgtctactctccagaacggccatgatttcccaattcttcattctgtcctccaagggggacccgctcatctacaaagacttccgcggggacagtggcggccgggatgtggccgagctcttctaccggaagctgacgggactgccaggagacgagtccccggttgtcatgcatcaccatggccgtcatttcattcacatcagacacagcggcctctatttggtggtcacaacttcagaaaacgactatggctatgtacagaccacatccacggagatgctgaggaatttcatccagacggaagctgtggtcagcaagcccttcagcctctttgacctcagcagcgttggcttgtttggggctgagacacaacagagcaaagtggcccccagcagtgcagccagccgccccgtcctgtccagtcgctctgaccagagccaaaagaatgaagtttttttggatgtggtcgagagattgtctgtactgatagcatctaatggatccctgctgaaggtggatgtgcagggagagattcggctcaagagcttccttcctagcggctctgagatgcgcattggcttgacggaagagttttgtgtggggaagtcagagctgagaggttatgggccaggaatccgggtcgatgaagtctcgtttcacagctctgtgaatctggacgaatttgagtctcatcgaatcctccgcttgcaaccacctcagggcgagctgactgtgatgcggtaccaactctccgatgacctcccctcaccgctccccttccggctcttcccctctgtgcagtgggaccgaggctcaggccggctccaggtttatctaaagttgcgatgtgacctgctctcaaagagccaagccctcaatgtcaggctgcacctccccctgcctcgaggggtggtcagcctgtctcaggagctgagcagcccagagcagaaggctgagctggcagagggagcccttcgctgggacctgcctcgggtgcaaggaggctctcaactctcaggccttttccagatggacgtcccagggcccccaggacctcccagccatgggctctccacctcggcctctcctctggggctgggccctgccagtctctccttcgagcttccccggcacacgtgctctggcctccaggtccgattcctcaggctggccttcaggccatgcggcaatgccaacccccacaagtgggtgcgacacctaagccacagcgacgcctatgtcattcggatctgaggctccccaaacgaggacacgacggccaaggtggcagtttgtcccacgggaggacagtcgtttcttttccagcctcctggccttcggactctgaatctgggcaggaagagtcctcagtcccaagaccaggagggggcaatgggcccagcctttctgtggtatctgatgcaggaaggactgcagtggatcagaacttacaaaccaaacttttattctgagaaactggctgtacaatatctaaaaagaaagtgacatgaaggaagcaatctacaacttccttccgcttagcgagcatgc

SEQ ID NO: 277640 - DNA, 1218 bp, Homo sapiens
gcggccgcgcttggcgggctcagaggtcttgctcctggggaagctgagaatctccgcgcggtggactgtggccggccaaccgaaattggcgcgaaacgtcgccccccacgtgaccggcgccactgcgtgcgggccaatcggacaaggcggccttcttcacctcccgctagccgcaagccaatcaccgtgcgggcctagaatgagtgacggggaggcggtgcgggcgtcggaagggaatctccgggcggggtagtgcaggcgccgggtttcccgcggtccgagctggcgcgggcggaggagaatcgctcttaaagggccagcgcacacgcgttcttttgttccggggccgcagggcggggcaggcccgactttcgccgtcttcttgtctactctccagaacggccatgatttcccaattcttcattctgtcctccaagggggacccgctcatctacaaagacttccgcggggacagtggcggccgggatgtggccgagctcttctaccggaagctgacgggactgccaggagacgagtccccggttgtcatgcatcaccatggccgtcatttcattcacatcagacacagcggcctctatttggtggtcacaacttcagaaaacgtttctcccttcagcctcctagaactgctctccaggttggccacccttctgggcgattactgtggctccctgggcgaggggaccatctcccgcaatgtggctctggtatacgaactcctggatgaagtgctggactatggctatgtacagaccacatccacggagatgctgaggaatttcatccagacggaagctgtggtcagcaagcccttcagcctctttgacctcagcagcgttggcttgtttggggctgagacacaacagagcaaagtggcccccagcagtgcagccagccgccccgtcctgtccagtcgctctgaccagagccaaaagaatgaagtttttttggatgtggtcgagagattgtctgtactgatagcatctaatggatccctgctgaaggtggatgtgcagggagagattcggctcaagagcttccttcctagcggctctgtggtatctgatgcaggaaggactgcagtggatcagaacttacaaaccaaacttttattctgagaaactggctgtacaatatctaaaaagaaagtgacatgaaggaagcaatctacaacttccttccgcttagcgagcatgc

SEQ ID NO: 277641 - DNA, 262 bp, Homo sapiens
catggccgtcatttcattcacatcagacacagcggcctctatttggtggtcacaacttcagaaaacgtttctcccttcagcctcctagaactgctctccaggtgaggagggttgggctgggcacctggtagctaggaggggtctgagaggaggagaaaatacacgctccaagtgtttcctcaggttggccacccttctgggcgattactgtggctccctgggcgaggggaccatctcccgcaatgtggctctggtatacgaa

SEQ ID NO: 277642 - DNA, 502 bp, Homo sapiens
gcggccgcgcttggcgggctcagaggtcttgctcctggggaagctgagaatctccgcgcggtggactgtggccggccaaccgaaattggcgcgaaacgtcgccccccacgtgaccggcgccactgcgtgcgggccaatcggacaaggcggccttcttcacctcccgctagccgcaagccaatcaccgtgcgggcctagaatgagtgacggggaggcggtgcgggcgtcggaagggaatctccgggcggggtagtgcaggcgccgggtttcccgcggtccgagctggcgcgggcggaggagaatcgctcttaaagggccagcgcacacgcgttcttttgttccggggccgcagggcggggcaggcccgactttcgccgtcttcttgtctactctccagaacggccatgatttcccaattcttcattctgtcctccaagggggacccgctcatctacaaagactgtatcctagacccttggggctgggaaggggcggaggggcc

SEQ ID NO: 277643 - DNA, 1740 bp, Homo sapiens
gctggtaccggtctgggatgtagggatcaggcggggcaggcccgactttcgccgtcttcttgtctactctccagaacggccatgatttcccaattcttcattctgtcctccaagggggacccgctcatctacaaagacttccgcggggacagtggcggccgggatgtggccgagctcttctaccggaagctgacgggactgccaggagacgagtccccggttgtcatgcatcaccatggccgtcatttcattcacatcagacacagcggcctctatttggtggtcacaacttcagaaaacgtttctcccttcagcctcctagaactgctctccaggttggccacccttctgggcgattactgtggctccctgggcgaggggaccatctcccgcaatgtggctctggtatacgaactcctggatgaagtgctggactatggctatgtacagaccacatccacggagatgctgaggaatttcatccagacggaagctgtggtcagcaagcccttcagcctctttgacctcagcagcgttggcttgtttggggctgagacacaacagagcaaagtggcccccagcagtgcagccagccgccccgtcctgtccagtcgctctgaccagagccaaaagaatgaagtttttttggatgtggtcgagagattgtctgtactgatagcatctaatggatccctgctgaaggtggatgtgcagggagagattcggctcaagagcttccttcctagcggctctgagatgcgcattggcttgacggaagagttttgtgtggggaagtcagagctgagaggttatgggccaggaatccgggtcgatgaagtctcgtttcacagctctgtgaatctggacgaatttgagtctcatcgaatcctccgcttgcaaccacctcagggcgagctgactgtgatgcggtaccaactctccgatgacctcccctcaccgctccccttccggctcttcccctctgtgcagtgggaccgaggctcaggccggctccaggtttatctaaagttgcgatgtgacctgctctcaaagagccaagccctcaatgtcaggctgcacctccccctgcctcgaggggtggtcagcctgtctcaggagctgagcagcccagagcagaaggctgagctggcagagggagcccttcgctgggacctgcctcgggtgcaaggaggctctcaactctcaggccttttccagatggacgtcccagggcccccaggacctcccagccatgggctctccacctcggcctctcctctggggctgggccctgccagtctctccttcgagcttccccggcacacgtgctctggcctccaggtccgattcctcaggctggccttcaggccatgcggcaatgccaacccccacaagtgggtgcgacacctaagccacagcgacgcctatgtcattcggatctgaggctccccaaacgaggacacgacggccaaggtggcagtttgtcccacgggaggacagtcgtttcttttccagcctcctggccttcggactctgaatctgggcaggaagagtcctcagtcccaagaccaggagggggcaatgggcccagcctttctgtggtatctgatgcaggaaggactgcagtggatcagaacttacaaaccaaacttttattctgagaaactggctgtacaatatctaaaaagaaagtgacatgaaggaagcaatctacaacttccttccgcttagcgagcatgc

SEQ ID NO: 277644 - DNA, 1433 bp, Homo sapiens
gcggccgcgcttggcgggctcagaggtcttgctcctggggaagctgagaatctccgcgcggtggactgtggccggccaaccgaaattggcgcgaaacgtcgccccccacgtgaccggcgccactgcgtgcgggccaatcggacaaggcggccttcttcacctcccgctagccgcaagccaatcaccgtgcgggcctagaatgagtgacggggaggcggtgcgggcgtcggaagggaatctccgggcggggtagtgcaggcgccgggtttcccgcggtccgagctggcgcgggcggaggagaatcgctcttaaagggccagcgcacacgcgttcttttgttccggggccgcagggcggggcaggcccgactttcgccgtcttcttgtctactctccagaacggccatgatttcccaattcttcattctgtcctccaagggggacccgctcatctacaaagacttccgcggggacagtggcggccgggatgtggccgagctcttctaccggaagctgacgggactgccaggagacgagtccccggttgtcatgcatcaccatggccgtcatttcattcacatcagacacagcggcctctatttggtggtcacaacttcagaaaacgtttctcccttcagcctcctagaactgctctccaggttggccacccttctgggcgattactgtggctccctgggcgaggggaccatctcccgcaatgtggctctggtatacgaactcctggatgaagtgctggactatggctatgtacagaccacatccacggagatgctgaggaatttcatccagacggaagctgtggtcagcaagcccttcagcctctttgacctcagcagcgttggcttgtttggggctgagacacaacagagcaaagtggcccccagcagtgcagccagccgccccgtcctgtccagtcgctctgaccagagccaaaagaatgaagtttttttggatgtggtcgagagattgtctgtactgatagcatctaatggatccctgctgaaggtggatgtgcagggagagattcggctcaagagcttccttcctagcggctctgagatgcgcattggcttgacggaagagttttgtgtggggaagtcagagctgagaggttatgggccaggaatccgggtcgatgaagtctcgtttcacagctctgtgaatctggacgaatttgagtctcatcgaatcctccgcttgcaaccacctcagggcgagctgactgtgatgcggtaccaactctccgatgacctcccctcaccgctccccttccggctcttcccctctgtgcagtgggaccgaggctcaggccggtgagacaatttcctgggttctagaactaccttggaacccaagccaagacctgtatgttcccaagactcactgcagagtgggggtggtggtagtggtgat

SEQ ID NO: 277645 - DNA, 2053 bp, Homo sapiens
agcggactgagtccttccacccgccagtccgcggggacagtggcggccgggatgtggccgagctcttctaccggaagctgacgggactgccaggagacgagtccccggttgtcatggtaaccagtggcgggaggcgggtgaggagcggggtcccgtcgggccgggtgggcgccagctccctcccaggactggttcattggtagattccacttggggggtgcattccgccaaataaagctaacgtgaggcccggcgcggtggctcacgcctgtaatcccagcactttgggagaccgaggcgggcggatcacctgaggtcaggagttcgaaatcagcctggccaacatggtgaaactccgcctctactaaaaatacaaaaaaaaaaaaaacttagctgggcgtggtggcgggcgcctgtaatcccatctactcgggaagctgaggcttgagaatcgcttgaatccaagaggcagaggttgcagtgagccgagatccggacaccgcactccagcctgggagacagagcgagactccctctcgggcatcaccatggccgtcatttcattcacatcagacacagcggcctctatttggtggtcacaacttcagaaaacgtttctcccttcagcctcctagaactgctctccaggttggccacccttctgggcgattactgtggctccctgggcgaggggaccatctcccgcaatgtggctctggtatacgaactcctggatgaagtgctggactatggctatgtacagaccacatccacggagatgctgaggaatttcatccagacggaagctgtggtcagcaagcccttcagcctctttgacctcagcagcgttggcttgtttggggctgagacacaacagagcaaagtggcccccagcagtgcagccagccgccccgtcctgtccagtcgctctgaccagagccaaaagaatgaagtttttttggatgtggtcgagagattgtctgtactgatagcatctaatggatccctgctgaaggtggatgtgcagggagagattcggctcaagagcttccttcctagcggctctgagatgcgcattggcttgacggaagagttttgtgtggggaagtcagagctgagaggttatgggccaggaatccgggtcgatgaagtctcgtttcacagctctgtgaatctggacgaatttgagtctcatcgaatcctccgcttgcaaccacctcagggcgagctgactgtgatgcggtaccaactctccgatgacctcccctcaccgctccccttccggctcttcccctctgtgcagtgggaccgaggctcaggccggctccaggtttatctaaagttgcgatgtgacctgctctcaaagagccaagccctcaatgtcaggctgcacctccccctgcctcgaggggtggtcagcctgtctcaggagctgagcagcccagagcagaaggctgagctggcagagggagcccttcgctgggacctgcctcgggtgcaaggaggctctcaactctcaggccttttccagatggacgtcccagggcccccaggacctcccagccatgggctctccacctcggcctctcctctggggctgggccctgccagtctctccttcgagcttccccggcacacgtgctctggcctccaggtccgattcctcaggctggccttcaggccatgcggcaatgccaacccccacaagtgggtgcgacacctaagccacagcgacgcctatgtcattcggatctgaggctccccaaacgaggacacgacggccaaggtggcagtttgtcccacgggaggacagtcgtttcttttccagcctcctggccttcggactctgaatctgggcaggaagagtcctcagtcccaagaccaggagggggcaatgggcccagcctttctgtggtatctgatgcaggaaggactgcagtggatcagaacttacaaaccaaacttttattctgagaaactggctgtacaatatctaaaaagaaagtgacatgaaggaagcaatctacaacttccttccgcttagcgagcatgc

SEQ ID NO: 277646 - DNA, 1966 bp, Homo sapiens
gcggccgcgcttggcgggctcagaggtcttgctcctggggaagctgagaatctccgcgcggtggactgtggccggccaaccgaaattggcgcgaaacgtcgccccccacgtgaccggcgccactgcgtgcgggccaatcggacaaggcggccttcttcacctcccgctagccgcaagccaatcaccgtgcgggcctagaatgagtgacggggaggcggtgcgggcgtcggaagggaatctccgggcggggtagtgcaggcgccgggtttcccgcggtccgagctggcgcgggcggaggagaatcgctcttaaagggccagcgcacacgcgttcttttgttccggggccgcagggcggggcaggcccgactttcgccgtcttcttgtctactctccagaacggccatgatttcccaattcttcattctgtcctccaagggggacccgctcatctacaaagacttccgcggggacagtggcggccgggatgtggccgagctcttctaccggaagctgacgggactgccaggagacgagtccccggttgtcatgcatcaccatggccgtcatttcattcacatcagacacagcggcctctatttggtggtcacaacttcagaaaacgtttctcccttcagcctcctagaactgctctccaggactatggctatgtacagaccacatccacggagatgctgaggaatttcatccagacggaagctgtggtcagcaagcccttcagcctctttgacctcagcagcgttggcttgtttggggctgagacacaacagagcaaagtggcccccagcagtgcagccagccgccccgtcctgtccagtcgctctgaccagagccaaaagaatgaagtttttttggatgtggtcgagagattgtctgtactgatagcatctaatggatccctgctgaaggtggatgtgcagggagagattcggctcaagagcttccttcctagcggctctgagatgcgcattggcttgacggaagagttttgtgtggggaagtcagagctgagaggttatgggccaggaatccgggtcgatgaagtctcgtttcacagctctgtgaatctggacgaatttgagtctcatcgaatcctccgcttgcaaccacctcagggcgagctgactgtgatgcggtaccaactctccgatgacctcccctcaccgctccccttccggctcttcccctctgtgcagtgggaccgaggctcaggccggctccaggtttatctaaagttgcgatgtgacctgctctcaaagagccaagccctcaatgtcaggctgcacctccccctgcctcgaggggtggtcagcctgtctcaggagctgagcagcccagagcagaaggctgagctggcagagggagcccttcgctgggacctgcctcgggtgcaaggaggctctcaactctcaggccttttccagatggacgtcccagggcccccaggacctcccagccatgggctctccacctcggcctctcctctggggctgggccctgccagtctctccttcgagcttccccggcacacgtgctctggcctccaggtccgattcctcaggctggccttcaggccatgcggcaatgccaacccccacaagtgggtgcgacacctaagccacagcgacgcctatgtcattcggatctgaggctccccaaacgaggacacgacggccaaggtggcagtttgtcccacgggaggacagtcgtttcttttccagcctcctggccttcggactctgaatctgggcaggaagagtcctcagtcccaagaccaggagggggcaatgggcccagcctttctgtggtatctgatgcaggaaggactgcagtggatcagaacttacaaaccaaacttttattctgagaaactggctgtacaatatctaaaaagaaagtgacatgaaggaagcaatctacaacttccttccgcttagcgagcatgc

SEQ ID NO: 277647 - DNA, 1481 bp, Homo sapiens
agcggactgagtccttccacccgccagtccgcggggacagtggcggccgggatgtggccgagctcttctaccggaagctgacgggactgccaggagacgagtccccggttgtcatggtaaccagtggcgggaggcgggtgaggagcggggtcccgtcgggccgggtgggcgccagctccctcccaggactggttcattggtagattccacttggggggtgcattccgccaaataaagctaacgtgaggcccggcgcggtggctcacgcctgtaatcccagcactttgggagaccgaggcgggcggatcacctgaggtcaggagttcgaaatcagcctggccaacatggtgaaactccgcctctactaaaaatacaaaaaaaaaaaaaacttagctgggcgtggtggcgggcgcctgtaatcccatctactcgggaagctgaggcttgagaatcgcttgaatccaagaggcagaggttgcagtgagccgagatccggacaccgcactccagcctgggagacagagcgagactccctctcgggcatcaccatggccgtcatttcattcacatcagacacagcggcctctatttggtggtcacaacttcagaaaacgtttctcccttcagcctcctagaactgctctccaggttggccacccttctgggcgattactgtggctccctgggcgaggggaccatctcccgcaatgtggctctggtatacgaactcctggatgaagtgctggactatggctatgtacagaccacatccacggagatgctgaggaatttcatccagacggaagctgtggtcagcaagcccttcagcctctttgacctcagcagcgttggcttgtttggggctgagacacaacagagcaaagtggcccccagcagtgcagccagccgccccgtcctgtccagtcgctctgaccagagccaaaagaatgaagtttttttggatgtggtcgagagattgtctgtactgatagcatctaatgggatccctgttgcacggtggatgtgccagggcagagatcaggtcaaagaggtttacttactaaggggtcttgaagatgcgcatatgagttagaggcacgacagttgagtggtgggagaagctcatgagctgccaaggttatggggcacgaaaaatcgggtgcacacagaaaagctggtcagttgaacaagcttctgtgaaattttgaaaacaataaaaaagtacacaataaaaaaacagtacaggaagagaaacacaaccacaagcggcgcaacctaacaacaggacagcgagaaacaaaatacacacaaagagaaccaaccacaaacaccagagcaaccaatccaggaaccagcaccccaggaaccaagaagaaaacccaaagagccagacaaaagcccaaggagaaaaaaaaagagggacaagaacacaagagcaaacaaacgcaacaagcaacaagagagaggaaagcccaccacga

SEQ ID NO: 277648 - DNA, 4564 bp, Homo sapiens
  misc_feature (4564)..(4564): n is a, c, g, or t
ctgattccataccagaggggctcaggatgctgttgctgggagctgttctactgctattagctctgcccgggcatgaccaggaaaccacgactcaagggcccggagtcctgcttcccctgcccaagggggcctgcacaggttggatggcgggcatcccagggcatccgggccataatggggccccaggccgtgatggcagagatggcacccctggtgagaagggtgagaaaggagatccaggtcttattggtcctaagggagacatcggtgaaaccggagtacccggggctgaaggtccccgaggctttccgggaatccaaggcaggaaaggagaacctggagaaggtgcctatgtataccgctcagcattcagtgtgggattggagacttacgttactatccccaacatgcccattcgctttaccaagatcttctacaatcagcaaaaccactatgatggctccactggtaaattccactgcaacattcctgggctgtactactttgcctaccacatcacagtctatatgaaggatgtgaaggtcagcctcttcaagaaggacaaggctatgctcttcacctatgatcagtaccaggaaaataatgtggaccaggcctccggctctgtgctcctgcatctggaggtgggcgaccaagtctggctccaggtgtatggggaaggagagcgtaatggactctatgctgataatgacaatgactccaccttcacaggctttcttctctaccatgacaccaactgatcaccactaactcagagcctcctccaggccaaacagccccaaagtcaattaaaggctttcagtacggttaggaagttgattattatttagttggaggcctttagatattattcattcatttactcattcatttattcattcattcatcaagtaactttaaaaaaatcatatgctatgttcccagtcctggggagcttcacaaacatgaccagataactgactagaaagaagtagttgacagtgctattttgtgcccactgtctctcctgatgctcatatcaatcctataaggcacagggaacaagcattctcctgtttttacagattgtatcctgaggctgagagagttaagtgaatgtctaaggtcacacagtattaagtgacagtgctagaaatcaaacccagagctgtggactttgttcactagactgtgcccttttatagaggtacatgttctctttggagtgttggtaggtgtctgtttcccacctcacctgagagccattgaatttgccttcctcatgaattaaaacctcccccaagcagagcttcctcagagaaagtggttctatgatgaagtcctgtcttggaaggactactactcaatggcccctgcactactctacttcctcttacctatgtcccttctcatgcctttccctccaacggggaaagccaactccatctctaagtgctgaactcatccctgttcctcaaggccacctggccaggagcttctctgatgtgatatccacttttttttttttttgagatggagtctcactctgtcacccaggctggagtacagtgacacgacctcggctcactgcagcctccttctcctgggtccaagcaattattgtgcctcagcctcccgagtagctgagacttcaggtgcattccaccacacatggctaatttttgtatttttagtagaaatggggtttcgtcatgttggccaggctggtctcgaactcctggcctaggtgatccacccgcctcgacctcccaaagtgctgggattacaggcatgagccaccatgcccagtcgatatctcactttttattttgccatggatgagagtcctgggtgtgaggaacacctcccaccaggctagaggcaactgcccaggaaggactgtgcttccgtcacctctaaatcccttgcagatccttgataaatgcctcatgaagaccaatctcttgaatcccatatctacccagaattaactccattccagtctctgcatgtaatcagttttatccacagaaacattttcattttaggaaatccctggtttaagtatcaatccttgttcagctggacaatatgaatcttttccactgaagttagggatgactgtgattttcagaacacgtccagaatttttcatcaagaaggtagcttgagcctgaaatgcaaaacccatggaggaattctgaagccattgtctccttgagtaccaacagggtcagggaagactgggcctcctgaatttattattgttctttaagaattacaggttgaggtagttgatggtggtaaacattctctcaggagacaataactccagtgatgtttttcaaagattttagcaaaaacagagtaaatagcattctctatcaatatataaatttaaaaaactatctttttgcttacagttttaaattctgaacaattctctcttatatgtgtattgctaatcattaaggtattattttttccacatataaagctttgtctttttgttgttgttgttgtttttaagatggagtttccctctgttgccaggctagagtgcagtggcatgatctcggcttactgcaacctttgcctcccaggtttaagcgattcttctgcctcagcctcccgagtagctgggaccacaggtgcctaccaccatgccaggctaatttttgtatttttagtaaagacagggtttcaccatattggccaggctggtctcgaactcctgaccttgtgatctgcccgcctccattgtgttgttatttgtgagaaagatagatatgaggtttagagagggatgaagaggtgagagtaagccttgtgttagtcagaactctgtgttgtgaatgtcattcacaacagaaaacccaaaatattatgcaaactactgtaagcaagaaaaataaaggaaaaatggaaacatttattcctttgcataatagaaattaccagagttgttctgtctttagataaggtttgaaccaaagctcaaaacaatcaagacccttttctgtatgtccttctgttctgccttccgcagtgtaggctttaccctcaggtgctacacagtatagttctagggtttccctcccgatatcaaaaagactgtggcctgcccagctctcgtatccccaagccacaccatctggctaaatggacatcatgttttctggtgatgcccaaagaggagagaggaagctctctttcccagatgccccagcaagtgtaaccttgcatctcattgctctggctgagttgtgtgcctgtttctgaccaatcactgagtcaggaggatgaaatattcatattgacttaattgcagcttaagttaggggtatgtagaggtattttccctaaagcaaaattgggacactgttatcagaaataggagagtggatgatagatgcaaaataatacctgtccacaacaaactcttaatgctgtgtttgagctttcatgagtttcccagagagacatagctggaaaattcctattgattttctctaaaatttcaacaagtagctaaagtctggctatgctcacagtctcacatctggtgggggtgggctccttacagaacacgctttcacagttaccctaaactctctggggcagggttattcctttgtggaaccagaggcacagagagagtcaactgaggccaaaagaggcctgagagaaactgaggtcaagatttcaggattaatggtcctgtgatgctttgaagtacaattgtggatttgtccaattctctttagttctgtcagcttttgcttcatatattttagcgctctattattagatatatacatgtttagtattatgtcttattggtgcatttactctcttatcattatgtaatgtccttctttatctgtgataattttctgtgttctgaagtctactttgtctaaaaataacatacgcactcaacttccttttctttcttccttcctttctttcttccttcctttctttctctctctctctttccttccttccttcctccttttctttctctctctctctctctctctttttttgacagactctcgttctgtggccctggctggagttcagtggtgtgatcttggctcactgctacctctaccatgagcaattctcctgcctcagcctcccaagtagctggaactacaggctcatgccactgcgcccagctaatttttgtatttttcgtagagacggggtttcaccacattcgtcaggttggtttcaaactcctgactttgtgatccacccgcctcggcctcccaaagtgctgggattacaggcatgagccatcacacctggtcaactttcttttgattagtgtttttgtggtatatctttttccatcatgttactttaaatatatctatattattgtatttaaaatgtgtttcttacagactgcatgtagttgggtataatttttatccagtctaaaaatatctgtcttttaattggtgtttagacaatttatatttaataaaatggtggaatttaaaactgcactgcccttaactcgagggggggcccggaacccaattcgccn

SEQ ID NO: 277649 - DNA, 4217 bp, Homo sapiens
ctgattccataccagaggggctcaggatgctgttgctgggagctgttctactgctattagctctgcccgggcatgaccaggaaaccacgactcaagggcccggagtcctgcttcccctgcccaagggggcctgcacaggttggatggcgggcatcccagggcatccgggccataatggggccccaggccgtgatggcagagatggcacccctggtgagaagggtgagaaaggagatccaggtcttattggtcctaagggagacatcggtgaaaccggagtacccggggctgaaggtccccgaggctttccgggaatccaaggcaggaaaggagaacctggagaaggtgcctatgtataccgctcagcattcagtgtgggattggagacttacgttactatccccaacatgcccattcgctttaccaagatcttctacaatcagcaaaaccactatgatggctccactggtaaattccactgcaacattcctgggctgtactactttgcctaccacatcacagtctatatgaaggatgtgaaggtcagcctcttcaagaaggacaaggctatgctcttcacctatgatcagtaccaggaaaataatgtggaccaggcctccggctctgtgctcctgcatctggaggtgggcgaccaagtctggctccaggtgtatggggaaggagagcgtaatggactctatgctgataatgacaatgactccaccttcacaggctttcttctctaccatgacaccaactgatcaccactaactcagagcctcctccaggccaaacagccccaaagtcaattaaaggctttcagtacggttaggaagttgattattatttagttggaggcctttagatattattcattcatttactcattcatttattcattcattcatcaagtaactttaaaaaaatcatatgctatgttcccagtcctggggagcttcacaaacatgaccagataactgactagaaagaagtagttgacagtgctattttgtgcccactgtctctcctgatgctcatatcaatcctataaggcacagggaacaagcattctcctgtttttacagattgtatcctgaggctgagagagttaagtgaatgtctaaggtcacacagtattaagtgacagtgctagaaatcaaacccagagctgtggactttgttcactagactgtgcccttttatagaggtacatgttctctttggagtgttggtaggtgtctgtttcccacctcacctgagagccattgaatttgccttcctcatgaattaaaacctcccccaagcagagcttcctcagagaaagtggttctatgatgaagtcctgtcttggaaggactactactcaatggcccctgcactactctacttcctcttacctatgtcccttctcatgcctttccctccaacggggaaagccaactccatctctaagtgctgaactcatccctgttcctcaaggccacctggccaggagcttctctgatgtgatatccacttttttttttttttgagatggagtctcactctgtcacccaggctggagtacagtgacacgacctcggctcactgcagcctccttctcctgggtccaagcaattattgtgcctcagcctcccgagtagctgagacttcaggtgcattccaccacacatggctaatttttgtatttttagtagaaatggggtttcgtcatgttggccaggctggtctcgaactcctggcctaggtgatccacccgcctcgacctcccaaagtgctgggattacaggcatgagccaccatgcccagtcgatatctcactttttattttgccatggatgagagtcctgggtgtgaggaacacctcccaccaggctagaggcaactgcccaggaaggactgtgcttccgtcacctctaaatcccttgcagatccttgataaatgcctcatgaagaccaatctcttgaatcccatatctacccagaattaactccattccagtctctgcatgtaatcagttttatccacagaaacattttcattttaggaaatccctggtttaagtatcaatccttgttcagctggacaatatgaatcttttccactgaagttagggatgactgtgattttcagaacacgtccagaatttttcatcaagaaggtagcttgagcctgaaatgcaaaacccatggaggaattctgaagccattgtctccttgagtaccaacagggtcagggaagactgggcctcctgaatttattattgttctttaagaattacaggttgaggtagttgatggtggtaaacattctctcaggagacaataactccagtgatgtttttcaaagattttagcaaaaacagagtaaatagcattctctatcaatatataaatttaaaaaactatctttttgcttacagttttaaattctgaacaattctctcttatatgtgtattgctaatcattaaggtattattttttccacatataaagctttgtctttttgttgttgttgttgtttttaagatggagtttccctctgttgccaggctagagtgcagtggcatgatctcggcttactgcaacctttgcctcccaggtttaagcgattcttctgcctcagcctcccgagtagctgggaccacaggtgcctaccaccatgccaggctaatttttgtatttttagtaaagacagggtttcaccatattggccaggctggtctcgaactcctgaccttgtgatctgcccgcctccattgtgttgttatttgtgagaaagatagatatgaggtttagagagggatgaagaggtgagagtaagccttgtgttagtcagaactctgtgttgtgaatgtcattcacaacagaaaacccaaaatattatgcaaactactgtaagcaagaaaaataaaggaaaaatggaaacatttattcctttgcataatagaaattaccagagttgttctgtctttagataaggtttgaaccaaagctcaaaacaatcaagacccttttctgtatgtccttctgttctgccttccgcagtgtaggctttaccctcaggtgctacacagtatagttctagggtttccctcccgatatcaaaaagactgtggcctgcccagctctcgtatccccaagccacaccatctggctaaatggacatcatgttttctggtgatgcccaaagaggagagaggaagctctctttcccagatgccccagcaagtgtaaccttgcatctcattgctctggctgagttgtgtgcctgtttctgaccaatcactgagtcaggaggatgaaatattcatattgacttaattgcagcttaagttaggggtatgtagaggtattttccctaaagcaaaattgggacactgttatcagaaataggagagtggatgatagatgcaaaataatacctgtccacaacaaactcttaatgctgtgtttgagctttcatgagtttcccagagagacatagctggaaaattcctattgattttctctaaaatttcaacaagtagctaaagtctggctatgctcacagtctcacatctggtgggggtgggctccttacagaacacgctttcacagttaccctaaactctctggggcagggttattcctttgtggaaccagaggcacagagagagtcaactgaggccaaaagaggcctgagagaaactgaggtcaagatttcaggattaatggtcctgtgatgctttgaagtacaattgtggatttgtccaattctctttagttctgtcagcttttgcttcatatattttagcgctctattattagatatatacatgtttagtattatgtcttattggtgcatttactctcttatcattatgtaatgtccttctttatctgtgataattttctgtgttctgaagtctactttgtctaaaaataacatacgcactcaacttccttttctttcttccttcctttctttcttccttcctttctttctctctctctctttccttccttccttcctccttttctttctctctctctctctctctctttttttgacagactctcgttctgtggccctggctggagttcagtggtgtgatcttggctcactgctacctctaccatgagcaattctctggaacctgggaggcggaggttgccgtgagacaagatagtgccattgtactccagcctgggcaacagagtgagactccatctc

SEQ ID NO: 277650 - DNA, 680 bp, Homo sapiens
ggtgatgttctgtgccctttgagtttaccttacttttgcagattacagagtaagccgccagcagaagcaataaagacattactgggcctttgcactgcaacatcatgcctctgaagaaaaaaaaagtgcaaacattacaatagattcagctcctttagttctcacttctgtctccacgtcaagataaaatactgacattgaaatagaatggatgacatgcttgaaatgagtcatgtgcctgaaaagtcattaacaaacaacagttccagagaaaagccaggaaaaactccccatggatttagagacagagctctcaccttcaacaggttactttttccttgtctcaggcttccttggaaaacaacctataactaactttctgggagtaaagcttcaggtggaagaacaattggatcaaacttggaaaacatgcccccagtttgtctactccattgaactttgcatgcttggagcccctggcctcagcacactcaatcgcacaagccagcctgcagcacctgtacagcaccatgggagtcccctgcagagctgcaactttgagagtgggtatagtgacgtaactcaggttcttcaagggatgaacactccaactttgaaaccactagcctgtaggtgtggacgaaaaggcagctgcatgttataaaacaatattactcata

SEQ ID NO: 277651 - DNA, 456 bp, Homo sapiens
ctcctttaaggatctttccaaaggtcttcaattttgatataagcaacaaagaataagagggctattagatcagaaatattccatgaagaagggagcaaagattcatgtcactgacaactggagaagaaacagagaaagggtactcatgatgtgtgacaaatggcatgcctcctgcaagagttatgagttatgtgcctaaacaggaaggatcatctcattgcagaattagggcatcatccagtgggaagggagtttcaaggtcatttagtccagcctccgagtgatacagaaattctctttgcagcatccctatcacgtggccatcaaacttctactagtgtattcatccacacctggtctgtctaaaaccttgagaacagccccttgtatagttcaatagccccagctgaaggaaaagtttttgttattttcagtaaacatattctgttgtgtaac

SEQ ID NO: 277652 - DNA, 1753 bp, Homo sapiens
ggtggggcctgggcgagtcacgtggggacggtgcgcgctcagtgcggctgcgccggccggtagctgcagctggagcagtggcgtttggaggagactcggatataccttctcagaagctgcacaggaggaaagcagtgacaaagaaagaagttgtcattctttgcacgaaactggatggcttctacagggagccaggcctctgatatagacgagatttttggattcttcaacgatggcgaacctcccaccaaaaagcccaggaagctgcttccaagcttaaaaactaagaagcctcgagaacttgtgctagtgattggaacaggcattagtgctgcagttgcgccccaagttccagccctcaaatcctggaaggggttaattcaggccttactggatgctgccattgattttgatcttttagaagatgaggagagcaaaaagtttcagaaatgtctccatgaagacaagaacctggtccatgttgcccatgaccttatccagaaactctctcctcgtaccagtaatgttcgatccacatttttcaaggactgtttatatgaagtatttgatgacttggagtcaaagatggaagattctggaaaacagctacttcagtcagttctccacctgatggaaaatggagccctcgtattaactacaaattttgataatctcttggaactgtatgcagcagatcaggggaaacagcttgaatcccttgaccttactgatgagaaaaaggtcctcgagtgggctcaggagaagcgtaagctgagcgtgttgcatattcacggagtctacaccaaccctagtggcattgtccttcatccggctggatatcagaacgtgctcaggaacactgaagtcatgagagaaattcagaaactctacgaaaacaagtcatttcttttcctgggctgtggctggactgtggatgacaccactttccaggcccttttcttggaggctgtcaagcataaatctgacctagaacatttcatgctggttcggagaggagacgtagatgagttcaaaaagcttcgagaaaacatgctggacaaggggattaaagtcatctcctatggagatgactatgccgatcttccagaatatttcaagcgactgacatgtgagatctccacaaggggtacatcagcagggatggtgagagaaggtcagctaaatggctcatctgcagcacacagtgaaataagaggctgtagtacatgagcgagctagagaaatcaccaccgtttagaccaagctgtaaggccctactacagacagtgtttaacaagtaaacttacaagaacccaacacaattcccagaaagtaacaatagccagaggttgaagggcggggtagaagaggggggaatgttgcagcgtaatccttcataccacctggttcttgatattctgccgcctgttcaagttcaagaataaaagcgacagcaggacccaaatgcagctcccaacccactccccaggctagacatgcttgtgtccacacagcacaccaatgtgatacttccactgaccggctgcagctctgcatgaaggactcggggtctggatgccatggaatcactgtggctcttgttgcagttttgtactctatacttggtttttcaattaagcttaatggcttttttaaaacatgacttgaagctctagttttctagatcttttacagtgtacagtattttacataactaagctgtattaaaagcttgttcatttacttgccagga

SEQ ID NO: 277653 - DNA, 1662 bp, Homo sapiens
ggtggggcctgggcgagtcacgtggggacggtgcgcgctcagtgcggctgcgccggccggtagctgcagctggagcagtggcgtttggaggagactcggatataccttctcagaagctgcacaggaggaaagcagtgacaaagaaagaagttgtcattctttgcacgaaactggatggcttctacagggagccaggcctctgatatagacgagatttttggattcttcaacgatggcgaacctcccaccaaaaagcccaggaagctgcttccaagcttaaaaactaagaagcctcgagaacttgtgctagtgattggaacaggcattagtgctgcagttgcgccccaagttccagccctcaaatcctggaaggggttaattcaggccttactggatgctgccattgattttgatcttttagaagatgaggagagcaaaaagtttcagaaatgtctccatgaagacaagaacctggtccatgttgcccatgaccttatccagaaactctctcctcgtaccagtaatgttcgatccacatttttcaaggactgtttatatgaagtatttgatgacttggagtcaaagatggaagattctggaaaacagctacttcagtcagttctccacctgatggaaaatggagccctcgtattaactacaaattttgataatctcttggaactgtatgcagcagatcaggggaaacagcttgaatcccttgaccttactgatgagaaaaaggtcctcgagtgggctcaggagaagcgtaagctgagcgtgttgcatattcacggagtctacaccaaccctagtggcattgtccttcatccggctggatatcagaacgtgctcaggaacactgaagtcatgagagaaattcagaaactctacgaaaacaagtcatttcttttcctgggctgtggctggactgtggatgacaccactttccaggcccttttcttggaggctgtcaagcataaatctgacctagaacatttcatgctggttcggagaggagacgtagatgagttcaaaaagcttcgagaaaacatgctggacaaggggattaaagtcatctcctatggagatgactatgccgatcttccagaatatttcaagcgactgacatgtgagatctccacaaggggtacatcagcagggatggtgagagaaggtcagctaaatggctcatctgcagcacacagtgaaataagaggctgtagtacatgagcgagctagagaaatcaccaccgtttagaccaagctgtaaggccctactacagacagtgtttaacaagtaaacttacaagaacccaacacaattcccagaaagtaacaatagccagaggttgaagggcggggtagaagaggggggaatgttgcagcgtaatccttcataccacctggttcttgatattctgccgcctgttcaagttcaagaataaaagcgacagcaggacccaaatgcagctcccaacccactccccaggctagacatgcttgtgtccacacagcacaccaatgtgatacttccactgaccggctgcagctctgcatgaaggactcggggtctggatgccatggaatcactgtggctcttgttgcagttttgtactctatacttggtttttcaattaagcttaatggcttttttaaaacatg

SEQ ID NO: 277654 - DNA, 1305 bp, Homo sapiens
tggtcctttgaaaattcagtagtggattgtacattttcccacatccctatcttcataaccactattttaattgacttttatattccagtaggggtgttacagtttacctaattattcctgttaggcaacgtctgatattttttttgccagttttttgtaagtcatgttgtgaaaataacatctgtatctcttcagtttttccagtaatttccttgatgagttctcactgtaatcaggtcaaagatcaggaacatttcagtaatttataaatactgctaaattgttttctacgagggtaatatcaatttgtatatttgagtaccatgcctgtttatactgtaattgaccatatttctaatgactattttcttccatgtgttcagctttttactttttctgaactattatctatgccaagtgttatccagtagaatttcctgcagtcataaaaatactgtataatcttcactgtctagtatcatagttaggagccacatgtggctggtgcaccgttgaaatgtggccagtgtgactgaggaatggaatttttaatttgaaaccaagtagctgcatatggctagtgctaccgtattttattttgtgggagtattctgctgcttttcactcttctatttgaagttgctcactcacatgccatttgcccatccctggtgagattgaatttttaccgaaacttggccctctagactgtttagggacagcagacacatgttgcctgtatgtgaaatgtaaaatgtaaaatgtaaaatgttttgtctacaagcaatcgtagtgcactgtggaaactcactgcttccctgttaggtaatgcaagtctaaagactactccagtttatcctctctgcctccttatcttctcaatgattgtttcatttctaaatgcccattccttttcagtcgtaccatatgtcctcatctccctttagttttctttttgctattaatagttttagcttttcagtctaatgtctgatgctgatgtcctctatttagcagggatggtgagagaaggtcagctaaatggctcatctgcagcacacagtgaaataagaggtatactgtttcctattctactatttatcactctgtagcagaaagtctttctaggtccttggttaagaatatagagaatgttactttggacctcacattgccaaattttaaaaaacactgtagagaatgattttcctctcctacccattaaggattctatcttttcctatcaagtctattacaatctagtgcagtgatcagttaattttttgaaaaaagttggcggccggg

SEQ ID NO: 277655 - DNA, 1921 bp, Homo sapiens
ggtggggcctgggcgagtcacgtggggacggtgcgcgctcagtgcggctgcgccggccggtagctgcagctggagcagtggcgtttggaggagactcggatataccttctcagaagctgcacaggaggaaagcagtgacaaagaaagaagttgtcattctttgcacgaaactggatggcttctacagggagccaggcctctgatatagacgagatttttggattcttcaacgatggcgaacctcccaccaaaaagcccaggaagctgcttccaagcttaaaaactaagaagcctcgagaacttgtgctagtgattggaacaggcattagtgctgcagttgcgccccaagttccagccctcaaatcctggaaggggttaattcaggccttactggatgctgccattgattttgatcttttagaagatgaggagagcaaaaagtttcagaaatgtctccatgaagacaagaacctggtccatgttgcccatgaccttatccagaaactctctcctcgtaccagtaatgttcgatccacatttttcaaggactgtttatatgaagtatttgatgacttggagtcaaagatggaagattctggaaaacagctacttcagtcagttctccacctgatggaaaatggagccctcgtattaactacaaattttgataatctcttggaactgtatgcagcagatcaggggaaacagcttgaatcccttgaccttactgatgagaaaaaggtcctcgagtgggctcaggagaagcgtaagctgagcgtgttgcatattcacggagtctacaccaaccctagtggcattgtccttcatccggctggatatcagaacgtgctcaggaacactgaagtcatgagagaaattcagaaactctacgaaaacaagtcatttcttttcctgggctgtggctggactgtggatgacaccactttccaggcccttttcttggaggctgtcaagcataaatctgacctagaacatttcatgctggttcggagaggagacgtagatgagttcaaaaagcttcgagaaaacatgctggacaaggggattaaagtcatctcctatggagatgactatgccgatcttccagaatatttcaagcgactgacatgtgagatctccacaaggggtacatcagcagggatggtgagagaaggtcagctaaatggctcatctgcagcacacagtgaaataagaggctgtagtacatgagcgagctagagaaatcaccaccgtttagaccaagctgtaaggccctactacagacagtgtttaacaagtaaacttacaagaacccaacacaattcccagaaagtaacaatagccagaggttgaagggcggggtagaagaggggggaatgttgcagcgtaatccttcataccacctggttcttgatattctgccgcctgttcaagttcaagaataaaagcgacagcaggacccaaatgcagctcccaacccactccccaggctagacatgcttgtgtccacacagcacaccaatgtgatacttccactgaccggctgcagctctgcatgaaggactcggggtctggatgccatggaatcactgtggctcttgttgcagttttgtactctatacttggtttttcaattaagcttaatggcttttttaaaacatgacttgaagctctagttttctagatcttttacagtgtacagtattttacataactaagctgtattaaaagcttgttcatttacttgccaggaccctggctctacttttagagtcattgtaagaaactctaacttgcatcaaggtactaataagcttaattttaataacccaaagtttaaaggttccgatctttctccttggggtggagtgatctcattctcaggacaaccgtttacttacctgattcctcggagcattat

SEQ ID NO: 277656 - DNA, 1700 bp, Homo sapiens
ggtggggcctgggcgagtcacgtggggacggtgcgcgctcagtgcggctgcgccggccggtagctgcagctggagcagtggcgtttggaggagactcggatataccttctcagaagctgcacaggaggaaagcagtgacaaagaaagaagttgtcattctttgcacgaaactggatggcttctacagggagccaggcctctgatatagacgagatttttggattcttcaacgatggcgaacctcccaccaaaaagcccaggaagctgcttccaagcttaaaaactaagaagcctcgagaacttgtgctagtgattggaacaggcattagtgctgcagttgcgccccaagttccagccctcaaatcctggaaggggttaattcaggccttactggatgctgccattgattttgatcttttagaagatgaggagagcaaaaagtttcagaaatgtctccatgcgtaccagtaatgttcgatccacatttttcaaggactgtttatatgaagtatttgatgacttggagtcaaagatggaagattctggaaaacagctacttcagtcagttctccacctgatggaaaatggagccctcgtattaactacaaattttgataatctcttggaactgtatgcagcagatcaggggaaacagcttgaatcccttgaccttactgatgagaaaaaggtcctcgagtgggctcaggagaagcgtaagctgagcgtgttgcatattcacggagtctacaccaaccctagtggcattgtccttcatccggctggatatcagaacgtgctcaggaacactgaagtcatgagagaaattcagaaactctacgaaaacaagtcatttcttttcctgggctgtggctggactgtggatgacaccactttccaggcccttttcttggaggctgtcaagcataaatctgacctagaacatttcatgctggttcggagaggagacgtagatgagttcaaaaagcttcgagaaaacatgctggacaaggggattaaagtcatctcctatggagatgactatgccgatcttccagaatatttcaagcgactgacatgtgagatctccacaaggggtacatcagcagggatggtgagagaaggtcagctaaatggctcatctgcagcacacagtgaaataagaggctgtagtacatgagcgagctagagaaatcaccaccgtttagaccaagctgtaaggccctactacagacagtgtttaacaagtaaacttacaagaacccaacacaattcccagaaagtaacaatagccagaggttgaagggcggggtagaagaggggggaatgttgcagcgtaatccttcataccacctggttcttgatattctgccgcctgttcaagttcaagaataaaagcgacagcaggacccaaatgcagctcccaacccactccccaggctagacatgcttgtgtccacacagcacaccaatgtgatacttccactgaccggctgcagctctgcatgaaggactcggggtctggatgccatggaatcactgtggctcttgttgcagttttgtactctatacttggtttttcaattaagcttaatggcttttttaaaacatgacttgaagctctagttttctagatcttttacagtgtacagtattttacataactaagctgtattaaaagcttgttcatttacttgccagga

SEQ ID NO: 277657 - DNA, 1745 bp, Homo sapiens
ggtggggcctgggcgagtcacgtggggacggtgcgcgctcagtgcggctgcgccggccggtagctgcagctggagcagtggcgtttggaggagactcggatataccttctcagaagctgcacaggaggaaagcagtgacaaagaaagaagttgtcattctttgcacgaaactggatggcttctacagggagccaggcctctgatatagacgagatttttggattcttcaacgatggcgaacctcccaccaaaaagcccaggaagctgcttccaagcttaaaaactaagaagcctcgagaacttgtgctagtgattggaacaggcattagtgctgcagttgcgccccaagttccagccctcaaatcctggaaggggttaattcaggccttactggatgctgccattgattttgatcttttagaagatgaggagagcaaaaagtttcagaaatgtctccatgaagacaagaacctggtccatgttgcccatgaccttatccagaaactctctcctcgtaccagtaatgttcgatccacatttttcaaggactgtttatatgaagtatttgatgacttggagtcaaagatggaagattctggaaaacagctacttcagtcagttctccacctgatggaaaatggagccctcgtattaactacaaattttgataatctcttggaactgtatgcagcagatcaggggaaacagcttgaatcccttgaccttactgatgagaaaaaggtgctcagccctgccaagctggttgggctatatgtgtgttgtgcaggtcctcgagtgggctcaggagaagcgtaagctgagcgtgttgcatattcacggagtctacaccaaccctagtggcattgtccttcatccggctggatatcagaacgtgctcaggaacactgaagtcatgagagaaattcagaaactctacgaaaacaagtcatttcttttcctgggctgtggctggactgtggatgacaccactttccaggcccttttcttggaggctgtcaagcataaatctgacctagaacatttcatgctggttcggagaggagacgtagatgagttcaaaaagcttcgagatcttccagaatatttcaagcgactgacatgtgagatctccacaaggggtacatcagcagggatggtgagagaaggtcagctaaatggctcatctgcagcacacagtgaaataagaggctgtagtacatgagcgagctagagaaatcaccaccgtttagaccaagctgtaaggccctactacagacagtgtttaacaagtaaacttacaagaacccaacacaattcccagaaagtaacaatagccagaggttgaagggcggggtagaagaggggggaatgttgcagcgtaatccttcataccacctggttcttgatattctgccgcctgttcaagttcaagaataaaagcgacagcaggacccaaatgcagctcccaacccactccccaggctagacatgcttgtgtccacacagcacaccaatgtgatacttccactgaccggctgcagctctgcatgaaggactcggggtctggatgccatggaatcactgtggctcttgttgcagttttgtactctatacttggtttttcaattaagcttaatggcttttttaaaacatgacttgaagctctagttttctagatcttttacagtgtacagtattttacataactaagctgtattaaaagcttgttcatttacttgccagga

SEQ ID NO: 277658 - DNA, 1187 bp, Homo sapiens
ccacacacaacacaccacacaaaaaacagcaccgcacaactaacggctacggacgaggccgggtgttaatcggccgaccctcgtattaactacaaattttgataatctcttggaactgtatgcagcagatcaggggaaacagcttgaatcccttgaccttactgatgagaaaaaggtcctcgagtgggctcaggagaagcgtaagctgagcgtgttgcatattcacggagtctacaccaaccctagtggcattgtccttcatccggctggatatcagaacgtgctcaggaacactgaagtcatgagagaaattcagaaactctacgaaaacaagtcatttcttttcctgggctgtggctggactgtggatgacaccactttccaggcccttttcttggaggctgtcaagcataaatctgacctagaacatttcatgctggttcggagaggagacgtagatgagttcaaaaagcttcgagaaaacatgctggacaaggggattaaagtcatctcctatggagatgactatgccgatcttccagaatatttcaagcgactgacatgtgagatctccacaaggggtacatcagcagggatggtgagagaaggtcagctaaatggctcatctgcagcacacagtgaaataagaggctgtagtacatgagcgagctagagaaatcaccaccgtttagaccaagctgtaaggccctactacagacagtgtttaacaagtaaacttacaagaacccaacacaattcccagaaagtaacaatagccagaggttgaagggcggggtagaagaggggggaatgttgcagcgtaatccttcataccacctggttcttgatattctgccgcctgttcaagttcaagaataaaagcgacagcaggacccaaatgcagctcccaacccactccccaggctagacatgcttgtgtccacacagcacaccaatgtgatacttccactgaccggctgcagctctgcatgaaggactcggggtctggatgccatggaatcactgtggctcttgttgcagttttgtactctatacttggtttttcaattaagcttaatggcttttttaaaacatgacttgaagctctagttttctagatcttttacagtgtacagtattttacataactaagctgtattaaaagcttgttcatttacttgccagga

SEQ ID NO: 277659 - DNA, 1611 bp, Homo sapiens
tggtcctttgaaaattcagtagtggattgtacattttcccacatccctatcttcataaccactattttaattgacttttatattccagtaggggtgttacagtttacctaattattcctgttaggcaacgtctgatattttttttgccagttttttgtaagtcatgttgtgaaaataacatctgtatctcttcagtttttccagtaatttccttgatgagttctcactgtaatcaggtcaaagatcaggaacatttcagtaatttataaatactgctaaattgttttctacgagggtaatatcaatttgtatatttgagtaccatgcctgtttatactgtaattgaccatatttctaatgactattttcttccatgtgttcagctttttactttttctgaactattatctatgccaagtgttatccagtagaatttcctgcagtcataaaaatactgtataatcttcactgtctagtatcatagttaggagccacatgtggctggtgcaccgttgaaatgtggccagtgtgactgaggaatggaatttttaatttgaaaccaagtagctgcatatggctagtgctaccgtattttattttgtgggagtattctgctgcttttcactcttctatttgaagttgctcactcacatgccatttgcccatccctggtgagattgaatttttaccgaaacttggccctctagactgtttagggacagcagacacatgttgcctgtatgtgaaatgtaaaatgtaaaatgtaaaatgttttgtctacaagcaatcgtagtgcactgtggaaactcactgcttccctgttaggtaatgcaagtctaaagactactccagtttatcctctctgcctccttatcttctcaatgattgtttcatttctaaatgcccattccttttcagtcgtaccatatgtcctcatctccctttagttttctttttgctattaatagttttagcttttcagtctaatgtctgatgctgatgtcctctatttagcagggatggtgagagaaggtcagctaaatggctcatctgcagcacacagtgaaataagaggctgtagtacatgagcgagctagagaaatcaccaccgtttagaccaagctgtaaggccctactacagacagtgtttaacaagtaaacttacaagaacccaacacaattcccagaaagtaacaatagccagaggttgaagggcggggtagaagaggggggaatgttgcagcgtaatccttcataccacctggttcttgatattctgccgcctgttcaagttcaagaataaaagcgacagcaggacccaaatgcagctcccaacccactccccaggctagacatgcttgtgtccacacagcacaccaatgtgatacttccactgaccggctgcagctctgcatgaaggactcggggtctggatgccatggaatcactgtggctcttgttgcagttttgtactctatacttggtttttcaattaagcttaatggcttttttaaaacatgacttgaagctctagttttctagatcttttacagtgtacagtattttacataactaagctgtattaaaagcttgttcatttacttgccagga

SEQ ID NO: 277660 - DNA, 914 bp, Homo sapiens
ctttgggaggctgaggcaggaggattgcttgagcccaggagtttgagaccagcctgagcaacatagcaagatgctgtttctacaaaaaaaatttttttaaattgctaggtctggtgctgtgtgcctatagtcccggctactggctgaggtaggaggattgcttgagcccagtgagctgattgtgccactgcatttgagcctgggtgacaaagaccttgtctctaaaaagtaaataaaattttaaataaattacaagattcctagaatctcctgtcttgccttctgaagggttaggattgacttaagtatctgcagcttccaatgtataaacctgttttgtgaaacttcattttgttctcttttctttctccctacaggctgtagtacatgagcgagctagagaaatcaccaccgtttagaccaagctgtaaggccctactacagacagtgtttaacaagtaaacttacaagaacccaacacaattcccagaaagtaacaatagccagaggttgaagggcggggtagaagaggggggaatgttgcagcgtaatccttcataccacctggttcttgatattctgccgcctgttcaagttcaagaataaaagcgacagcaggacccaaatgcagctcccaacccactccccaggctagacatgcttgtgtccacacagcacaccaatgtgatacttccactgaccggctgcagctctgcatgaaggactcggggtctggatgccatggaatcactgtggctcttgttgcagttttgtactctatacttggtttttcaattaagcttaatggcttttttaaaacatgacttgaagctctagttttctagatcttttacagtgtacagtattttacataactaagctgtattaaaagcttgttcatttacttgccagga

SEQ ID NO: 277661 - DNA, 525 bp, Homo sapiens
gtcacaccactacactctagcccaggtgaaagagtgagactccgtctcaaaaaatatataaagcataaaaaataaagaagtaaactactgcaccagtacactgacaccagctctatgaaacgctgattagagagcctacagaagaatggcaggtaaagataaaattttagaccaatcatcaagttacagcaataagcaagagatcacactccttgatgggacataccaacccacttaagtcttgcttaattggtcatcacagtctgctcaacgtagcatgaccttcttgtttcagacttgccttgagtgtgtcttcacaatgtcaatatgttgtatcttttccttccagagagaaattcagaaactctacgaaaacaagtcatttcttttcctgggctgtggctggactgtggatgacaccactttccaggcccttttcttggaggctgtcaagcataaatctgacctagaacatttcatgctggttcggagaggagacgtagatgagttcaaaaagcttcgaga

SEQ ID NO: 277662 - DNA, 2139 bp, Homo sapiens
ggtggggcctgggcgagtcacgtggggacggtgcgcgctcagtgcggctgcgccggccggtagctgcagctggagcagtggcgtttggaggagactcggatataccttctcagaagctgcacaggaggaaagcagtgacaaagaaagaagttgtcattctttgcacgaaactggatggcttctacagggagccaggcctctgatatagacgagatttttggattcttcaacgatggcgaacctcccaccaaaaagcccaggaagctgcttccaagcttaaaaactaagaagcctcgagaacttgtgctagtgattggaacaggcattagtgctgcagttgcgccccaagttccagccctcaaatcctggaaggggttaattcaggccttactggatgctgccattgattttgatcttttagaagatgaggagagcaaaaagtttcagaaatgtctccatgaagacaagaacctggtccatgttgcccatgaccttatccagaaactctctcctcgtaccagtaatgttcgatccacatttttcaaggactgtttatatgaagtatttgatgacttggagtcaaagatggaagattctggaaaacagctacttcagtcagttctccacctgatggaaaatggagccctcgtattaactacaaattttgataatctcttggaactgtatgcagcagatcaggggaaacagcttgaatcccttgaccttactgatgagaaaaaggtcctcgagtgggctcaggagaagcgtaagctgagcgtgttgcatattcacggagtctacaccaaccctagtggcattgtccttcatccggctggatatcagaacgtgctcaggaacactgaagtcatgagagaaattcagaaactctacgaaaacaagtcatttcttttcctgggctgtggctggactgtggatgacaccactttccaggcccttttcttggaggctgtcaagcataaatctgacctagaacatttcatgctggttcggagaggagacgtagatgagttcaaaaagcttcgagaaaacatgctggacaaggggattaaagtcatctcctatggagatgactatgccgatcttccagaatatttcaagcgactgacatgtgagatctccacaaggggtacatcagcagggatggtgagagaaggtcagctaaatggctcatctgcagcacacagtgaaataagaggctgtagtacatgagcgagctagagaaatcaccaccgtttagaccaagctgtaaggccctactacagacagtgtttaacaagtaaacttacaagaacccaacacaattcccagaaagtaacaatagccagaggttgaagggcggggtagaagaggggggaatgttgcagcgtaatccttcataccacctggttcttgatattctgccgcctgttcaagttcaagaataaaagcgacagcaggacccaaatgcagctcccaacccactccccaggctagacatgcttgtgtccacacagcacaccaatgtgatacttccactgaccggctgcagctctgcatgaaggactcggggtctggatgccatggaatcactgtggctcttgttgcagttttgtactctatacttggtttttcaattaagcttaatggcttttttaaaacatgacttgaagctctagttttctagatcttttacagtgtacagtattttacataactaagctgtattaaaagcttgttcatttacttgccaggaaaaaaaaaaaaaaaaaaaaaaaaaaaaaaaaaaaacaaaaaaaaaagaaaacaaaaaaaaaaaagaagggggggcgcccaaaaaaatacccccgagggggccccaaattaaccgccccccctattgtggaaaaaagggcgccccacattaggggtacctattataaaacacgcagacagtggcccgcgattttcaaacaaacgagaatggagacaaaatggcacacacgggaactattgtggggagagcgcaacccacccatacctgacgggggggaacaacacaaataggggcacaaccctcccacaacgaagatataaaagccttttgagggccaattttaacacctcaagaggtctaacagggtgaaaccacaagcgcgtagt

SEQ ID NO: 277663 - DNA, 1799 bp, Homo sapiens
ggtggggcctgggcgagtcacgtggggacggtgcgcgctcagtgcggctgcgccggccggtagctgcagctggagcagtggcgtttggaggagactcggatataccttctcagaagctgcacaggaggaaagcagtgacaaagaaagaagttgtcattctttgcacgaaactggatggcttctacagggagccaggcctctgatatagacgagatttttggattcttcaacgatggcgaacctcccaccaaaaagcccaggaagctgcttccaagcttaaaaactaagaagcctcgagaacttgtgctagtgattggaacaggcattagtgctgcagttgcgccccaagttccagccctcaaatcctggaaggggttaattcaggccttactggatgctgccattgattttgatcttttagaagatgaggagagcaaaaagtttcagaaatgtctccatgaagacaagaacctggtccatgttgcccatgaccttatccagaaactctctcctcgtaccagtaatgttcgatccacatttttcaaggactgtttatatgaagtatttgatgacttggagtcaaagatggaagattctggaaaacagctacttcagtcagttctccacctgatggaaaatggagccctcgtattaactacaaattttgataatctcttggaactgtatgcagcagatcaggggaaacagcttgaatcccttgaccttactgatgagaaaaaggtgctcagccctgccaagctggttgggctatatgtgtgttgtgcaggtcctcgagtgggctcaggagaagcgtaagctgagcgtgttgcatattcacggagtctacaccaaccctagtggcattgtccttcatccggctggatatcagaacgtgctcaggaacactgaagtcatgagagaaattcagaaactctacgaaaacaagtcatttcttttcctgggctgtggctggactgtggatgacaccactttccaggcccttttcttggaggctgtcaagcataaatctgacctagaacatttcatgctggttcggagaggagacgtagatgagttcaaaaagcttcgagaaaacatgctggacaaggggattaaagtcatctcctatggagatgactatgccgatcttccagaatatttcaagcgactgacatgtgagatctccacaaggggtacatcagcagggatggtgagagaaggtcagctaaatggctcatctgcagcacacagtgaaataagaggctgtagtacatgagcgagctagagaaatcaccaccgtttagaccaagctgtaaggccctactacagacagtgtttaacaagtaaacttacaagaacccaacacaattcccagaaagtaacaatagccagaggttgaagggcggggtagaagaggggggaatgttgcagcgtaatccttcataccacctggttcttgatattctgccgcctgttcaagttcaagaataaaagcgacagcaggacccaaatgcagctcccaacccactccccaggctagacatgcttgtgtccacacagcacaccaatgtgatacttccactgaccggctgcagctctgcatgaaggactcggggtctggatgccatggaatcactgtggctcttgttgcagttttgtactctatacttggtttttcaattaagcttaatggcttttttaaaacatgacttgaagctctagttttctagatcttttacagtgtacagtattttacataactaagctgtattaaaagcttgttcatttacttgccagga

SEQ ID NO: 277664 - DNA, 1525 bp, Homo sapiens
ggtggggcctgggcgagtcacgtggggacggtgcgcgctcagtgcggctgcgccggccggtagctgcagctggagcagtggcgtttggaggagactcggatataccttctcagaagctgcacaggaggaaagcagtgacaaagaaagaagttgtcattctttgcacgaaactggatggcttctacagggagccaggcctctgatatagacgagatttttggattcttcaacgatggcgaacctcccaccaaaaagcccaggaagctgcttccaagcttaaaaactaagaagcctcgagaacttgtgctagtgattggaacaggcattagtgctgcagttgcgccccaagttccagccctcaaatcctggaaggggttaattcaggccttactggatgctgccattgattttgatcttttagaagatgaggagagcaaaaagtttcagaaatgtctccatgaagacaagaacctggtccatgttgcccatgaccttatccagaaactctctcctgtcctcgagtgggctcaggagaagcgtaagctgagcgtgttgcatattcacggagtctacaccaaccctagtggcattgtccttcatccggctggatatcagaacgtgctcaggaacactgaagtcatgagagaaattcagaaactctacgaaaacaagtcatttcttttcctgggctgtggctggactgtggatgacaccactttccaggcccttttcttggaggctgtcaagcataaatctgacctagaacatttcatgctggttcggagaggagacgtagatgagttcaaaaagcttcgagaaaacatgctggacaaggggattaaagtcatctcctatggagatgactatgccgatcttccagaatatttcaagcgactgacatgtgagatctccacaaggggtacatcagcagggatggtgagagaaggtcagctaaatggctcatctgcagcacacagtgaaataagaggctgtagtacatgagcgagctagagaaatcaccaccgtttagaccaagctgtaaggccctactacagacagtgtttaacaagtaaacttacaagaacccaacacaattcccagaaagtaacaatagccagaggttgaagggcggggtagaagaggggggaatgttgcagcgtaatccttcataccacctggttcttgatattctgccgcctgttcaagttcaagaataaaagcgacagcaggacccaaatgcagctcccaacccactccccaggctagacatgcttgtgtccacacagcacaccaatgtgatacttccactgaccggctgcagctctgcatgaaggactcggggtctggatgccatggaatcactgtggctcttgttgcagttttgtactctatacttggtttttcaattaagcttaatggcttttttaaaacatgacttgaagctctagttttctagatcttttacagtgtacagtattttacataactaagctgtattaaaagcttgttcatttacttgccagga

SEQ ID NO: 277665 - DNA, 3109 bp, Homo sapiens
tcagaaccacatagggaatctgcatgccctgatctcaggcaaatgtatgcaaatacatatttcgggagatcaccctgaaattctgcactgaactccattttaatgtcctccttgtcatgtggtgttgagatgactagtaggtacataaggtttcatgccctctgtcagtctgttagagacaacagaggtgatggtgatcactaatgttgcctgcatcttatatgcagctcattgcatagtgaaagagcctctattaggccaggcgtggtggctcacacctataatcccagcactttgggaggccaaagcaggcagatcgcttgaggccaggagtttgagaccagctatggccaacatggcaaaaccccatctcttctaaaaatacaaaaattagccaggcagggtgatgcatgcctgtaatcccagctactccaaaggctgagacatgagaatcacttgaccctgggaggcagaggttgcagtgagccaagattgtgccactacactgctgcctgggcaacacagacactgtccaaaaaaaattgacctaaaacatgacaaagacagcatggaaaaaaaaaaaaatttttaataacaaagaacttctattaaaaatggtttctgggataagatgggtgtttcaaggagattgcacattaagatatggtatgagtgtgatctgaagttttaaaataagctgcatacatccacttattcagaatgatagctttttatttcaggtcaagagggacagcccagagtctaagaggatcatattcagctcacagctgcagttctcaaattacactgatcaggcagattctgacaaatccaacactcttggtgcctgcctgcccctacacctttaaaacccttaaagcagtaactttggagttgtcaagatttgttaatttttgaatttctccctctcaattcccttccccagtctgctccttaataaacaaccaggaagcagaaccaagcttcattcaacattgggttaggctgccataaccaaatatcacaggctaggcagcttacacaacagatgtttatttctcgcagttctgaaggctgtaaattccaagatcaaggtgctagcagcttcactgtctggtgagggctctcttcttggtttgtagatggctgccttcttcttgtgccctcgcatagtggagagagagtgtgtacacaagctctcccgtcttttcttataagggcactaatccattcctgaggacttcctcaacctcgttacctcatctaaacctaattacctcccaagggcttcatctctgaataccatcatattgtgggttagggctttaataggaaactttgggaagacaccattcagtccatagcaaacatgatgttccaggacatagatctgttccaaaacaagctagaatgttgacctgtgtgttgttgcaaggtcggaacgtccaggctttggagaaaagctggttgcatgttcagatgcataagttttctcacatagggtcctaatatagtgttgtgcttattcctgatgacagaataatcaggtagatatttagtaaagaagtttccagaaaatagaaagtgatcaggaaagtgttgactgcttttgtagaactcagttgttgttgttgttttcctactactattagttttctatcgtcagtgaaaatttggtctggattgagaaagagagatctagtcttgtgatctaggcaaaggaaaatgtatgctgtcttgtgagtctagcttaaatagcattgctagcaaggatgtctggagcaatctactttatattgctaattatgatgctttctcatgatataggtgaccatttggcaacacgtttattttcttttgcagcctgtttgcaaggtttcaccagagacaacacttccagcagcttctccgaggatgcaggaatatctctgagcacctctgtgaagttaccccttgcctcttcatctaagcctaatgaaaattgaagctttgcccaaccagccaccttctcagcagatgaggcacaactaccgcttattagccagtactgtgtctgcagaaatggccaggaacaggcagctaatttgggaactggccagacaatcagaagcacacctggacaggccagttgtccttggggaacaggccagtgcccagcgtgaggttgccagtattctttgtagaaaatcagtgcttgcaataaaccaactggctgcaactgtagaagggacaattagtgtcctacagcaatttaatgaactattagaccatcctctggatcccgggaggtcttgatcacagctggtagaggtggccactcactgttctatgtcttttaggttaacagttctttacataacagtgaagagtcctggtgcctcaggaaaagcaagatcaacctaccaaggaagagttgatggagtcataattttcctacttaacacccactgcaaatttaaatatgtgttctagggctgtttgttaattctattatggtctttactaattgtgattcccagttctgggtgaataaaaagtttttgttttaatgtaattgtgatcaacactatgcttgaagacatagacaaagctatttctaccaccatgatgtttacaaaatatctggtattttcgcctatatggccattaaaaaaactagatttgtggataacaaaccaccaagttttaattgtttttatttaataagggagaaataagatagaaaaagagaattaatactctttttcccagactgagaggcgggcttctaagtaaaggtatgtgaaaaactgagtagaggcttgtagtactaaaatgaacctccaaaatttattcttttctctgaggatttatctcagcttctctgtgtaattggatattaacacatcttaaattttttaaagagatggggtctcactgtgttgctcaggctggagtgcagtggttactcacaggtgcagtcatggcacactgtaacctcaaactactaggctcaagcaatcctcttgcctcagccccactgagtagctggggctatatgcatgtaccacccactggcatgtcttaaatacttctaagggagcaaaacacatgctctctcacctcattt

SEQ ID NO: 277666 - DNA, 2763 bp, Homo sapiens
agacgttagtgaagtgaatactcaccgacggtatcggaatgtgccatttggaccggtcggcagcagctacggttgccggtcccgcactgaaaaacgacagtggtgacgggtgagctcccagaagcagaagaatgacaggcaacacctgaagccacgcagccgccgccatcttcacagccgtggagtgcctaccgaaagcatttcaccctcttccggttcgtcccgccttcttccggctctgctctaagggcgggattatccgggtcctggaaacgtcgcggagcttgtttgctgtgcggcgtagcggcccctctctcagacagtcgtctgtgcgccgtgagactttggacctactgcgcaggcgtcatcctgttggaacctggtcagctgggttagagagatcgctacatgccagcctggcctgagtcttttctgtctcccagccgttaaaggttttaggaccaggcaggcaccccgtgcaggatttggctctctacttccgctcgccccagcccttcatcccttctaagtcaatgtcagactttggggccagaaagtctggaaaagccctaagcctggctgcccaagtggcgtctagtagtgagttctccggtttgggtggtatttaagcaaaggctggaattcggcggtggtggagtacacgcgattcctagactgggtagtgtaacaaccttcaaaggccccttctagccctgaagagtacgatgctgcagtacaatctggctggagacctagcctccagcaaagacccggccggcacttcccacccttaaccgaaaacggagacagagagggtcagttttcaaaatctgtggcgtgaccccgccactgagatagatctgcagatgcttcgtcccagtcagggaggccgtctcggcatttccaggttcttaacgctcttgatttttaccctctaggactcattgcgtacacgccctcaccgccgcccagtttcggttcctaacaaaagcacgttcctcatcagccacccataatcaagacaaatttgccaaataaatcattgtagaaacgctagtttgggcctgaaaaattccaggagcaagagtcaagatttgtcactccatgagaatctggaggggactcccttcccagaaacttgacgatgaagtactggttgtaattttagaaagacacccaatcggcttttttaaaagatcgcccagggcccttgtcctgagagctgggagctggtcggagtgacagagaagccatggaagcagcagtgaaagaggaaataagtgttgaagatgaagctgtagataaaaacattttcagagactgtaacaagatcgcattttacaggaagaaaagcgtattatgttaattctgaacaggtatctagagggaagtctacagtgaatgcctggcgtcagaaacagtggctttccaagaagtccacctatcgggcattattggattcagtcacaacagatgaagacagcaccaggttccaaatcatcaatgaagcaagtaagcctgtttgcaaggtttcaccagagacaacacttccagcagcttctccgaggatgcaggaatatctctgagcacctctgtgaagttaccccttgcctcttcatctaagcctaatgaaaattgaagctttgcccaaccagccaccttctcagcagatgaggcacaactaccgcttattagccagtactgtgtctgcagaaatggccaggaacaggcagctaatttgggaactggccagacaatcagaagcacacctggacaggccagttgtccttggggaacaggccagtgcccagcgtgaggttgccagtattctttgtagaaaatcagtgcttgcaataaaccaactggctgcaactgtagaagggacaattagtgtcctacagcaatttaatgaactattagaccatcctctggatcccgggaggtcttgatcacagctggtagaggtggccactcactgttctatgtcttttaggttaacagttctttacataacagtgaagagtcctggtgcctcaggaaaagcaagatcaacctaccaaggaagagttgatggagtcataattttcctacttaacacccactgcaaatttaaatatgtgttctagggctgtttgttaattctattatggtctttactaattgtgattcccagttctgggtgaataaaaagtttttgttttaatgtaattgtgatcaacactatgcttgaagacatagacaaagctatttctaccaccatgatgtttacaaaatatctggtattttcgcctatatggccattaaaaaaactagatttgtggataacaaaccaccaagttttaattgtttttatttaataagggagaaataagatagaaaaagagaattaatactctttttcccagactgagaggcgggcttctaagtaaaggtatgtgaaaaactgagtagaggcttgtagtactaaaatgaacctccaaaatttattcttttctctgaggatttatctcagcttctctgtgtaattggatattaacacatcttaaattttttaaagagatggggtctcactgtgttgctcaggctggagtgcagtggttactcacaggtgcagtcatggcacactgtaacctcaaactactaggctcaagcaatcctcttgcctcagccccactgagtagctggggctatatgcatgtaccacccactggcatgtcttaaatacttctaagggagcaaaacacatgctctctcacctcattt

SEQ ID NO: 277667 - DNA, 2193 bp, Homo sapiens
agacgttagtgaagtgaatactcaccgacggtatcggaatgtgccatttggaccggtcggcagcagctacggttgccggtcccgcactgaaaaacgacagtggtgacgggtgagctcccagaagcagaagaatgacaggcaacacctgaagccacgcagccgccgccatcttcacagccgtggagtgcctaccgaaagcatttcaccctcttccggactcattgcgtacacgccctcaccgccgcccagtttcggttcctaacaaaagcacgttcctcatcagccacccataatcaagacaaatttgccaaataaatcattgtagaaacgctagtttgggcctgaaaaattccaggagcaagagtcaagatttgtcactccatgagaatctggaggggactcccttcccagaaacttgacgatgaagtactggttgtaattttagaaagacacccaatcggcttttttaaaagatcgcccagggcccttgtcctgagagctgggagctggtcggagtgacagagaagccatggaagcagcagtgaaagaggaaataagtgttgaagatgaagctgtagataaaaacattttcagagactgtaacaagatcgcattttacaggcgtcagaaacagtggctttccaagaagtccacctatcgggcattattggattcagtcacaacagatgaagacagcaccaggttccaaatcatcaatgaagcaagtaaggtcaggtgccaggaccagagcccaacaactctggatgccttcaaaggcaaagaaaccacagtccaggaggagacacaggatctcagcacaagacagcacctggctcaaaaggaagctgaggagcctgataaacaaggacaaattacctgggacatcagcaacgtagctcccaagactgagaactttgaggacctcttggaacaaactccatgctcagcctgtttgcaaggtttcaccagagacaacacttccagcagcttctccgaggatgcaggaatatctctgagcacctctgtgaagttaccccttgcctcttcatctaagcctaatgaaaattgaagctttgcccaaccagccaccttctcagcagatgaggcacaactaccgcttattagccagtactgtgtctgcagaaatggccaggaacaggcagctaatttgggaactggccagacaatcagaagcacacctggacaggccagttgtccttggggaacaggccagtgcccagcgtgaggttgccagtattctttgtagaaaatcagtgcttgcaataaaccaactggctgcaactgtagaagggacaattagtgtcctacagcaatttaatgaactattagaccatcctctggatcccgggaggtcttgatcacagctggtagaggtggccactcactgttctatgtcttttaggttaacagttctttacataacagtgaagagtcctggtgcctcaggaaaagcaagatcaacctaccaaggaagagttgatggagtcataattttcctacttaacacccactgcaaatttaaatatgtgttctagggctgtttgttaattctattatggtctttactaattgtgattcccagttctgggtgaataaaaagtttttgttttaatgtaattgtgatcaacactatgcttgaagacatagacaaagctatttctaccaccatgatgtttacaaaatatctggtattttcgcctatatggccattaaaaaaactagatttgtggataacaaaccaccaagttttaattgtttttatttaataagggagaaataagatagaaaaagagaattaatactctttttcccagactgagaggcgggcttctaagtaaaggtatgtgaaaaactgagtagaggcttgtagtactaaaatgaacctccaaaatttattcttttctctgaggatttatctcagcttctctgtgtaattggatattaacacatcttaaattttttaaagagatggggtctcactgtgttgctcaggctggagtgcagtggttactcacaggtgcagtcatggcacactgtaacctcaaactactaggctcaagcaatcctcttgcctcagccccactgagtagctggggctatatgcatgtaccacccactggcatgtcttaaatacttctaagggagcaaaacacatgctctctcacctcattt

SEQ ID NO: 277668 - DNA, 200 bp, Homo sapiens
agctgctaaagaaaatgaggaggagacatcagtggacacctctcaggtaatctagattgatccatttattgttatctttttcaccatcatcatcatgatagggcatataaggaattctctttcttccttctacagaagggtgcttgttaaatgatcgactgcatataaataggaccacttgtttcttcggctcaccttgt

SEQ ID NO: 277669 - DNA, 233 bp, Homo sapiens
tgtttgtgccctgaaattcactgaatatcatagtgaattttaatgacttccacatgataatatagtcttttggatactgacaatcacaaataattatcaagcatctgcatactccgtatctataggcgtcagaaacagtggctttccaagaagtccacctatcgggcattattggattcagtcacaacagatgaagacagcaccaggttccaaatcatcaatgaagcaagtaa

SEQ ID NO: 277670 - DNA, 317 bp, Homo sapiens
agtgtcctacagcaatttaatgaactattagaccatcctctggatcccgggaggtcttgatcacagctggtagaggtggccactcactgttctatgtcttttaggttaacagttctttacataacagtgaagagtcctggtgcctcaggaaaagcaagatcaacctaccaaggaagagttgatggagtcataattttcctacttaacacccactgcaaatttaaatatgtgttctagggctgtttgttaattctattatggtctttactaattgtgattcccagttctgggtgaataaaaagtttttgttttaatgt

SEQ ID NO: 277671 - DNA, 2360 bp, Homo sapiens
agacgttagtgaagtgaatactcaccgacggtatcggaatgtgccatttggaccggtcggcagcagctacggttgccggtcccgcactgaaaaacgacagtggtgacgggtgagctcccagaagcagaagaatgacaggcaacacctgaagccacgcagccgccgccatcttcacagccgtggagtgcctaccgaaagcatttcaccctcttccggttcgtcccgccttcttccggctctgctctaagggcgggattatccgggtcctggaaacgtcgcggagcttgtttgctgtgcggcgtagcggcccctctctcagacagtcgtctgtgcgccgtgagactttggacctactgcgcaggcgtcatcctgttggaacctggactcattgcgtacacgccctcaccgccgcccagtttcggttcctaacaaaagcacgttcctcatcagccacccataatcaagacaaatttgccaaataaatcattgtagaaacgctagtttgggcctgaaaaattccaggagcaagagtcaagatttgtcactccatgagaatctggaggggactcccttcccagaaacttgacgatgaagtactggttgtaattttagaaagacacccaatcggcttttttaaaagatcgcccagggcccttgtcctgagagctgggagctggtcggagtgacagagaagccatggaagcagcagtgaaagaggaaataagtgttgaagatgaagctgtagataaaaacattttcagagactgtaacaagatcgcattttacaggcgtcagaaacagtggctttccaagaagtccacctatcgggcattattggattcagtcacaacagatgaagacagcaccaggttccaaatcatcaatgaagcaagtaaggtcaggtgccaggaccagagcccaacaactctggatgccttcaaaggcaaagaaaccacagtccaggaggagacacaggatctcagcacaagacagcacctggctcaaaaggaagctgaggagcctgataaacaaggacaaattacctgggacatcagcaacgtagctcccaagactgagaactttgaggacctcttggaacaaactccatgctcagcctgtttgcaaggtttcaccagagacaacacttccagcagcttctccgaggatgcaggaatatctctgagcacctctgtgaagttaccccttgcctcttcatctaagcctaatgaaaattgaagctttgcccaaccagccaccttctcagcagatgaggcacaactaccgcttattagccagtactgtgtctgcagaaatggccaggaacaggcagctaatttgggaactggccagacaatcagaagcacacctggacaggccagttgtccttggggaacaggccagtgcccagcgtgaggttgccagtattctttgtagaaaatcagtgcttgcaataaaccaactggctgcaactgtagaagggacaattagtgtcctacagcaatttaatgaactattagaccatcctctggatcccgggaggtcttgatcacagctggtagaggtggccactcactgttctatgtcttttaggttaacagttctttacataacagtgaagagtcctggtgcctcaggaaaagcaagatcaacctaccaaggaagagttgatggagtcataattttcctacttaacacccactgcaaatttaaatatgtgttctagggctgtttgttaattctattatggtctttactaattgtgattcccagttctgggtgaataaaaagtttttgttttaatgtaattgtgatcaacactatgcttgaagacatagacaaagctatttctaccaccatgatgtttacaaaatatctggtattttcgcctatatggccattaaaaaaactagatttgtggataacaaaccaccaagttttaattgtttttatttaataagggagaaataagatagaaaaagagaattaatactctttttcccagactgagaggcgggcttctaagtaaaggtatgtgaaaaactgagtagaggcttgtagtactaaaatgaacctccaaaatttattcttttctctgaggatttatctcagcttctctgtgtaattggatattaacacatcttaaattttttaaagagatggggtctcactgtgttgctcaggctggagtgcagtggttactcacaggtgcagtcatggcacactgtaacctcaaactactaggctcaagcaatcctcttgcctcagccccactgagtagctggggctatatgcatgtaccacccactggcatgtcttaaatacttctaagggagcaaaacacatgctctctcacctcattt

SEQ ID NO: 277672 - DNA, 2916 bp, Homo sapiens
agacgttagtgaagtgaatactcaccgacggtatcggaatgtgccatttggaccggtcggcagcagctacggttgccggtcccgcactgaaaaacgacagtggtgacgggtgagctcccagaagcagaagaatgacaggcaacacctgaagccacgcagccgccgccatcttcacagccgtggagtgcctaccgaaagcatttcaccctcttccggttcgtcccgccttcttccggctctgctctaagggcgggattatccgggtcctggaaacgtcgcggagcttgtttgctgtgcggcgtagcggcccctctctcagacagtcgtctgtgcgccgtgagactttggacctactgcgcaggcgtcatcctgttggaacctggtcagctgggttagagagatcgctacatgccagcctggcctgagtcttttctgtctcccagccgttaaaggttttaggaccaggcaggcaccccgtgcaggatttggctctctacttccgctcgccccagcccttcatcccttctaagtcaatgtcagactttggggccagaaagtctggaaaagccctaagcctggctgcccaagtggcgtctagtagtgagttctccggtttgggtggtatttaagcaaaggctggaattcggcggtggtggagtacacgcgattcctagactgggtagtgtaacaaccttcaaaggccccttctagccctgaagagtacgatgctgcagtacaatctggctggagacctagcctccagcaaagacccggccggcacttcccacccttaaccgaaaacggagacagagagggtcagttttcaaaatctgtggcgtgaccccgccactgagatagatctgcagatgcttcgtcccagtcagggaggccgtctcggcatttccaggttcttaacgctcttgatttttaccctctaggactcattgcgtacacgccctcaccgccgcccagtttcggttcctaacaaaagcacgttcctcatcagccacccataatcaagacaaatttgccaaataaatcattgtagaaacgctagtttgggcctgaaaaattccaggagcaagagtcaagatttgtcactccatgagaatctggaggggactcccttcccagaaacttgacgatgaagtactggttgtaattttagaaagacacccaatcggcttttttaaaagatcgcccagggcccttgtcctgagagctgggagctggtcggagtgacagagaagccatggaagcagcagtgaaagaggaaataagtgttgaagatgaagctgtagataaaaacattttcagagactgtaacaagatcgcattttacaggcgtcagaaacagtggctttccaagaagtccacctatcgggcattattggattcagtcacaacagatgaagacagcaccaggttccaaatcatcaatgaagcaagtaaggtcaggtgccaggaccagagcccaacaactctggatgccttcaaaggcaaagaaaccacagtccaggaggagacacaggatctcagcacaagacagcacctggctcaaaaggaagctgaggagcctgataaacaaggacaaattacctgggacatcagcaacgtagctcccaagactgagaactttgaggacctcttggaacaaactccatgctcagcctgtttgcaaggtttcaccagagacaacacttccagcagcttctccgaggatgcaggaatatctctgagcacctctgtgaagttaccccttgcctcttcatctaagcctaatgaaaattgaagctttgcccaaccagccaccttctcagcagatgaggcacaactaccgcttattagccagtactgtgtctgcagaaatggccaggaacaggcagctaatttgggaactggccagacaatcagaagcacacctggacaggccagttgtccttggggaacaggccagtgcccagcgtgaggttgccagtattctttgtagaaaatcagtgcttgcaataaaccaactggctgcaactgtagaagggacaattagtgtcctacagcaatttaatgaactattagaccatcctctggatcccgggaggtcttgatcacagctggtagaggtggccactcactgttctatgtcttttaggttaacagttctttacataacagtgaagagtcctggtgcctcaggaaaagcaagatcaacctaccaaggaagagttgatggagtcataattttcctacttaacacccactgcaaatttaaatatgtgttctagggctgtttgttaattctattatggtctttactaattgtgattcccagttctgggtgaataaaaagtttttgttttaatgtaattgtgatcaacactatgcttgaagacatagacaaagctatttctaccaccatgatgtttacaaaatatctggtattttcgcctatatggccattaaaaaaactagatttgtggataacaaaccaccaagttttaattgtttttatttaataagggagaaataagatagaaaaagagaattaatactctttttcccagactgagaggcgggcttctaagtaaaggtatgtgaaaaactgagtagaggcttgtagtactaaaatgaacctccaaaatttattcttttctctgaggatttatctcagcttctctgtgtaattggatattaacacatcttaaattttttaaagagatggggtctcactgtgttgctcaggctggagtgcagtggttactcacaggtgcagtcatggcacactgtaacctcaaactactaggctcaagcaatcctcttgcctcagccccactgagtagctggggctatatgcatgtaccacccactggcatgtcttaaatacttctaagggagcaaaacacatgctctctcacctcattt

SEQ ID NO: 277673 - DNA, 1216 bp, Homo sapiens
agacgttagtgaagtgaatactcaccgacggtatcggaatgtgccatttggaccggtcggcagcagctacggttgccggtcccgcactgaaaaacgacagtggtgacgggtgagctcccagaagcagaagaatgacaggcaacacctgaagccacgcagccgccgccatcttcacagccgtggagtgcctaccgaaagcatttcaccctcttccggactcattgcgtacacgccctcaccgccgcccagtttcggttcctaacaaaagcacgttcctcatcagccacccataatcaagacaaatttgccaaataaatcattgtagaaacgctagtttgggcctgaaaaattccaggagcaagagtcaagatttgtcactccatgagaatctggaggggactcccttcccagaaacttgacgatgaagtactggttgtaattttagaaagacacccaatcggcttttttaaaagatcgcccagggcccttgtcctgagagctgggagctggtcggagtgacagagaagccatggaagcagcagtgaaagaggaaataagtgttgaagatgaagctgtagataaaaacattttcagagactgtaacaagatcgcattttacaggcgtcagaaacagtggctttccaagaagtccacctatcgggcattattggattcagtcacaacagatgaagacagcaccaggttccaaatcatcaatgaagcaagtaaggttcctctcctggctgaaatttatggtatagaaggaaacattttcaggcttaaaattaatgaagagactcctctaaaacccagatttgaagttccggatgtcctcacaagcaagccaagcactgtaaggctgatttcatgctctggggacacaggcagtctgatattggcagatggaaaaggagacctgaagtgccatatcacagcaaacccattcaaggtagacttggtgtctgaagaagaggttgtgattagcataaattccctgggccaattatactttgagcatctacagattcttcacaaacaaagagctgctaaagaaaatgaggaggagacatcagtggacacctctcaggaaaatcaagaagatctgggcctgtgggaagagaaatttggaaaatttgtggatatcaaagctaatggcccttcttctattggtttggatttctccttgcatggatttgagcatctttatgggatccca

SEQ ID NO: 277674 - DNA, 404 bp, Homo sapiens
aagctacactcatgttcattcattcaacaaatatgtattgagtacttccatgtgccagacactgttccagatggtgaggaaacatcaatgggcaaaagtgcgtgccttcgtggagattacactctagtgaggggagacagaccataaacatgacacgatcttcggaagaacggatgatcctggaagtaatccgggcacacttacatttgttgtcaacaagaacaatcctttcatcttcttgggcttgaaagagatggagtttcaccatgttgcccaggctggtcttaaactcctgacctcaagtgatccacctgcctcgagcctcccaaagtgctgggattacagagccaccgcacctgaccttgataagtattgcaaggaataaacaaaggaaattttgtatc

SEQ ID NO: 277675 - DNA, 2321 bp, Homo sapiens
cccctgccggccgaggaccccgcccctgccggccgaggaccccgcccctgccggccgaggaccccgcccctgccggtggctgcggtagctgctgcgcgctgaggcgcctgctcagtgtgggacgcggagagcgaggggcggcggcggcgcccgctggcgctcaagcatggcggcggcggcattgggcagctcctcaggctcggcgtccccggccgtggctgagctctgccagaacaccccggagacctttttggaggcctccaagctgctgctcacctatgctgacaacatcctcagaaaccctaatgatgaaaaatatagatccatccggattggaaacacagccttttctactagactcttgcctgtcagaggagctgttgaatgtttatttgaaatgggctttgaagagggagaaacacatctcatctttcctaaaaaagcttcagtggagcagctgcaaaaaattcgtgacctgattgccatagagagaagtagcagactggatggctcaaataagagccacaaagtaaagtcatctcagcaacctgcagccagtacccagcttcctacaacaccatcttcaaatcccagtgggttaaaccagcacacaaggaaccgtcaagggcagtcatcagatccaccatctgcttcaacggttgctgctgactcagccattctagaagttcttcagtccaacattcagcatgtgctggtctatgaaaatcctgctcttcaggagaaagcgttggcttgtattccggtccaagaactaaaaaggaaatcacaagaaaagttatcgagagctagaaaattggataaaggtatcaatataagtgatgaggattttcttttgctggagcttttgcactggtttaaggaagaattttttcactgggtgaataacgttttgtgcagcaaatgtggtggacagactaggtctagagatagatcattactgcccagtgatgatgagctgaagtggggtgcaaaggaagtggaagatcattactgtgatgcctgccagttcagcaatcgattcccaagatataataaccctgagaaacttttggaaacaagatgtggacggtgtggcgagtgggccaattgttttacactgtgctgccgagctgtagggtttgaagctcgctatgtttgggattacacagaccatgtctggacagaagtctattctccttctcagcagcggtggctgcactgtgatgcatgtgaagatgtctgtgacaagccactcctttatgaaataggatggggcaagaagctttcctatgtcatagcattttcaaaagatgaggtagttgatgtcacttggcgatattcctgcaaacatgaagaggtgattgccagaagaactaaggttaaagaagcattacttcgagacactattaatgggcttaataagcagaggcaactgtttttgtcagaaaacagaaggaaagaacttctccagaggataattgtggagcttgttgaatttatatctcccaaaacccctaaacctggagaacttgggggaagaatatctgggtcagtggcttggagagtagcccgaggtgaaatgggtctacagagaaaagaaaccttgtttattccctgtgaaaatgagaagatttctaaacagctccacctttgttacaatattgtgaaagatcgttatgttcgagtttcaaataacaatcaaaccatttctggatgggagaatggcgtgtggaaaatggaatctatattcagaaaagttgaaacagactggcacatggtatatttggcccgaaaggaaggatcatcttttgcttatatttcctggaagtttgagtgtgggtcagttggcctaaaagtagatagcatttctattagaacaagtagtcaaacttttcagactggaacagtagaatggaaattgcgatctgatacagcacaagtagaactgacaggcgataacagtcttcactcctatgctgatttttctggtgccactgaagttattttggaagcagaattaagcagaggagatggtgatgtcgcttggcaacacacccagctgtttagacaaagcttaaatgaccatgaagaaaattgtttggagataattataaaattcagtgacctttgagaacctgaacattatagaaaagctggcaataatcaaggacttactgaagtagtctgttggttcagtgcatgcttagttggcagttaccaccctgtgctagcatatttcttttgctagctatccatcatgtaaccctcatgaaaattatctttatacgtggactataataaaatattgaattaaaaccttt

SEQ ID NO: 277676 - DNA, 1864 bp, Homo sapiens
atactaaaattggaacgatacagagaagattagcatggcccctgcgcaaggatgacacgcaaattcgtgaagcgttccatatttttgatccatccggattggaaacacagccttttctactagactcttgcctgtcagaggagctgttgaatgtttatttgaaatgggctttgaagagggagaaacacatctcatctttcctaaaaaagcttcagtggagcagctgcaaaaaattcgtgacctgattgccatagagagaagtagcagactggatggctcaaataagagccacaaagtaaagtcatctcagcaacctgcagccagtacccagcttcctacaacaccatcttcaaatcccagtgggttaaaccagcacacaaggaaccgtcaagggcagtcatcagatccaccatctgcttcaacggttgctgctgactcagccattctagaagttcttcagtccaacattcagcatgtgctggtctatgaaaatcctgctcttcaggagaaagcgttggcttgtattccggtccaagaactaaaaaggaaatcacaagaaaagttatcgagagctagaaaattggataaagatataataaccctgagaaacttttggaaacaagatgtggacggtgtggcgagtgggccaattgttttacactgtgctgccgagctgtagggtttgaagctcgctatgtttgggattacacagaccatgtctggacagaagtctattctccttctcagcagcggtggctgcactgtgatgcatgtgaagatgtctgtgacaagccactcctttatgaaataggatggggcaagaagctttcctatgtcatagcattttcaaaagatgaggtagttgatgtcacttggcgatattcctgcaaacatgaagaggtgattgccagaagaactaaggttaaagaagcattacttcgagacactattaatgggcttaataagcagaggcaactgtttttgtcagaaaacagaaggaaagaacttctccagaggataattgtggagcttgttgaatttatatctcccaaaacccctaaacctggagaacttgggggaagaatatctgggtcagtggcttggagagtagcccgaggtgaaatgggtctacagagaaaagaaaccttgtttattccctgtgaaaatgagaagatttctaaacagctccacctttgttacaatattgtgaaagatcgttatgttcgagtttcaaataacaatcaaaccatttctggatgggagaatggcgtgtggaaaatggaatctatattcagaaaagttgaaacagactggcacatggtatatttggcccgaaaggaaggatcatcttttgcttatatttcctggaagtttgagtgtgggtcagttggcctaaaagtagatagcatttctattagaacaagtagtcaaacttttcagactggaacagtagaatggaaattgcgatctgatacagcacaagtagaactgacaggcgataacagtcttcactcctatgctgatttttctggtgccactgaagttattttggaagcagaattaagcagaggagatggtgatgtcgcttggcaacacacccagctgtttagacaaagcttaaatgaccatgaagaaaattgtttggagataattataaaattcagtgacctttgagaacctgaacattatagaaaagctggcaataatcaaggacttactgaagtagtctgttggttcagtgcatgcttagttggcagttaccaccctgtgctagcatatttcttttgctagctatccatcatgtaaccctcatgaaaattatctttatacgtggactataataaaatattgaattaaaaccttt

SEQ ID NO: 277677 - DNA, 2564 bp, Homo sapiens
cccctgccggccgaggaccccgcccctgccggccgaggaccccgcccctgccggccgaggaccccgcccctgccggtggctgcggtagctgctgcgcgctgaggcgcctgctcagtgtgggacgcggagagcgaggggcggcggcggcgcccgctggcgctcaagcatggcggcggcggcattgggcagctcctcaggctcggcgtccccggccgtggctgagctctgccagaacaccccggagacctttttggaggcctccaagctgctgctcacctatgctgacaacatcctcaggtgcagggcaacggggtcggacggcgggtaccggggtgggtgggccgcggcaccttgttcggccagggactggggcgtccggcctgagcttcagagggcagcgacgcccggacagaccgggacctggagctggttctgctcctaacgtccgagcccgccggccaggggcctcgggacccggccaagtcccacccccgctcgagaaaaggaagtttctttgcagttgtgacttggcacctgcagtcagggtgctgcgggtgaactggagtcccggaagcggggccgggcggaggagaggtaggaaggcgtgcttcagacactgccgctcttctcgtcgtttaacggcctcagatatcgggacacaacggtaaccgcaccgcgcgtgtcattccccctgcgtgcatttttcgagcggagtggcttacatttccacatacttatcagaagttactcactgacaaagtgatgttttcttcccatgttgagactatccgagtactaaagcataatgcttctgaagtggtgggttttaaaatttttaattttttttctgcccacttttgttgattgaaacattatagtattttgaagttacagtttttatattaatacctggattctactatgtaacataaccctttaagaattcgtggaggtaatcgccttggatgagagtaatttccttcattctcctgtcagcaaaattgcacttctagaggtctaagggaccttgtagattttgggaattgggaggcaagtttgattattcattttgaataagtacccacctcaactcttcagatcaaatgatctgaagggacatggtgtgggggggtagggaaatggaactgaggttaaaggagagccacttgctttaggggtgttacctcatttatcaggtcaccgtgattaattaggttctctgttcccctcagcccctggtgcattaagtgtttggtatattgtcatgaagtctaaaaggaaattctcagtttcaaggttataggtttcacgtgacccaattttagacattagttacatgtgcagtttttaaaatccatgtcagtaatatttcatttaggcaatggtaatgatttttaaagtaaattgaagggaaaatatattgagcccttattttgtggcagatgctatgaaagatgcaacatgtggcctgttcacagctacataattgtgacctgtgtggggaccaacttcgtgctctgtgacaccttctcaactcaccttttttactctttgaggccttacagctcttcacagtacaaggatgccaagggactccataaatgaactgataggctgggttctccagagcccattagctgagacttaccacctggaaagccaccaggctatttaaaaccccactagtcagaaaagagaggtggccttgtaatgaagcctcacttctgctttaaatctagtgaaacccaaaatgctgaggtttagtatgaggggggaacctttgcatgcaaataatgacatttagcatcataatcttcattatgaatgtttactaatggctcgttgctgattttcgtttttgagacggagtttgctcttgttgatgaggctggagtgcagtggcgcgatcttgactcactgcaacctccgcctcacagcttcaagattctgaaagatgaggggtgtgacaatgagcgcaaaggatagtggacacactggaataatgctgagaaattaagagtttaagaaagtctttgtgcgttgcttttccaaggataggaaagaggatatgatgggtttgaagtctaatgtccctacagccctctaagtctttgagggctttagggtcaggcctttggtatcagtctatacacaaaaccacggtcagtttactcaacatacttaataagaaaaagaatttgaggaactggatgtgactgtcattgctggagcctgtttgcagtatacttttactgagaaaaatagattaatgtgaggtccagagatgatataaaaataaaattgctcactgggcacggtggctcacacctgtaaccccagcactgtgggaggccaaggtgggcggattgcttgagcttaggagtttgagaccagcctgggcaacatggctaaaccccgtctctacaaaaaaattaaaaaattagccaagcatggtggcagacacctgtagtcccagctacttggagggcagaggtgggaggatggcttgagcccataatcatgccactgcattctagctttgatggcgaagtgagacctttctc

SEQ ID NO: 277678 - DNA, 1238 bp, Homo sapiens
cccctgccggccgaggaccccgcccctgccggccgaggaccccgcccctgccggccgaggaccccgcccctgccggtggctgcggtagctgctgcgcgctgaggcgcctgctcagtgtgggacgcggagagcgaggggcggcggcggcgcccgctggcgctcaagcatggcggcggcggcattgggcagctcctcaggctcggcgtccccggccgtggctgagctctgccagaacaccccggagacctttttggaggcctccaagctgctgctcacctatgctgacaacatcctcagaaaccctaatgatgaaaaatatagatccatccggattggaaacacagccttttctactagactcttgcctgtcagaggagctgttgaatgtttatttgaaatgggctttgaagagggagaaacacatctcatctttcctaaaaaagcttcagtggagcagctgcaaaaaattcgtgacctgattgccatagagagaagtagcagactggatggctcaaataagagccacaaagtaaagtcatctcagcaacctgcagccagtacccagcttcctacaacaccatcttcaaatcccagtgggttaaaccagcacacaaggaaccgtcaagggcagtcatcagatccaccatctgcttcaacggttgctgctgactcagccattctagaagttcttcagtccaacattcagcatgtgctggtctatgaaaatcctgctcttcaggagaaagcgttggcttgtattccggtccaagaactaaaaaggaaatcacaagaaaagttatcgagagctagaaaattggataaaggtatcaatataagtgatgaggattttcttttgctggagcttttgcactggtttaaggaagaattttttcactgggtgaataacgttgtcccccaagtggggcccaccaagtctaagaaatccttctgcccagatataccgaactggtcccgagggaacctcggggccgcacccacgatccgataatcccgaatcggccacggcgagggggcccgtaatgcgccagatgacccctgaccccgcagaactcccagggagagcagcctgacgcagtctactgaagcaaatactacagcttagcgggcgaccaaacaacgaagccacactgacacagaggcagcacacagcccaaccaccgagccgtgagccacgataccgaccgccgccacccacgagaagcggcgagctccacacc

SEQ ID NO: 277679 - DNA, 452 bp, Homo sapiens
cagcctatataaaatacatttcaaaatgatctgtgctctttaaattaccaaaagcaaaatgttaattttttttttccctctaacagataacagtcttcactcctatgctgatttttctggtgccactgaagttattttggaagcagaattaagcagaggagatggtgatgtcgcttggcaacacacccagctgtttagacaaagcttaaatgaccatgaagaaaattgtttggagataattataaaattcagtgacctttgagaacctgaacattatagaaaagctggcaataatcaaggacttactgaagtagtctgttggttcagtgcatgcttagttggcagttaccaccctgtgctagcatatttcttttgctagctatccatcatgtaaccctcatgaaaattatctttatacgtggactataataaaatattgaattaaaaccttt

SEQ ID NO: 277680 - DNA, 436 bp, Homo sapiens
gggaaaagttagtttttaaataaccacttgtacatactaccctgtgacagtaatattcttcactaagtttgttttctatactatttcattttttctgacagttcctttctccccatccctactccttataggtatatttggcccgaaaggaaggatcatcttttgcttatatttcctggaagtttgagtgtgggtcagttggcctaaaagtagatagcatttctattagaacaagtagtcaaacttttcagactggaacagtagaatggaaattgcgatctgatacagcacaagtagaactgacaggcggtaagcatttgcctggagaattaatcacgaaatatatatttaccactctgaagactaattgtacttatttgagatgtagctctttttcgtacctaagagttattaatactatttcagtaaaaaaaaa

SEQ ID NO: 277681 - DNA, 2656 bp, Homo sapiens
cccctgccggccgaggaccccgcccctgccggccgaggaccccgcccctgccggccgaggaccccgcccctgccggtggctgcggtagctgctgcgcgctgaggcgcctgctcagtgtgggacgcggagagcgaggggcggcggcggcgcccgctggcgctcaagcatggcggcggcggcattgggcagctcctcaggctcggcgtccccggccgtggctgagctctgccagaacaccccggagacctttttggaggcctccaagctgctgctcacctatgctgacaacatcctcagaaaccctaatgatgaaaaatatagatccatccggattggaaacacagccttttctactagactcttgcctgtcagaggagctgttgaatgtttatttgaaatgggctttgaagagggagaaacacatctcatctttcctaaaaaagcttcagtggagcagctgcaaaaaattcgtgacctgattgccatagagagaagtagcagactggatggctcaaataagagccacaaagtaaagtcatctcagcaacctgcagccagtacccagcttcctacaacaccatcttcaaatcccagtgggttaaaccagcacacaaggaaccgtcaagggcagtcatcagatccaccatctgcttcaacggttgctgctgactcagccattctagaagttcttcagtccaacattcagcatgtgctggtctatgaaaatcctgctcttcaggagaaagcgttggcttgtattccggtccaagaactaaaaaggaaatcacaagaaaagttatcgagagctagaaaattggataaaggtatcaatataagtgatgaggattttcttttgctggagcttttgcactggtttaaggaagaattttttcactgggtgaataacgttttgtgcagcaaatgtggtggacagactaggtctagagatagatcattactgcccagtgatgatgagctgaagtggggtgcaaaggaagtggaagatcattactgtgatgcctgccagttcagcaatcgattcccaagatataataaccctgagaaacttttggaaacaagatgtggacggtgtggcgagtgggccaattgttttacactgtgctgccgagctgtagggtttgaagctcgctatgtttgggattacacagaccatgtctggacagaagtctattctccttctcagcagcggtggctgcactgtgatgcatgtgaagatgtctgtgacaagccactcctttatgaaataggatggggcaagaagctttcctatgtcatagcattttcaaaagatgaggtagttgatgtcacttggcgatattcctgcaaacatgaagaggtgattgccagaagaactaaggttaaagaagcattacttcgagacactattaatgggcttaataagcagaggcaactgtttttgtcagaaaacagaaggaaagaacttctccagaggataattgtggagcttgttgaatttatatctcccaaaacccctaaacctggagaacttgggggaagaatatctgggtcagtggcttggagagtagcccgaggtgaaatgggtctacagagaaaagaaaccttgtttattccctgtgaaaatgagaagatttctaaacagctccacctttgttacaatattgtgaaagatcgttatgttcgagtttcaaataacaatcaaaccatttctggatgggagaatggcgtgtggaaaatggaatctatattcagaaaagttgaaacagactggcacatggtatatttggcccgaaaggaaggatcatcttttgcttatatttcctggaagtttgagtgtgggtcagttggcctaaaagtagatagcatttctattagaacaagtagtcaaacttttcagactggaacagtagaatggaaattgcgatctgatacagcacaagtagaactgacaggcgataacagtcttcactcctatgctgatttttctggtgccactgaagttattttggaagcagaattaagcagaggagatggtgatgtcgcttggcaacacacccagctgtttagacaaagcttaaatgaccatgaagaaaattgtttggagataattataaaattcagtgacctttgagaacctgaacattatagaaaagctggcaataatcaaggacttactgaagtagtctgttggttcagtgcatgcttagttggcagttaccaccctgtgctagcatatttcttttgctagctatccatcatgtaaccctcatgaaaattatctttatacgtggactataataaaatattgaattaaaacctttcttccatatgtgactataatttggagtaaagtcttgttgactcaatatgggattttaatctaaaactgtaagtatggttttaaaagttaaataatgatattcatgattaaatgctattcatgattatgataaaatcttgggcttatgatagtaatttgacattttctgatcagccattcatttcttcagaagtggttaaattagagtctcctaatatttttaattaatgtgaaagtacagtagctcataaattatataatgcatgaaaatttatatgattataaatattcaggcatttaagaaataaaatgaagtattttgccttaaaaaattta

SEQ ID NO: 277682 - DNA, 1830 bp, Homo sapiens
cccctgccggccgaggaccccgcccctgccggccgaggaccccgcccctgccggccgaggaccccgcccctgccggtggctgcggtagctgctgcgcgctgaggcgcctgctcagtgtgggacgcggagagcgaggggcggcggcggcgcccgctggcgctcaagcatggcggcggcggcattgggcagctcctcaggctcggcgtccccggccgtggctgagctctgccagaacaccccggagacctttttggaggcctccaagctgctgctcacctatgctgacaacatcctcagaaaccctaatgatgaaaaatatagatccatccggattggaaacacagccttttctactagactcttgcctgtcagaggagctgttgaatgtttatttgaaatgggctttgaagagggagaaacacatctcatctttcctaaaaaagcttcagtggagcagctgcaaaaaattcgtgacctgattgccatagagagaagtagcagactggatggctcaaataagagccacaaagtaaagtcatctcagcaacctgcagccagtacccagcttcctacaacaccatcttcaaatcccagtgggttaaaccagcacacaaggaaccgtcaagggcagtcatcagatccaccatctgcttcaacggttgctgctgactcagccattctagaagttcttcagtccaacattcagcatgtgctggtctatgaaaatcctgctcttcaggagaaagcgttggcttgtattccggtccaagaactaaaaaggaaatcacaagaaaagttatcgagagctagaaaattggataaaggtagttgatgtcacttggcgatattcctgcaaacatgaagaggtgattgccagaagaactaaggttaaagaagcattacttcgagacactattaatgggcttaataagcagaggcaactgtttttgtcagaaaacagaaggaaagaacttctccagaggataattgtggagcttgttgaatttatatctcccaaaacccctaaacctggagaacttgggggaagaatatctgggtcagtggcttggagagtagcccgaggtgaaatgggtctacagagaaaagaaaccttgtttattccctgtgaaaatgagaagatttctaaacagctccacctttgttacaatattgtgaaagatcgttatgttcgagtttcaaataacaatcaaaccatttctggatgggagaatggcgtgtggaaaatggaatctatattcagaaaagttgaaacagactggcacatggtatatttggcccgaaaggaaggatcatcttttgcttatatttcctggaagtttgagtgtgggtcagttggcctaaaagtagatagcatttctattagaacaagtagtcaaacttttcagactggaacagtagaatggaaattgcgatctgatacagcacaagtagaactgacaggcgataacagtcttcactcctatgctgatttttctggtgccactgaagttattttggaagcagaattaagcagaggagatggtgatgtcgcttggcaacacacccagctgtttagacaaagcttaaatgaccatgaagaaaattgtttggagataattataaaattcagtgacctttgagaacctgaacattatagaaaagctggcaataatcaaggacttactgaagtagtctgttggttcagtgcatgcttagttggcagttaccaccctgtgctagcatatttcttttgctagctatccatcatgtaaccctcatgaaaattatctttatacgtggactataataaaatattgaattaaaaccttt

SEQ ID NO: 277683 - DNA, 2082 bp, Homo sapiens
cccctgccggccgaggaccccgcccctgccggccgaggaccccgcccctgccggccgaggaccccgcccctgccggtggctgcggtagctgctgcgcgctgaggcgcctgctcagtgtgggacgcggagagcgaggggcggcggcggcgcccgctggcgctcaagcatggcggcggcggcattgggcagctcctcaggctcggcgtccccggccgtggctgagctctgccagaacaccccggagacctttttggaggcctccaagctgctgctcacctatgctgacaacatcctcagaaaccctaatgatgaaaaatatagatccatccggattggaaacacagccttttctactagactcttgcctgtcagaggagctgttgaatgtttatttgaaatgggctttgaagagggagaaacacatctcatctttcctaaaaaagcttcagtggagcagctgcaaaaaattcgtgacctgattgccatagagagaagtagcagactggatggctcaaataagagccacaaagtaaagtcatctcagcaacctgcagccagtacccagcttcctacaacaccatcttcaaatcccagtgggttaaaccagcacacaaggaaccgtcaagggcagtcatcagatccaccatctgcttcaacggttgctgctgactcagccattctagaagttcttcagtccaacattcagcatgtgctggtctatgaaaatcctgctcttcaggagaaagcgttggcttgtattccggtccaagaactaaaaaggaaatcacaagaaaagttatcgagagctagaaaattggataaaggtatcaatataagtgatgaggattttcttttgctggagcttttgcactggtttaaggaagaattttttcactgggtgaataacgttttgtgcagcaaatgtggtggacagactaggtctagagatagatcattactgcccagtgatgatgagctgaagtggggtgcaaaggaagtggaagatcattactgtgatgcctgccagttcagcaatcgattcccaagatataataaccctgagaaacttttggaaacaagatgtggacggtgtggcgagtgggccaattgttttacactgtgctgccgagctgtagggtttgaagctcgctatgtttgggattacacagaccatgtctggacagaagtctattctccttctcagcagcggtggctgcactgtgatgcatgtgaagatgtctgtgacaagccactcctttatgaaataggatggggcaagaagctttcctatgtcatagcattttcaaaagatgaggtagttgatgtcacttggcgatattcctgcaaacatgaagaggtgattgccagaagaactaaggttaaagaagcattacttcgagacactattaatgggcttaataagcagaggcaactgtttttgtcagaaaacagaaggaaagaacttctccagaggataattgtggagcttgttgaatttatatctcccaaaacccctaaacctggagaacttgggggaagaatatctgggtcagtggcttggagagtagcccgaggtgaaatgggtctacagagaaaagaaaccttgtttattccctgtgaaaatgagaagatttctaaacagctccacctttgttacaatattgtgaaagatcgttatgttcgagtttcaaataacaatcaaaccatttctggatgggagaatggcgtgtggaaaatggaatctatattcagaaaagttgaaacagactggcacatggtatatttggcccgaaaggaaggatcatcttttgcttatatttcctggaagtttgagtgtgggtcagttggcctaaaagtagatagcatttctattagaacaagtagtcaaacttttcagactggaacagtagaatggaaattgcgatctgatacagcacaagtagaactgacaggcggtaagcatttgcctggagaattaatcacgaaatatatatttaccactctgaagactaattgtacttatttgagatgtagctctttttcgtacctaagagttattaatactatttcagtaaaaaaaaa

SEQ ID NO: 277684 - DNA, 1137 bp, Homo sapiens
cccctgccggccgaggaccccgcccctgccggccgaggaccccgcccctgccggccgaggaccccgcccctgccggtggctgcggtagctgctgcgcgctgaggcgcctgctcagtgtgggacgcggagagcgaggggcggcggcggcgcccgctggcgctcaagcatggcggcggcggcattgggcagctcctcaggctcggcgtccccggccgtggctgagctctgccagaacaccccggagacctttttggaggcctccaagctgctgctcacctatgctgacaacatcctcagaaaccctaatgatgaaaaatatagatccatccggattggaaacacagccttttctactagactcttgcctgtcagaggagctgttgaatgtttatttgaaatgggctttgaagagggagaaacacatctcatctttcctaaaaaagcttcagtggagcagctgcaaaaaattcgtgacctgattgccatagagagaagtagcagactggatggctcaaataagagccacaaagtaaagtcatctcagcaacctgcagccagtacccagcttcctacaacaccatcttcaaatcccagtgggttaaaccagcacacaaggaaccgtcaagggcagtcatcagatccaccatctgcttcaacggttgctgctgactcagccattctagaagttcttcagtccaacattcagcatgtgctggtctatgaaaatcctgctcttcaggagaaagcgttggcttgtattccggtccaagaactaaaaaggaaatcacaagaaaagttatcgagagctagaaaattggataaaggtagttgatgtcacttggcgatattcctgcaaacatgaagaggtgattgccagaagaactaaggttaaagaagcattacttcgagacactattaatgggcttaataagcagaggcaactgtttttgtcagaaaacagaaggaaagaacttctccagaggataattgtggagcttgttgaatttatatctcccaaaacccctaaacctggagaacttgggggaagaatatctgggtcagtggcttggagagtagcccgaggtgaaatgggtctacaggaaagaccttttttatccctgtgaaatgagagtttct

SEQ ID NO: 277685 - DNA, 2510 bp, Homo sapiens
cccctgccggccgaggaccccgcccctgccggccgaggaccccgcccctgccggccgaggaccccgcccctgccggtggctgcggtagctgctgcgcgctgaggcgcctgctcagtgtgggacgcggagagcgaggggcggcggcggcgcccgctggcgctcaagcatggcggcggcggcattgggcagctcctcaggctcggcgtccccggccgtggctgagctctgccagaacaccccggagacctttttggaggcctccaagctgctgctcacctatgctgacaacatcctcaggtgcagggcaacggggtcggacggcgggtaccggggtgggtgggccgcggcaccttgttcggccagggactggggcgtccggcctgagcttcagagggcagcgacgcccggacagaccgggacctggagctggttctgctcctaacgtccgagcccgccggccaggggcctcgggacccggccaagtcccacccccgctcgaggtgaactggagtcccggaagcggggccgggcggaggagaggtaggaaggcgtgcttcagacactgccgctcttctcgtcgtttaacggcctcagatatcgggacacaacggtaaccgcaccgcgcgtgtcattccccctgcgtgcatttttcgagcggagtggcttacatttccacatacttatcagaagttactcactgacaaagtgatgttttcttcccatgttgagactatccgagtactaaagcataatgcttctgaagtggtgggttttaaaatttttaattttttttctgcccacttttgttgattgaaacattatagtattttgaagttacagtttttatattaatacctggattctactatgtaacataaccctttaagaattcgtggaggtaatcgccttggatgagagtaatttccttcattctcctgtcagcaaaattgcacttctagaggtctaagggaccttgtagattttgggaattgggaggcaagtttgattattcattttgaataagtacccacctcaactcttcagatcaaatgatctgaagggacatggtgtgggggggtagggaaatggaactgaggttaaaggagagccacttgctttaggggtgttacctcatttatcaggtcaccgtgattaattaggttctctgttcccctcagcccctggtgcattaagtgtttggtatattgtcatgaagtctaaaaggaaattctcagtttcaaggttataggtttcacgtgacccaattttagacattagttacatgtgcagtttttaaaatccatgtcagtaatatttcatttaggcaatggtaatgatttttaaagtaaattgaagggaaaatatattgagcccttattttgtggcagatgctatgaaagatgcaacatgtggcctgttcacagctacataattgtgacctgtgtggggaccaacttcgtgctctgtgacaccttctcaactcaccttttttactctttgaggccttacagctcttcacagtacaaggatgccaagggactccataaatgaactgataggctgggttctccagagcccattagctgagacttaccacctggaaagccaccaggctatttaaaaccccactagtcagaaaagagaggtggccttgtaatgaagcctcacttctgctttaaatctagtgaaacccaaaatgctgaggtttagtatgaggggggaacctttgcatgcaaataatgacatttagcatcataatcttcattatgaatgtttactaatggctcgttgctgattttcgtttttgagacggagtttgctcttgttgatgaggctggagtgcagtggcgcgatcttgactcactgcaacctccgcctcacagcttcaagattctgaaagatgaggggtgtgacaatgagcgcaaaggatagtggacacactggaataatgctgagaaattaagagtttaagaaagtctttgtgcgttgcttttccaaggataggaaagaggatatgatgggtttgaagtctaatgtccctacagccctctaagtctttgagggctttagggtcaggcctttggtatcagtctatacacaaaaccacggtcagtttactcaacatacttaataagaaaaagaatttgaggaactggatgtgactgtcattgctggagcctgtttgcagtatacttttactgagaaaaatagattaatgtgaggtccagagatgatataaaaataaaattgctcactgggcacggtggctcacacctgtaaccccagcactgtgggaggccaaggtgggcggattgcttgagcttaggagtttgagaccagcctgggcaacatggctaaaccccgtctctacaaaaaaattaaaaaattagccaagcatggtggcagacacctgtagtcccagctacttggagggcagaggtgggaggatggcttgagcccataatcatgccactgcattctagctttgatggcgaagtgagacctttctc

SEQ ID NO: 277686 - DNA, 379 bp, Homo sapiens
tcaattttgaaggattctcttaccactctgcttagtaatttctcttttttcttttttacatctttcataatgttgaaaaactaattctgctttctttttaagagaaaagaaaccttgtttattccctgtgaaaatgagaagatttctaaacagctccacctttgttacaatattgtgaaagatcgttatgttcgagtttcaaataacaatcaaaccatttctggatgggagaatggcgtgtggaaaatggaatctatattcagaaaagttgaaacagactggcacatggtaacttaatgcataaaaccatttaaaacttttgtcattgtttaaacaaatatagattggcttcatttttcagttgtgtaaaatatgaaaa

SEQ ID NO: 277687 - DNA, 786 bp, Homo sapiens
agaattaaatgaaaccttccattaatagttagtgttctcttaaaatcaaatataaagcatgtattgaccagagattctattagacttcctgctggttctgggccttaaagtccagagagagagactgtagtttcaaaagtggcattaactccttcatgatagtaaactcaggatgatattttttatgctgctctttaatatgtctaccttcttaagagttacagcgcacattaagcctaaaactgaccacgttaaaggagattggaaaaacatttttaaggatttcaaagagacagaaattaatacaggtattctaaaatcctgtgtgccacaaaatgcacttattaactgaaattcagaatattatgcattactttatgattcttaggagtttgtgtatagttattgaaagtcattctgatttcattgtcttttttccattgctctcttttctcttacttgagtagaccatgtctggacagaagtctattctccttctcagcagcggtggctgcactgtgatgcatgtgaagatgtctgtgacaagccactcctttatgaaataggatggggcaagaagctttcctatgtcatagcattttcaaaagatgaggtagagcataaaagaaaaaaacttttttccaaaagtaaaatatatttttttcttttatgacagcttcatgaatgtataattaacatacaataacctgcatatatttaaattgtacagtttgataagttttatttgtatacactgaaatcatcactgcaaatcagtattcattg

SEQ ID NO: 277688 - DNA, 2267 bp, Homo sapiens
cccctgccggccgaggaccccgcccctgccggccgaggaccccgcccctgccggccgaggaccccgcccctgccggtggctgcggtagctgctgcgcgctgaggcgcctgctcagtgtgggacgcggagagcgaggggcggcggcggcgcccgctggcgctcaagcatggcggcggcggcattgggcagctcctcaggctcggcgtccccggccgtggctgagctctgccagaacaccccggagacctttttggaggcctccaagctgctgctcacctatgctgacaacatcctcagaaaccctaatgatgaaaaatatagatccatccggattggaaacacagccttttctactagactcttgcctgtcagaggagctgttgaatgtttatttgaaatgggctttgaagagggagaaacacatctcatctttcctaaaaaagcttcagtggagcagctgcaaaaaattcgtgacctgattgccatagagagaagtagcagactggatggctcaaataagagccacaaagtaaagtcatctcagcaacctgcagccagtacccagcttcctacaacaccatcttcaaatcccagtgggttaaaccagcacacaaggaaccgtcaagggcagtcatcagatccaccatctgcttcaacggttgctgctgactcagccattctagaagttcttcagtccaacattcagcatgtgctggtctatgaaaatcctgctcttcaggagaaagcgttggcttgtattccggtccaagaactaaaaaggaaatcacaagaaaagttatcgagagctagaaaattggataaaggtatcaatataagtgatgaggattttcttttgctggagcttttgcactggtttaaggaagaattttttcactgggtgaataacgttttgtgcagcaaatgtggtggacagactaggtctagagatagatcattactgcccagtgatgatgagctgaagtggggtgcaaaggaagtggaagatcattactgtgatgcctgccagttcagcaatcgattcccaagatataataaccctgagaaacttttggaaacaagatgtggacggtgtggcgagtgggccaattgttttacactgtgctgccgagctgtagggtttgaagctcgctatgtttgggattacacagagttacagcgcacattaagcctaaaactgaccacgttaaaggagattggaaaaacatttttaaggatttcaaagagacagaaattaatacaggtagttgatgtcacttggcgatattcctgcaaacatgaagaggtgattgccagaagaactaaggttaaagaagcattacttcgagacactattaatgggcttaataagcagaggcaactgtttttgtcagaaaacagaaggaaagaacttctccagaggataattgtggagcttgttgaatttatatctcccaaaacccctaaacctggagaacttgggggaagaatatctgggtcagtggcttggagagtagcccgaggtgaaatgggtctacagagaaaagaaaccttgtttattccctgtgaaaatgagaagatttctaaacagctccacctttgttacaatattgtgaaagatcgttatgttcgagtttcaaataacaatcaaaccatttctggatgggagaatggcgtgtggaaaatggaatctatattcagaaaagttgaaacagactggcacatggtatatttggcccgaaaggaaggatcatcttttgcttatatttcctggaagtttgagtgtgggtcagttggcctaaaagtagatagcatttctattagaacaagtagtcaaacttttcagactggaacagtagaatggaaattgcgatctgatacagcacaagtagaactgacaggcgataacagtcttcactcctatgctgatttttctggtgccactgaagttattttggaagcagaattaagcagaggagatggtgatgtcgcttggcaacacacccagctgtttagacaaagcttaaatgaccatgaagaaaattgtttggagataattataaaattcagtgacctttgagaacctgaacattatagaaaagctggcaataatcaaggacttactgaagtagtctgttggttcagtgcatgcttagttggcagttaccaccctgtgctagcatatttcttttgctagctatccatcatgtaaccctcatgaaaattatctttatacgtggactataataaaatattgaattaaaaccttt

SEQ ID NO: 277689 - DNA, 2267 bp, Homo sapiens
cccctgccggccgaggaccccgcccctgccggccgaggaccccgcccctgccggccgaggaccccgcccctgccggtggctgcggtagctgctgcgcgctgaggcgcctgctcagtgtgggacgcggagagcgaggggcggcggcggcgcccgctggcgctcaagcatggcggcggcggcattgggcagctcctcaggctcggcgtccccggccgtggctgagctctgccagaacaccccggagacctttttggaggcctccaagctgctgctcacctatgctgacaacatcctcagaaaccctaatgatgaaaaatatagatccatccggattggaaacacagccttttctactagactcttgcctgtcagaggagctgttgaatgtttatttgaaatgggctttgaagagggagaaacacatctcatctttcctaaaaaagcttcagtggagcagctgcaaaaaattcgtgacctgattgccatagagagaagtagcagactggatggctcaaataagagccacaaagtaaagtcatctcagcaacctgcagccagtacccagcttcctacaacaccatcttcaaatcccagtgggttaaaccagcacacaaggaaccgtcaagggcagtcatcagatccaccatctgcttcaacggttgctgctgactcagccattctagaagttcttcagtccaacattcagcatgtgctggtctatgaaaatcctgctcttcaggagaaagcgttggcttgtattccggtccaagaactaaaaaggaaatcacaagaaaagttatcgagagctagaaaattggataaaggtatcaatataagtgatgaggattttcttttgctggagcttttgcactggtttaaggaagaattttttcactgggtgaataacgttttgtgcagcaaatgtggtggacagactaggtctagagatagatcattactgcccagtgatgatgagctgaagtggggtgcaaaggaagtggaagatcattactgtgatgcctgccagttcagcaatcgattcccaagatataataaccctgagaaacttttggaaacaagatgtggacggtgtggcgagtgggccaattgttttacactgtgctgccgagctgtagggtttgaagctcgctatgtttgggattacacagaccatgtctggacagaagtctattctccttctcagcagcggtggctgcactgtgatgcatgtgaagatgtctgtgacaagccactcctttatgaaataggatggggcaagaagctttcctatgtcatagcattttcaaaagatgaggtagttgatgtcacttggcgatattcctgcaaacatgaagaggtgattgccagaagaactaaggttaaagaagcattacttcgagacactattaatgggcttaataagcagaggcaactgtttttgtcagaaaacagaaggaaagaacttctccagaggataattgtggagcttgttgaatttatatctcccaaaacccctaaacctggagaacttgggggaagaatatctgggtcagtggcttggagagtagcccgaggtgaaatgggtctacagagaaaagaaaccttgtttattccctatcgttatgttcgagtttcaaataacaatcaaaccatttctggatgggagaatggcgtgtggaaaatggaatctatattcagaaaagttgaaacagactggcacatggtatatttggcccgaaaggaaggatcatcttttgcttatatttcctggaagtttgagtgtgggtcagttggcctaaaagtagatagcatttctattagaacaagtagtcaaacttttcagactggaacagtagaatggaaattgcgatctgatacagcacaagtagaactgacaggcgataacagtcttcactcctatgctgatttttctggtgccactgaagttattttggaagcagaattaagcagaggagatggtgatgtcgcttggcaacacacccagctgtttagacaaagcttaaatgaccatgaagaaaattgtttggagataattataaaattcagtgacctttgagaacctgaacattatagaaaagctggcaataatcaaggacttactgaagtagtctgttggttcagtgcatgcttagttggcagttaccaccctgtgctagcatatttcttttgctagctatccatcatgtaaccctcatgaaaattatctttatacgtggactataataaaatattgaattaaaaccttt

SEQ ID NO: 277690 - DNA, 2143 bp, Homo sapiens
cccctgccggccgaggaccccgcccctgccggccgaggaccccgcccctgccggccgaggaccccgcccctgccggtggctgcggtagctgctgcgcgctgaggcgcctgctcagtgtgggacgcggagagcgaggggcggcggcggcgcccgctggcgctcaagcatggcggcggcggcattgggcagctcctcaggctcggcgtccccggccgtggctgagctctgccagaacaccccggagacctttttggaggcctccaagctgctgctcacctatgctgacaacatcctcagaaaccctaatgatgaaaaatatagatccatccggattggaaacacagccttttctactagactcttgcctgtcagaggagctgttgaatgtttatttgaaatgggctttgaagagggagaaacacatctcatctttcctaaaaaagcttcagtggagcagctgcaaaaaattcgtgacctgattgccatagagagaagtagcagactggatggctcaaataagagccacaaagtaaagtcatctcagcaacctgcagccagtacccagcttcctacaacaccatcttcaaatcccagtgggttaaaccagcacacaaggaaccgtcaagggcagtcatcagatccaccatctgcttcaacggttgctgctgactcagccattctagaagttcttcagtccaacattcagcatgtgctggtctatgaaaatcctgctcttcaggagaaagcgttggcttgtattccggtccaagaactaaaaaggaaatcacaagaaaagttatcgagagctagaaaattggataaaggtatcaatataagtgatgaggattttcttttgctggagcttttgcactggtttaaggaagaattttttcactgggtgaataacgttttgtgcagcaaatgtggtggacagactaggtctagagatagatcattactgcccagtgatgatgagctgaagtggggtgcaaaggaagtggaagatcattactgtgatgcctgccagttcagcaatcgattcccaagatataataaccctgagaaacttttggaaacaagatgtggacggtgtggcgagtgggccaattgttttacactgtgctgccgagctgtagggtttgaagctcgctatgtttgggattacacagaccatgtctggacagaagtctattctccttctcagcagcggtggctgcactgtgatgcatgtgaagatgtctgtgacaagccactcctttatgaaataggatggggcaagaagctttcctatgtcatagcattttcaaaagatgaggtagttgatgtcacttggcgatattcctgcaaacatgaagaggtgattgccagaagaactaaggttaaagaagcattacttcgagacactattaatgggcttaataagcagaggcaactgtttttgtcagaaaacagaaggaaagaacttctccagaggataattgtggagcttgttgaatttatatctcccaaaacccctaaacctggagaacttgggggaagaatatctgggtcagtggcttggagagtagcccgaggtgaaatgggtctacagagaaaagaaaccttgtttattccctgtgaaaatgagaagatttctaaacagctccacctttgttacaatattgtgaaagatcgttatgttcgagtttcaaataacaatcaaaccatttctggatgggagaatggcgtgtggaaaatggaatctatattcagaaaagttgaaacagactggcacatgataacagtcttcactcctatgctgatttttctggtgccactgaagttattttggaagcagaattaagcagaggagatggtgatgtcgcttggcaacacacccagctgtttagacaaagcttaaatgaccatgaagaaaattgtttggagataattataaaattcagtgacctttgagaacctgaacattatagaaaagctggcaataatcaaggacttactgaagtagtctgttggttcagtgcatgcttagttggcagttaccaccctgtgctagcatatttcttttgctagctatccatcatgtaaccctcatgaaaattatctttatacgtggactataataaaatattgaattaaaaccttt

SEQ ID NO: 277691 - DNA, 2478 bp, Homo sapiens
cccctgccggccgaggaccccgcccctgccggccgaggaccccgcccctgccggccgaggaccccgcccctgccggtggctgcggtagctgctgcgcgctgaggcgcctgctcagtgtgggacgcggagagcgaggggcggcggcggcgcccgctggcgctcaagcatggcggcggcggcattgggcagctcctcaggctcggcgtccccggccgtggctgagctctgccagaacaccccggagacctttttggaggcctccaagctgctgctcacctatgctgacaacatcctcagaaaccctaatgatgaaaaatatagatccatccggattggaaacacagccttttctactagactcttgcctgtcagaggagctgttgaatgtttatttgaaatgggctttgaagagggagaaacacatctcatctttcctaaaaaagcttcagtggagcagctgcaaaaaattcgtgacctgattgccatagagagaagtagcagactggatggctcaaataagagccacaaagtaaagtcatctcagcaacctgcagccagtacccagcttcctacaacaccatcttcaaatcccagtgggttaaaccagcacacaaggaaccgtcaagggcagtcatcagatccaccatctgcttcaacggttgctgctgactcagccattctagaagttcttcagtccaacattcagcatgtgctggtctatgaaaatcctgctcttcaggagaaagcgttggcttgtattccggtccaagaactaaaaaggaaatcacaagaaaagttatcgagagctagaaaattggataaaggtatcaatataagtgatgaggattttcttttgctggagcttttgcactggtttaaggaagaattttttcactgggtgaataacgttttgtgcagcaaatgtggtggacagactaggtctagagatagatcattactgcccagtgatgatgagctgaagtggggtgcaaaggaagtggaagatcattactgtgatgcctgccagttcagcaatcgattcccaagatataataaccctgagaaacttttggaaacaagatgtggacggtgtggcgagtgggccaattgttttacactgtgctgccgagctgtagggtttgaagctcgctatgtttgggattacacagaccatgtctggacagaagtctattctccttctcagcagcggtggctgcactgtgatgcatgtgaagatgtctgtgacaagccactcctttatgaaataggatggggcaagaagctttcctatgtcatagcattttcaaaagatgaggtagttgatgtcacttggcgatattcctgcaaacatgaagaggtgattgccagaagaactaaggttaaagaagcattacttcgagacactattaatgggcttaataagcagaggcaactgtttttgtcagaaaacagaaggaaagaacttctccagaggataattgtggagcttgttgaatttatatctcccaaaacccctaaacctggagaacttgggggaagaatatctgggtcagtggcttggagagtagcccgaggtgaaatgggtctacagagaaaagaaaccttgtttattccctgtgaaaatgagaagatttctaaacagctccacctttgttacaatattgtgaaagatcgttatgttcgagtttcaaataacaatcaaaccatttctggatgggagaatggcgtgtggaaaatggaatctatattcagaaaagttgaaacagactggcacatgataacagtcttcactcctatgctgatttttctggtgccactgaagttattttggaagcagaattaagcagaggagatggtgatgtcgcttggcaacacacccagctgtttagacaaagcttaaatgaccatgaagaaaattgtttggagataattataaaattcagtgacctttgagaacctgaacattatagaaaagctggcaataatcaaggacttactgaagtagtctgttggttcagtgcatgcttagttggcagttaccaccctgtgctagcatatttcttttgctagctatccatcatgtaaccctcatgaaaattatctttatacgtggactataataaaatattgaattaaaacctttcttccatatgtgactataatttggagtaaagtcttgttgactcaatatgggattttaatctaaaactgtaagtatggttttaaaagttaaataatgatattcatgattaaatgctattcatgattatgataaaatcttgggcttatgatagtaatttgacattttctgatcagccattcatttcttcagaagtggttaaattagagtctcctaatatttttaattaatgtgaaagtacagtagctcataaattatataatgcatgaaaatttatatgattataaatattcaggcatttaagaaataaaatgaagtattttgccttaaaaaattta

SEQ ID NO: 277692 - DNA, 1152 bp, Homo sapiens
cccctgccggccgaggaccccgcccctgccggccgaggaccccgcccctgccggccgaggaccccgcccctgccggtggctgcggtagctgctgcgcgctgaggcgcctgctcagtgtgggacgcggagagcgaggggcggcggcggcgcccgctggcgctcaagcatggcggcggcggcattgggcagctcctcaggctcggcgtccccggccgtggctgagctctgccagaacaccccggagacctttttggaggcctccaagctgctgctcacctatgctgacaacatcctcagaaaccctaatgatgaaaaatatagatccatccggattggaaacacagccttttctactagactcttgcctgtcagaggagctgttgaatgtttatttgaaatgggctttgaagagggagaaacacatctcatctttcctaaaaaagcttcagtggagcagctgcaaaaaattcgtgacctgattgccatagagagaagtagcagactggatggctcaaataagagccacaaagtaaagtcatctcagcaacctgcagccagtacccagcttcctacaacaccatcttcaaatcccagtgggttaaaccagcacacaaggaaccgtcaagggcagatcatcttttgcttatatttcctggaagtttgagtgtgggtcagttggcctaaaagtagatagcatttctattagaacaagtagtcaaacttttcagactggaacagtagaatggaaattgcgatctgatacagcacaagtagaactgacaggcgataacagtcttcactcctatgctgatttttctggtgccactgaagttattttggaagcagaattaagcagaggagatggtgatgtcgcttggcaacacacccagctgtttagacaaagcttaaatgaccatgaagaaaattgtttggagataattataaaattcagtgacctttgagaacctgaacattatagaaaagctggcaataatcaaggacttactgaagtagtctgttggttcagtgcatgcttagttggcagttaccaccctgtgctagcatatttcttttgctagctatccatcatgtaaccctcatgaaaattatctttatacgtggactataataaaatattgaattaaaaccttt

SEQ ID NO: 277693 - DNA, 687 bp, Homo sapiens
gcagttcaagctggcagcctttgctgatgacggtcaggaggccaactgcgcctggggagcagcgggatccggggatggggctgccctgtgtgctcacctgcctgacctgccccaggcctcctcctgtccccaccctgcctaatgctctagagtccccctgggctggcctcaggattgcaagcagtgcgagggcctggtctcggccctggtctcagccctatccagatgtccgaggcagatggaccacccgctgagcgtcagaaatgggctcctcatcagcatctctgcccatccatccgtcagtctgtctacctgccccctaggagccaggccctgccccacggtggtgaaggagagtgactccgtgctgcccctgcaagccccggtcacaggggacggcagggaacaggtcgctgcctggtcgtgccaagagcttccctggaggagcggaggctagggcaagagcctcacccccttcctctcccttcctccttccttcccctcctctccgtgtgccctgcaggtatccctctggcctccccggctcacccctgctcccttccctgctgggggccagccaaggcctcacctggctgcagggccaagcctgccatcaacagggcaagcagcacagccttcgtggtcactggtgggctgtggtggagagggcctcaggtgactttatat

SEQ ID NO: 277694 - DNA, 818 bp, Homo sapiens
gagaggctggactgcccacagtcaacaccagcgggtttcctggagccagtgagggccccggggctgggcaggtccgagtctcctccctgagcgacctgcacctccctctccctttgtccttctttccacctctggaggacagagcctacccagggccatatctcagccaccccgggctgagggctgaaacgtcctcaagacccagattatgcctctcccacctcccccacctcacagtgcaaggccagacaagggagaccctttctccagactcctccaggcctcggccttccagccaaggatgagggcacctccctgggccctgtgctcctatagaagctgtgccgccctctggggcccacggcccgcagggtgatgagccttggtcacagcgtcactgacagatcattagcaggtgctgcaaaggacaggggcaggggctgttccggtataaaccaaaagtaacattctaaggccccccagccatctgagtggaaccctcctcttggcaagggctttccgaagttaacctgaaaaactggttcaggccatgacagcaaagggttggatagcctcattatccctcctcccttcagaactctggaacagccagcgttaacatcaacacaggccttcagtctgatgagaaacatttaccatctattgtctcggaagcctgctacctggaggcttcatctgatgataaagccttggtctcccacaaccccgtataacccagacattcctttctattggataactcttgcaagcgattgccaaccagaagatgtttaaatccacctataacctggaagccc

SEQ ID NO: 277695 - DNA, 582 bp, Homo sapiens
gcagttcaagctggcagcctttgctgatgacggtcaggaggccaactgcgcctggggagcagcgggatccggggatggggctgccctgtgtgctcacctgcctgacctgccccaggcctcctcctgtccccaccctgcctaatgctctagagtccccctgggctggcctcaggattgcaagcagtgcgagggcctggtctcggccctggtctcagccctatccagatgtccgaggcagatggaccacccgctgagcgtcagaaatgggttgcctccagggactccagattttcctgtttgctcttggccttctgcccacccaccccactgccatgggcccaaagcagccgggttccctggagatcctgtcttccacctagtgcagggcatgaggccggggccaggacagccggaccaggccctggggcttctgggagctgactcaccttgcagggagtcccaccaccaccttctggggccccacacggtcccatgctggaacacacatccctgtgtgtaattttttttatttcatgcagcattaattaaaaaaataaagatagcatgtcacttgcaaagcca

SEQ ID NO: 277696 - DNA, 490 bp, Homo sapiens
gcagttcaagctggcagcctttgctgatgacggtcaggaggccaactgcgcctggggagcagcgggatccggggatggggctgccctgtgtgctcacctgcctgacctgccccaggcctcctcctgtccccaccctgcctaatgctctagagtccccctgggctggcctcaggattgcaagcagtgcgagggcctggtctcggccctggtctcagccctatccagatgtccgaggcagatggaccacccgctgagcgtcagaaatgggaactctggaacagccagcgttaacatcaacacaggccttcagtctgatgagaaacatttaccatctattgtctcggaagcctgctacctggaggcttcatctgatgataaagccttggtctcccacaaccccgtataacccagacattcctttctattggataactcttgcaagcgattgccaaccagaagatgtttaaatccacctataacctggaagccc

SEQ ID NO: 277697 - DNA, 3934 bp, Homo sapiens
  misc_feature (2291)..(2291): n is a, c, g, or t
gcgacgaggagggcgacgacgaggagacgggcagcggcgaggaggaggaagaggaggcggaggcggcggccgggtgggagcgcagcgaggacgcgcggctgctgcgcgcagggctgcctcctgccgctgtccccgccgcggccgcccgcgacaggagcggccgccgcccgccgaggccgccgcccggccgcccgaggatgcggccgtccggcgacgaggaccgcgcgcgtcgccgccgccgccgccgccgccggagggaccttctgctgagccagctctgcttcctggcctcggtggcgctgctgctctggtcgctgtcgagcctgcgagagcagaaggagcttgacctcatggacctcgtaggggaagacagaaagtggatgatggcgaggaagctgatgcaggtgaacgacactctgacttccgaagatgccggactccggaacagcaagaactgcaccgaaccagccctgcatgaattccccaatgacatcttcacaaacgaggatagaagacaaggtgcggtggtcctccatgtgctctgtgccatatacatgttctatgcgctggccattgtgtgtgatgacttcttcgtcccttccttggaaaagatctgtgagcgcctgcacctcagtgaagatgtggctggggccacattcatggcagcgggaagttcagccccagagctgttcacatcggtcataggggtcttcatcaccaaaggcgatgtgggagttggcaccatcgtgggctcagcggtattcaacatcctgtgcatcattggtgtctgtgggctctttgctgggcaggttgtggctctttcctcctggtgcctgctgagggattctatttactacacgctgtctgtgatcgcgctcatcgtgtttatttatgatgaaaaagtttcctggtgggagtctttagtccttgtgctgatgtatcttatctacattgtcatcatgaaatataacgcttgcatacatcagtgctttgagaggaggacaaaaggtgccgggaacatggtcaacggattggccaacaatgctgaaattgatgacagcagcaactgcgacgcaactgtggtgctacttaagaaagcaaatttccaccgcaaagcatcagtgatcatggtagacgagctgctgtcagcctacccacaccagctttccttctctgaggctggccttcgaatcatgataaccagccactttccccccaagacccggctctccatggccagtcgcatgttgatcaatgagagacaaagattgataaacagcagggcttataccaacggggaatctgaggtggccatcaaaatcccaattaagcacaccgtggagaatgggacagggcccagcagtgccccagacaggggcgtgaatgggacacggagggacgatgttgtggctgaggctggcaacgaaacagagaatgaaaatgaggacaatgagaatgatgaggaggaagaggaggacgaggatgatgatgaaggaccgtacacaccattcgacaccccctcgggtaaactggaaacagtgaaatgggcgttcacctggccgctgagtttcgtcttatacttcactgtacccaactgcaacaagccgcgctgggagaaatggttcatggtgacgtttgcttcctccacgctgtggatcgcagccttctcctacatgatggtgtggatggtcacaatcattggttacaccctggggattcctgacgtcatcatggggatcaccttcctggctgctgggaccagcgtgcctgactgcatggccagcctcattgtggccagacaagggatgggggacatggctgtgtccaactccattgggagcaacgtgtttgacatcctgattggcctcggtctcccctgggctctgcagaccctggctgtggattacggatcctacatccggctgaatagcagggggctgatctactccgtaggcttgctcctggcctctgtttttgtcacggtgttcggcgtccacctgaacaagtggcagctggacaagaagctgggctgtgggtgcctcctcctgtatggtgtgttcctgtgcttctccatcatgactgagttcaacgtgttcacctttgtgaacctgcccatgtgcggggaccactgagccgccgggtgcccacagaggctcagctccttcttttctgtgcaatacgagacccggccgcaccccgagtcacacaggcccccggggccacggcgttcgtctctcctgtgctgtcctcaggcctccgctcctgttttggtggcccaggctctcccctgncccatcctcgctcccccacctccttgggtcatgcccacccaccctttcctgcctcctccgtgtgaagacatccaacatccacgtgacttttccagctccatttttgaacagtgactgagattctagaaaaactggctgctaactggcctgagccaggcaacactgattccaatccctcctccttttttaagttatttgatggaagactcacctaatttgtgacctgaaactgttgaagaaatagagaggagggggcccgttgattacagagagcatttgggattttgtttggtttggagatgatgcctaggttactgggtttggggggattgttttcttttgggggccttccccttttactccttttcttccagagatcaagagcttctcttgcatcttcttccactgggctctggattaatcaattacccaaaggctgcacctgccgtgttgtctgggcttgcatcccagatgtgttggagtatgcatggatgtagtgctttttagaggagccactgggcaaggccaccaagaacaaatgcatgacattttatagccaaggacgcctcgctaaagtcttatgggcgtcccctggggttgggggggcacaaggttttggaggaagaagacaacttccctcattccatcatcaccatctctttctcactaggttctttctagttttcaagcaatagttctagcctgccttggacaagggggccccagttaaacaaactacccatccatgaggtgccaggcagtcaaaaacagaagcttccccgacttgtgagtccctgagatgtgctcttgttgtttggcatttggggtgacagggagtgacccagaggccaccactgcttttcatgcaggagttacagacactggtttcttggaaaatggagagaagcgcactttgcacagacgtcgtcaattaagtcccaatttgccacttggtattgagtacactggaccctgaccactggctcttgggcaaacgtccttcctcacggggcgcctccgccaagccggcccagctgcacccctcccttcctggagggatggccagggaaggagaaaacagagaactgacacctttgaaaccacagaatgtgttacatgcagactcgctcaagggcataagttattgtgaacgtttttgccaatcactgctcaacagccctgctagattttgtatgatgctgaattattatgcagactaattccacccagttgagacacaccatgcttgttcacttgtatttattgaaactgtggattcttgcccgtgctgtcccttgtatttactttaagcactgatcacttatcattcattcggtatggttttccctgtcccttgtacacattctggtatgaatttgtaaaaataacctgctacaaattggttgaatgtttctgtctgtggtgcgaaccagcattaacggatggggcacgtgcccaactgaggaacaggagaagaaatcaccaatttgggctctcagagctaagacacacttattgattctgttgcacattttgcactggtttatggcgattgttttcttggacggatagtgtaaaataaacttctctgttctctatccttcccagagcagagtgcattactttctcccctggaaagctgt

SEQ ID NO: 277698 - DNA, 3889 bp, Homo sapiens
  misc_feature (2291)..(2291): n is a, c, g, or t
gcgacgaggagggcgacgacgaggagacgggcagcggcgaggaggaggaagaggaggcggaggcggcggccgggtgggagcgcagcgaggacgcgcggctgctgcgcgcagggctgcctcctgccgctgtccccgccgcggccgcccgcgacaggagcggccgccgcccgccgaggccgccgcccggccgcccgaggatgcggccgtccggcgacgaggaccgcgcgcgtcgccgccgccgccgccgccgccggagggaccttctgctgagccagctctgcttcctggcctcggtggcgctgctgctctggtcgctgtcgagcctgcgagagcagaaggagcttgacctcatggacctcgtaggggaagacagaaagtggatgatggcgaggaagctgatgcaggtgaacgacactctgacttccgaagatgccggactccggaacagcaagaactgcaccgaaccagccctgcatgaattccccaatgacatcttcacaaacgaggatagaagacaaggtgcggtggtcctccatgtgctctgtgccatatacatgttctatgcgctggccattgtgtgtgatgacttcttcgtcccttccttggaaaagatctgtgagcgcctgcacctcagtgaagatgtggctggggccacattcatggcagcgggaagttcagccccagagctgttcacatcggtcataggggtcttcatcaccaaaggcgatgtgggagttggcaccatcgtgggctcagcggtattcaacatcctgtgcatcattggtgtctgtgggctctttgctgggcaggttgtggctctttcctcctggtgcctgctgagggattctatttactacacgctgtctgtgatcgcgctcatcgtgtttatttatgatgaaaaagtttcctggtgggagtctttagtccttgtgctgatgtatcttatctacattgtcatcatgaaatataacgcttgcatacatcagtgctttgagaggaggacaaaaggtgccgggaacatggtcaacggattggccaacaatgctgaaattgatgacagcagcaactgcgacgcaactgtggtgctacttaagaaagcaaatttccaccgcaaagcatcagtgatcatggtagacgagctgctgtcagcctacccacaccagctttccttctctgaggctggccttcgaatcatgataaccagccactttccccccaagacccggctctccatggccagtcgcatgttgatcaatgagagacaaagattgataaacagcagggcttataccaacggggaatctgaggtggccatcaaaatcccaattaagcacaccgtggagaatgggacagggcccagcagtgccccagacaggggcgtgaatgggacacggagggacgatgttgtggctgaggctggcaacgaaacagagaatgaaaatgaggacaatgagaatgatgaggaggaagaggaggacgaggatgatgatgaaggaccgtacacaccattcgacaccccctcgggtaaactggaaacagtgaaatgggcgttcacctggccgctgagtttcgtcttatacttcactgtacccaactgcaacaagccgcgctgggagaaatggttcatggtgacgtttgcttcctccacgctgtggatcgcagccttctcctacatgatggtgtggatggtcacaatcattggttacaccctggggattcctgacgtcatcatggggatcaccttcctggctgctgggaccagcgtgcctgactgcatggccagcctcattgtggccagacaagggatgggggacatggctgtgtccaactccattgggagcaacgtgtttgacatcctgattggcctcggtctcccctgggctctgcagaccctggctgtggattacggatcctacatccggctgaatagcagggggctgatctactccgtaggcttgctcctggcctctgtttttgtcacggtgttcggcgtccacctgaacaagtggcagctggacaagaagctgggctgtgggtgcctcctcctgtatggtgtgttcctgtgcttctccatcatgactgagttcaacgtgttcacctttgtgaacctgcccatgtgcggggaccactgagccgccgggtgcccacagaggctcagctccttcttttctgtgcaatacgagacccggccgcaccccgagtcacacaggcccccggggccacggcgttcgtctctcctgtgctgtcctcaggcctccgctcctgttttggtggcccaggctctcccctgncccatcctcgctcccccacctccttgggtcatgcccacccaccctttcctgcctcctccgtgtgaagacatccaacatccacgtgacttttccagctccatttttgaacagtgactgagattctagaaaaactggctgctaactggcctgagccaggcaacactgattccaatccctcctccttttttaagttatttgatggaagactcacctaatttgtgacctgaaactgttgaagaaatagagaggagggggcccgttgattacagagagcatttgggattttgtttggtttggagatgatgcctaggttactgggtttggggggattgttttcttttgggggccttccccttttactccttttcttccagagatcaagagcttctcttgcatcttcttccactgggctctggattaatcaattacccaaaggctgcacctgccgtgttgtctgggcttgcatcccagatgtgttggagtatgcatggatgtagtgctttttagaggagccactgggcaaggccaccaagaacaaatgcatgacattttatagccaaggacgcctcgctaaagtcttatgggcgtcccctggggttgggggggcacaaggttttggaggaagaagacaacttccctcattccatcatcaccatctctttctcactaggttctttctagttttcaagcaatagttctagcctgccttggacaagggggccccagttaaacaaactacccatccatgaggtgccaggcagtcaaaaacagaagcttccccgacttgtgagtccctgagatgtgctcttgttgtttggcatttggggtgacagggagtgacccagaggccaccactgcttttcatgcaggagttacagacactggtttcttggaaaatggagagaagcgcactttgcacagacgtcgtcaattaagtcccaatttgccacttggtattgagtacactggaccctgaccactggctcttgggcaaacgtccttcctcacggggcgcctccgccaagccggcccagctgcacccctcccttcctggagggatggccagggaaggagaaaacagagaactgacacctttgaaaccacagaatgtgttacatgcagactcgctcaagggcataagttattgtgaacgtttttgccaatcactgctcaacagccctgctagattttgtatgatgctgaattattatgcagactaattccacccagttgagacacaccatgcttgttcacttgtatttattgaaactgtggattcttgcccgtgctgtcccttgtatttactttaagcactgatcacttatcattcattcggtatggttttccctgtcccttgtacacattctggtatgaatttgtaaaaataacctgctacaaattggttgaatgtttctgtctgtggtgcgaaccagcattaacggatggggcacgtgcccaactgaggaacaggagaagaaatcaccaatttgggctctcagagctaagacacacttattgattctgttgcacattttgcactggtttatggcgattgttttcttggacggatagtgtaaaataaacttctctgttctcta

SEQ ID NO: 277699 - DNA, 588 bp, Homo sapiens
gcgacgaggagggcgacgacgaggagacgggcagcggcgaggaggaggaagaggaggcggaggcggcggccgggtgggagcgcagcgaggacgcgcggctgctgcgcgcagggctgcctcctgccgctgtccccgccgcggccgcccgcgacaggagcggccgccgcccgccgaggccgccgcccggccgcccgaggatgcggccgtccggcgacgaggaccgcgcgcgtcgccgccgccgccgccgccgccggagggaccttctgctgagccagctctgcttcctggcctcggtggcgctgctgctctggtcgctgtcgagcctgcgagagcagaaggctgtgcccgcctgtgcgctgcttactcgcgagctggaggtactgctggtggcggtggtggggagtcttactctccatcagcccccaaggccagggataaagttgtggtggtagacccggcacctgtgcaggtgaccacctgtatactccttggcttgctgaaggattcaaggggactgcttaacacacagttgtccgtatgttctccatccagagagcaggcgggatggcccgagtagagagctcttca

SEQ ID NO: 277700 - DNA, 3136 bp, Homo sapiens
  misc_feature (1538)..(1538): n is a, c, g, or t
ccttttggggctttgctcttttggggtctttgctttttggggtctttgctgggcaggttgtggctctttcctcctggtgcctgctgagggattctatttactacacgctgtctgtgatcgcgctcatcgtgtttatttatgatgaaaaagtttcctggtgggagtctttagtccttgtgctgatgtatcttatctacattgtcatcatgaaatataacgcttgcatacatcagtgctttgagaggaggacaaaaggtgccgggaacatggtcaacggattggccaacaatgctgaaattgatgacagcagcaactgcgacgcaactgtggtgctacttaagaaagcaaatttccaccgcaaagcatcagtgatcatggtagacgagctgctgtcagcctacccacaccagctttccttctctgaggctggccttcgaatcatgataaccagccactttccccccaagacccggctctccatggccagtcgcatgttgatcaatgagagacaaagattgataaacagcagggcttataccaacggggaatctgaggtggccatcaaaatcccaattaagcacaccgtggagaatgggacagggcccagcagtgccccagacaggggcgtgaatgggacacggagggacgatgttgtggctgaggctggcaacgaaacagagaatgaaaatgaggacaatgagaatgatgaggaggaagaggaggacgaggatgatgatgaaggaccgtacacaccattcgacaccccctcgggtaaactggaaacagtgaaatgggcgttcacctggccgctgagtttcgtcttatacttcactgtacccaactgcaacaagccgcgctgggagaaatggttcatggtgacgtttgcttcctccacgctgtggatcgcagccttctcctacatgatggtgtggatggtcacaatcattggttacaccctggggattcctgacgtcatcatggggatcaccttcctggctgctgggaccagcgtgcctgactgcatggccagcctcattgtggccagacaagggatgggggacatggctgtgtccaactccattgggagcaacgtgtttgacatcctgattggcctcggtctcccctgggctctgcagaccctggctgtggattacggatcctacatccggctgaatagcagggggctgatctactccgtaggcttgctcctggcctctgtttttgtcacggtgttcggcgtccacctgaacaagtggcagctggacaagaagctgggctgtgggtgcctcctcctgtatggtgtgttcctgtgcttctccatcatgactgagttcaacgtgttcacctttgtgaacctgcccatgtgcggggaccactgagccgccgggtgcccacagaggctcagctccttcttttctgtgcaatacgagacccggccgcaccccgagtcacacaggcccccggggccacggcgttcgtctctcctgtgctgtcctcaggcctccgctcctgttttggtggcccaggctctcccctgncccatcctcgctcccccacctccttgggtcatgcccacccaccctttcctgcctcctccgtgtgaagacatccaacatccacgtgacttttccagctccatttttgaacagtgactgagattctagaaaaactggctgctaactggcctgagccaggcaacactgattccaatccctcctccttttttaagttatttgatggaagactcacctaatttgtgacctgaaactgttgaagaaatagagaggagggggcccgttgattacagagagcatttgggattttgtttggtttggagatgatgcctaggttactgggtttggggggattgttttcttttgggggccttccccttttactccttttcttccagagatcaagagcttctcttgcatcttcttccactgggctctggattaatcaattacccaaaggctgcacctgccgtgttgtctgggcttgcatcccagatgtgttggagtatgcatggatgtagtgctttttagaggagccactgggcaaggccaccaagaacaaatgcatgacattttatagccaaggacgcctcgctaaagtcttatgggcgtcccctggggttgggggggcacaaggttttggaggaagaagacaacttccctcattccatcatcaccatctctttctcactaggttctttctagttttcaagcaatagttctagcctgccttggacaagggggccccagttaaacaaactacccatccatgaggtgccaggcagtcaaaaacagaagcttccccgacttgtgagtccctgagatgtgctcttgttgtttggcatttggggtgacagggagtgacccagaggccaccactgcttttcatgcaggagttacagacactggtttcttggaaaatggagagaagcgcactttgcacagacgtcgtcaattaagtcccaatttgccacttggtattgagtacactggaccctgaccactggctcttgggcaaacgtccttcctcacggggcgcctccgccaagccggcccagctgcacccctcccttcctggagggatggccagggaaggagaaaacagagaactgacacctttgaaaccacagaatgtgttacatgcagactcgctcaagggcataagttattgtgaacgtttttgccaatcactgctcaacagccctgctagattttgtatgatgctgaattattatgcagactaattccacccagttgagacacaccatgcttgttcacttgtatttattgaaactgtggattcttgcccgtgctgtcccttgtatttactttaagcactgatcacttatcattcattcggtatggttttccctgtcccttgtacacattctggtatgaatttgtaaaaataacctgctacaaattggttgaatgtttctgtctgtggtgcgaaccagcattaacggatggggcacgtgcccaactgaggaacaggagaagaaatcaccaatttgggctctcagagctaagacacacttattgattctgttgcacattttgcactggtttatggcgattgttttcttggacggatagtgtaaaataaacttctctgttctcta

SEQ ID NO: 277701 - DNA, 1951 bp, Homo sapiens
cccccagtcccgggcccggagccagcgcatgcgcccgcctgtgggcgctgtcccggctgcgagggccgtgagctcacggaccgacggaccgacgggcggccggccggacagacggggcagcgcagggagcggggacgcggcgggacagcgacatggccggccacacgcagcagccgagcgggcgcgggaaccccaggcctgcgccctcgccctccccagtcccagggaccgtccccggcgcctcggagcgggtggcgctcaagaaggagatcgggctgctgagcgcctgcaccatcatcatcgggaacatcatcggctcgggcatcttcatctcgcccaagggggtcctggagcactcaggctccgtgggtctggccctgttcgtctgggtcctgggtgggggcgtgacggctctgggctccctctgctatgcagagctgggagtcgccatccccaagtctggcggggactacgcctacgtcacagagatcttcgggggcctggctggctttctgctgctctggagcgccgtcctcatcatgtaccccaccagccttgctgtcatctccatgaccttctccaactacgtgctgcagcccgtgttccccaactgcatcccccccaccacagcctcccgggtgctgtccatggcctgcctgatgctcctgacatgggtgaacagctccagtgtgcgctgggccacgcgcatccaggacatgttcacaggcgggaagctgctggccttgtccctcatcatcggcgtgggccttctccagatcttccaaggacacttcgaggagctgaggcccagcaatgcctttgctttctggatgacgccctccgtgggacacctggccctggccttcctccagggctccttcgccttcagtggctggaacttcctcaactatgtcaccgaggagatggttgacgcccgaaagaacctacctcgcgccatcttcatctccatcccactggtgaccttcgtgtacacgttcaccaacattgcctacttcacggccatgtccccccaggagctgctctcctccaatgcggtggctgtgaccttcggggagaagctgctgggctacttttcttgggtcatgcctgtctccgtggctctgtcaaccttcggagggatcaatggttacctgttcacctactccaggctgtgcttctctggagcccgcgaggggcacctgcccagcctgctggccatgatccacgtcagacactgcacccccatccccgccctcctcgtctgttgcggggccacagccgtcatcatgctcgtgggcgacacgtacacgctcatcaactatgtgtccttcatcaactacctctgctacggcgtcaccatcctgggcctgctgctgctgcgctggaggcggcctgcactccacaggcccatcaaggtgaaccttctcatccccgtggcgtacttggtcttctgggccttcctgctggtcttcagcttcatctcagagcctatggtctgtggggtcggcgtcatcatcatccttacgggggtgcccattttctttctgggagtgttctggagaagcaaaccaaagtgtgtgcacagactcacagagtccatgacacactggggccaggagctgtgtttcgtggtctacccccaggacgcccccgaagaggaggagaatggcccctgcccaccctccctgctgcctgccacagacaagccctcgaagccacaatgagatttttgtagagactgaagcagttgtttctgtttacatgttgtttattgaggaggtgttttggcaaaaaagttttgttttgtttttttctggaaaaaaaagaaaaaagatacgactctcagaagcctgttttaaggaagccctaaaatgtggactgggtttcctgtcttagcactgccctgctagctcttcctgaaaaggcctataaataaacagggctggctgtt

SEQ ID NO: 277702 - DNA, 2070 bp, Homo sapiens
  misc_feature (2)..(2): n is a, c, g, or t
  misc_feature (5)..(5): n is a, c, g, or t
  misc_feature (8)..(8): n is a, c, g, or t
  misc_feature (12)..(12): n is a, c, g, or t
  misc_feature (359)..(359): n is a, c, g, or t
cnggntcnctgngtctcgggcagcaatgctgccccctttcctgccccaacatccccagcagacacaagagatggagactatgagctgctctcgtggctgggtctcgggggtcctgcaccctcaggagctgacgctgacgcactccactgcctgtcaccaggaacctacctcgcgccatcttcatctccatcccactggtgaccttcgtgtacacgttcaccaacattgcctacttcacggccatgtccccccaggagctgctctcctccaatgcggtggctgtggtgagtgggcccctgctcggtccctggctcctgcccaggcccctgccccggccttacacatggcctctctactgngcccacccagaccttcggggagaagctgctgggctacttttcttgggtcatgcctgtctccgtggctctgtcaaccttcggagggatcaatggttacctgttcacctactccaggtgactgcactggggagacgtgggcatggggagggaaggctggggtgcaggtgtgcaccagtcatgccgtgggccagaggaagggacacctgccgggggaggggtctgcctgaagctgggatgatgatcccacacggtaacaagtgtctgatcacaactgggaggcaaagaaagcaagaggcaggcaggctggatgagggggagaactgtccagtggggctgctgggcccggagcaggaggtcagaggcgacagcttaagagggacatcaggtccaaagctgagacccaggatgtggccagtgcccatatctgtccccaacgctaggctgtgcttctctggagcccgcgaggggcacctgcccagcctgctggccatgatccacgtcagacactgcacccccatccccgccctcctcgtctgttgcggggccacagccgtcatcatgctcgtgggcgacacgtacacgctcatcaactatgtgtccttcatcaactacctctgctacggcgtcaccatcctgggcctgctgctgctgcgctggaggcggcctgcactccacaggcccatcaaggtgaaccttctcatccccgtggcgtacttggtcttctgggccttcctgctggtcttcagcttcatctcagagcctatggtctgtggggtcggcgtcatcatcatccttacgggggtgcccattttctttctgggagtgttctggagaagcaaaccaaagtgtgtgcacagactcacagagtccatgacacactggggccaggagctgtgtttcgtggtctacccccaggacgcccccgaagaggaggagaatggcccctgcccaccctccctgctgcctgccacagacaagccctcgaagccacaatgagatttttgtagagactgaagcagttgtttctgtttacatgttgtttattgaggaggtgttttggcaaaaaagttttgttttgtttttttctggaaaaaaaagaaaaaagatacgactctcagaagcctgttttaaggaagccctaaaatgtggactgggtttcctgtcttagcactgccctgctagctcttcctgaaaaggcctataaataaacagggctggctgttcgctcgtgctatggggagtccctgatgggcacagacgggagtggctggggcgtacctcggtgggtgcacacatgttgctggccaggaagatgccgtggcaggccctggaggaggctcttgacattagggggctttgctgcttgacacaggcgctccctaccatggcacccagagtccccctgccctaaagggatgtcgaggatggggtagcagctcagtccgcccctaccccaggcccctcgatgccagtctgagctcggccacccaggagagctcaggggctccaggctgggattgtctttcttcccgtaaatcaccacagagtgaaggtcaggacttcagagcccacagtctcaccctggcttacaggtggggaaaccgaggccctgagataggatggaacagacgtggccactgctgttggtgcctcggcctctctgtccccagaaagcacagagcagcatgtcctgggggctttgaggcctgca

SEQ ID NO: 277703 - DNA, 2234 bp, Homo sapiens
cccccagtcccgggcccggagccagcgcatgcgcccgcctgtgggcgctgtcccggctgcgagggccgtgagctcacggaccgacggaccgacgggcggccggccggacagacggggcagcgcagggagcggggacgcggcgggacagcgacatggccggccacacgcagcagccgagcgggcgcgggaaccccaggcctgcgccctcgccctccccagtcccagggaccgtccccggcgcctcggagcgggtggcgctcaagaaggagatcgggctgctgagcgcctgcaccatcatcatcgctttctgctgctctggagcgccgtcctcatcatgtaccccaccagccttgctgtcatctccatgaccttctccaactacgtgctgcagcccgtgttccccaactgcatcccccccaccacagcctcccgggtgctgtccatggcctgcctgatgctcctgacatgggtgaacagctccagtgtgcgctgggccacgcgcatccaggacatgttcacaggcgggaagctgctggccttgtccctcatcatcggcgtgggccttctccagatcttccaaggacacttcgaggagctgaggcccagcaatgcctttgctttctggatgacgccctccgtgggacacctggccctggccttcctccagggctccttcgccttcagtggctggaacttcctcaactatgtcaccgaggagatggttgacgcccgaaagaacctacctcgcgccatcttcatctccatcccactggtgaccttcgtgtacacgttcaccaacattgcctacttcacggccatgtccccccaggagctgctctcctccaatgcggtggctgtgaccttcggggagaagctgctgggctacttttcttgggtcatgcctgtctccgtggctctgtcaaccttcggagggatcaatggttacctgttcacctactccaggctgtgcttctctggagcccgcgaggggcacctgcccagcctgctggccatgatccacgtcagacactgcacccccatccccgccctcctcgtctgttgcggggccacagccgtcatcatgctcgtgggcgacacgtacacgctcatcaactatgtgtccttcatcaactacctctgctacggcgtcaccatcctgggcctgctgctgctgcgctggaggcggcctgcactccacaggcccatcaaggtgaaccttctcatccccgtggcgtacttggtcttctgggccttcctgctggtcttcagcttcatctcagagcctatggtctgtggggtcggcgtcatcatcatccttacgggggtgcccattttctttctgggagtgttctggagaagcaaaccaaagtgtgtgcacagactcacagagtccatgacacactggggccaggagctgtgtttcgtggtctacccccaggacgcccccgaagaggaggagaatggcccctgcccaccctccctgctgcctgccacagacaagccctcgaagccacaatgagatttttgtagagactgaagcagttgtttctgtttacatgttgtttattgaggaggtgttttggcaaaaaagttttgttttgtttttttctggaaaaaaaagaaaaaagatacgactctcagaagcctgttttaaggaagccctaaaatgtggactgggtttcctgtcttagcactgccctgctagctcttcctgaaaaggcctataaataaacagggctggctgttcgctcgtgctatggggagtccctgatgggcacagacgggagtggctggggcgtacctcggtgggtgcacacatgttgctggccaggaagatgccgtggcaggccctggaggaggctcttgacattagggggctttgctgcttgacacaggcgctccctaccatggcacccagagtccccctgccctaaagggatgtcgaggatggggtagcagctcagtccgcccctaccccaggcccctcgatgccagtctgagctcggccacccaggagagctcaggggctccaggctgggattgtctttcttcccgtaaatcaccacagagtgaaggtcaggacttcagagcccacagtctcaccctggcttacaggtggggaaaccgaggccctgagataggatggaacagacgtggccactgctgttggtgcctcggcctctctgtccccagaaagcacagagcagcatgtcctgggggctttgaggcctgca

SEQ ID NO: 277704 - DNA, 430 bp, Homo sapiens
cgttgactgcagcaatgcgctatgagccagccaactctcatttcttcaaaacagagattcagtatgagaagttggcagatgctgttcgatttcttggctgcttctcagacctaagaaaaataagcgccatgaatgtcttcccctcaaatacacagccatttcaaagacttttagaggaagatgtaatctcaatagaatcagtgtcacccacgttacggcactgcagtaaactttttatttatctttacaaagtagccacagattcttttgacagtcgtgcagaacagatccctccttgcctgacaagtgagtcttctctcccctctccttggggtacaccagctttgtccaggaaaaggcatgcatatcattctgtttcaactccccctgtttaccctcctaaaaatgttgccgacctgaaactacatgt

SEQ ID NO: 277705 - DNA, 416 bp, Homo sapiens
ttgtagagacagggtcttgccatgttgcccatgctggtctccaactcctgggctcaagtgatcctcccacctcagtctccaaaacaaaatgctgggattacaggtgtgagccaccatgcccagcctcccatgttgtcttgttcactgtcatattctgaatgactcactcatattagaaacaagcactcaataaacaaacaagtaaatcttgacagaagaaaagttcttccttgcagacttttgctaatgaaagtcctgataaagaagatactaaatagcaacctctgagtgctaaatactgactggtaagaacagaaagagaaaattaaatactagaatataaccacatttataattacataattggaaaagaataaccatgctatcaactaagggaatatgactcaccatcatat

SEQ ID NO: 277706 - DNA, 954 bp, Homo sapiens
  misc_feature (949)..(949): n is a, c, g, or t
ttttcactgctgctcatgacgtgtgccagtaccgaacacgcactgcgctatcatgcccagtgatgccatctcccacactgctgcccgtgctcgcactgagagagagctgcacagtcactggccggcagactgggcctccctctgatcgatgaggtggtgagcccagagcccgagcccctcaacacgtctgacttctctgactggtctagttttaatgccagcagtacccctggaccagaggaggtagacagcgcctctgctgccccagccttctacagccaggccccccggcccccagcttccccaggccggcccgagcagcacacagtgatccacatgggcaatcctgagcccttgactcacgcccctaggaaggtgtatgatacgcgggatgatgaccggacaccaggcctccatggagactgtgacgatgacaagtaccgacgtcggccggccttgggttggctggcccggctgctaaggagccgggctgggtctcggaagcggccgctgaccctgctccagcgggcggggctgctgctactcttgggactgctgggcttcctggccctccttgccctcatgtctcgcctaggccgggccgcagctgacagcgatcccaacctggacccactcatgaaccctcacatccgcgtgggcccctcctgagcccccttgcttgtggctaggccagcctaggatgtgggttctgtggaggagaggcggggtaatggggaggctgagggcacctcttcactgcccctctccctcaagcctaagacactaagaccccagacccaaagccaagtccaccagagtggctgcaggccaggcctggagtccccgtgggtcaagcatttgtcttgacttgctttcctcccgggtctccagcctccgacccctcgccccatgaaggagctggcaggtggaaataaacaacaactttatnaaaaa

SEQ ID NO: 277707 - DNA, 548 bp, Homo sapiens
cgtcttcacctctagcggcagcggaggcgtggcccaggggcgcgatggcgtcatcagcgcgcgccgcacccggaagagacgtggcagcggagggataatcggggcggccggggctgaagggagaggcgcaggagccctggggagagtggtccctgcccttccgcgcctcgagccatcgctaccgcccttcggaaccagtgcagcggccgatcagtaaacacagagactggggatcgatcatggggctttgtaagtgccccaagagaaaggtgaccaacctgttctgcttcgaacatcgggtcaacgtctgcgagcactgcctggtagccaatcacgccaaggtggggccttcaggggagcgactgagcagggcactgggtgggcaaggcggtattggcttcctccaaatccatgaggggccccgcgctagaatgtaagccccacaagggcaaggacttgatttattttgttcactgatatatcccccgtccccaagagagagtctggtgcacagtatgtgctcaataaatatttattgattaaacaaa

SEQ ID NO: 277708 - DNA, 601 bp, Homo sapiens
cgtcttcacctctagcggcagcggaggcgtggcccaggggcgcgatggcgtcatcagcgcgcgccgcacccggaagagacgtggcagcggagggataatcggggcggccggggctgaagggagaggcgcaggagccctggggagagtggtccctgcccttccgcgcctcgagccatcgctaccgcccttcggaaccagtgcagcggccgatcagtaaacacagagactggggatcgatcatggggctttgtaagtgccccaagagaaaggtgaccaacctgttctgcttcgaacatcgggtcaacgtctgcgagcactgcctggtagccaatcacgccaaggtggggccttcaggggagcgactgagcagggcactgggtgggcaaggcggtattggcttcctccaaatccatgaggggccccgcgctagaatgtaagccccacaagggcaaggacttgatttattttgttcactgatatatcccccgtccccaagagagagtctggtgcacagtatgtgctcaataaatatttattgattaaacaaaaacaacacacaaaaacaccaggacacaaccaaacaaggagaagcaaagaaccg

SEQ ID NO: 277709 - DNA, 1398 bp, Homo sapiens
  misc_feature (1393)..(1393): n is a, c, g, or t
gggatttatgcagggggtgtttctccgcataaggagggacagtgggcaggaatctgagatcggggcgaatatgagaggtgtctgggggagttaagagtggaaactgggctggtgagagcgtagtggtggccaccagaacctgacttcctaccaactcatgcccctttcccaggatcgatcatggggctttgtaagtgccccaagagaaaggtgaccaacctgttctgcttcgaacatcgggtcaacgtctgcgagcactgcctggtagccaatcacgccaagtgcatcgtccagtcctacctgcaatggctccaagatagcgactacaaccccaattgccgcctgtgcaacatacccctggccagccgagagacgacccgccttgtctgctatgatctctttcactgggcctgcctcaatgaacgtgctgcccagctaccccgaaacacggcacctgccggctatcagtgccccagctgcaatggccccatcttccccccaaccaacctggctggccccgtggcctccgcactgagagagaagctggccacagtcaactgggcccgggcaggactgggcctccctctgatcgatgaggtggtgagcccagagcccgagcccctcaacacgtctgacttctctgactggtctagttttaatgccagcagtacccctggaccagaggaggtagacagcgcctctgctgccccagccttctacagccaggccccccggcccccagcttccccaggccggcccgagcagcacacagtgatccacatgggcaatcctgagcccttgactcacgcccctaggaaggtgtatgatacgcgggatgatgaccggacaccaggcctccatggagactgtgacgatgacaagtaccgacgtcggccggccttgggttggctggcccggctgctaaggagccgggctgggtctcggaagcggccgctgaccctgctccagcgggcggggctgctgctactcttgggactgctgggcttcctggccctccttgccctcatgtctcgcctaggccgggccgcagctgacagcgatcccaacctggacccactcatgaaccctcacatccgcgtgggcccctcctgagcccccttgcttgtggctaggccagcctaggatgtgggttctgtggaggagaggcggggtaatggggaggctgagggcacctcttcactgcccctctccctcaagcctaagacactaagaccccagacccaaagccaagtccaccagagtggctgcaggccaggcctggagtccccgtgggtcaagcatttgtcttgacttgctttcctcccgggtctccagcctccgacccctcgccccatgaaggagctggcaggtggaaataaacaacaactttatnaaaaa

SEQ ID NO: 277710 - DNA, 1439 bp, Homo sapiens
  misc_feature (1434)..(1434): n is a, c, g, or t
cgtcttcacctctagcggcagcggaggcgtggcccaggggcgcgatggcgtcatcagcgcgcgccgcacccggaagagacgtggcagcggagggataatcggggcggccggggctgaagggagaggcgcaggagccctggggagagtggtccctgcccttccgcgcctcgagccatcgctaccgcccttcggaaccagtgcagcggccgatcagtaaacacagagactggggatcgatcatggggctttgtaagtgccccaagagaaaggtgaccaacctgttctgcttcgaacatcgggtcaacgtctgcgagcactgcctgtgcatcgtccagtcctacctgcaatggctccaagatagcgactacaaccccaattgccgcctgtgcaacatacccctggccagccgagagacgacccgccttgtctgctatgatctctttcactgggcctgcctcaatgaacgtgctgcccagctaccccgaaacacggcacctgccggctatcagtgccccagctgcaatggccccatcttccccccaaccaacctggctggccccgtggcctccgcactgagagagaagctggccacagtcaactgggcccgggcaggactgggcctccctctgatcgatgaggtggtgagcccagagcccgagcccctcaacacgtctgacttctctgactggtctagttttaatgccagcagtacccctggaccagaggaggtagacagcgcctctgctgccccagccttctacagccaggccccccggcccccagcttccccaggccggcccgagcagcacacagtgatccacatgggcaatcctgagcccttgactcacgcccctaggaaggtgtatgatacgcgggatgatgaccggacaccaggcctccatggagactgtgacgatgacaagtaccgacgtcggccggccttgggttggctggcccggctgctaaggagccgggctgggtctcggaagcggccgctgaccctgctccagcgggcggggctgctgctactcttgggactgctgggcttcctggccctccttgccctcatgtctcgcctaggccgggccgcagctgacagcgatcccaacctggacccactcatgaaccctcacatccgcgtgggcccctcctgagcccccttgcttgtggctaggccagcctaggatgtgggttctgtggaggagaggcggggtaatggggaggctgagggcacctcttcactgcccctctccctcaagcctaagacactaagaccccagacccaaagccaagtccaccagagtggctgcaggccaggcctggagtccccgtgggtcaagcatttgtcttgacttgctttcctcccgggtctccagcctccgacccctcgccccatgaaggagctggcaggtggaaataaacaacaactttatnaaaaa

SEQ ID NO: 277711 - DNA, 1421 bp, Homo sapiens
  misc_feature (1416)..(1416): n is a, c, g, or t
cgtcttcacctctagcggcagcggaggcgtggcccaggggcgcgatggcgtcatcagcgcgcgccgcacccggaagagacgtggcagcggagggataatcggggcggccggggctgaagggagaggcgcaggagccctggggagagtggtccctgcccttccgcgcctcgagccatcgctaccgcccttcggaaccagtgcagcggccgatcagtaaacacagagactggggatcgatcatggggctttgtaagtgccccaagagaaaggtgaccaacctgttctgcttcgaacatcgggtcaacgtctgcgagcactgcctggtagccaatcacgccaagtgcatcgtccagtcctacctgcaatggctccaagatagcgactacaaccccaattgccgcctgtgcaacatacccctggccagccgagagacgacccgccttgtctgctatggtgaggccttggcacctcggggggatcaggccagcctcaggggccagcttggtgactggtttccaggccctcctcaagcagcaggacagtgagtcccccgagtctcagagcccagattctagtcctgttaaagttccttacctgctgtgtaagttcagatcgatgaggtggtgagcccagagcccgagcccctcaacacgtctgacttctctgactggtctagttttaatgccagcagtacccctggaccagaggaggtagacagcgcctctgctgccccagccttctacagccaggccccccggcccccagcttccccaggccggcccgagcagcacacagtgatccacatgggcaatcctgagcccttgactcacgcccctaggaaggtgtatgatacgcgggatgatgaccggacaccaggcctccatggagactgtgacgatgacaagtaccgacgtcggccggccttgggttggctggcccggctgctaaggagccgggctgggtctcggaagcggccgctgaccctgctccagcgggcggggctgctgctactcttgggactgctgggcttcctggccctccttgccctcatgtctcgcctaggccgggccgcagctgacagcgatcccaacctggacccactcatgaaccctcacatccgcgtgggcccctcctgagcccccttgcttgtggctaggccagcctaggatgtgggttctgtggaggagaggcggggtaatggggaggctgagggcacctcttcactgcccctctccctcaagcctaagacactaagaccccagacccaaagccaagtccaccagagtggctgcaggccaggcctggagtccccgtgggtcaagcatttgtcttgacttgctttcctcccgggtctccagcctccgacccctcgccccatgaaggagctggcaggtggaaataaacaacaactttatnaaaaa

SEQ ID NO: 277712 - DNA, 306 bp, Homo sapiens
aactcaggctctttgaggccccttcccgatctgacaccccctaatctttgtaattctccccgacgtctgacacactgtggtttccagaatacagtcgtgcgcctcagctggtttgagctgcacaataacgccctatggtggcaggtgcaggagtgatcatccctgaggcacagacgaggagatggaggctcaggaatgggtggtgaccagggcttctctccagccgcgggggccaccagggactggggcctgacctgattttcccctcatccccccaggagccgggctgggtctcggaagcggccg

SEQ ID NO: 277713 - DNA, 1457 bp, Homo sapiens
  misc_feature (1452)..(1452): n is a, c, g, or t
cgtcttcacctctagcggcagcggaggcgtggcccaggggcgcgatggcgtcatcagcgcgcgccgcacccggaagagacgtggcagcggagggataatcggggcggccggggctgaagggagaggcgcaggagccctggggagagtggtccctgcccttccgcgcctcgagccatcgctaccgcccttcggaaccagtgcagcggccgatcagtaaacacagagactggggatcgatcatggggctttgtaagtgccccaagagaaaggtgaccaacctgttctgcttcgaacatcgggtcaacgtctgcgagcactgcctggtagccaatcacgccaagtgcatcgtccagtcctacctgcaatggctccaagatagcgactacaaccccaattgccgcctgtgcaacatacccctggccagccgagagacgacccgccttgtctgctatgatctctttcactgggcctgcctcaatgaacgtgctgcccagctaccccgaaacacggcacctgccggctatcagtgccccagctgcaatggccccatcttccccccaaccaacctggctggccccgtggcctccgcactgagagagaagctggccacagtcaactgggcccgggcaggactgggcctccctctgatcgatgaggtggtgagcccagagcccgagcccctcaacacgtctgacttctctgactggtctagttttaatgccagcagtacccctggaccagaggaggtagacagcgcctctgctgccccagccttctacagccaggccccccggcccccagcttccccaggccggcccgagcagcacacagtgatccacatgggcaatcctgagcccttgactcacgcccctaggaaggtgtatgatacgcgggatgatgaccggacaccaggcctccatggagactgtgacgatgacaagtaccgacgtcggccggccttgggttggctggcccggctgctaaggagccgggctgggtctcggaagcggccgctgaccctgctccagcgggcggggctgctgctactcttgggactgctgggcttcctggccctccttgccctcatgtctcgcctaggccgggccgcagctgacagcgatcccaacctggacccactcatgaaccctcacatccgcgtgggcccctcctgagcccccttgcttgtggctaggccagcctaggatgtgggttctgtggaggagaggcggggtaatggggaggctgagggcacctcttcactgcccctctccctcaagcctaagacactaagaccccagacccaaagccaagtccaccagagtggctgcaggccaggcctggagtccccgtgggtcaagcatttgtcttgacttgctttcctcccgggtctccagcctccgacccctcgccccatgaaggagctggcaggtggaaataaacaacaactttatnaaaaa

SEQ ID NO: 277714 - DNA, 1227 bp, Homo sapiens
cgtcttcacctctagcggcagcggaggcgtggcccaggggcgcgatggcgtcatcagcgcgcgccgcacccggaagagacgtggcagcggagggataatcggggcggccggggctgaagggagaggcgcaggagccctggggagagtggtccctgcccttccgcgcctcgagccatcgctaccgcccttcggaaccagtgcagcggccgatcagtaaacacagagactggggatcgatcatggggctttgtaagtgccccaagagaaaggtgaccaacctgttctgcttcgaacatcgggtcaacgtctgcgagcactgcctggtagccaatcacgccaagtgcatcgtccagtcctacctgcaatggctccaagatagcgactacaaccccaattgccgcctgtgcaacatacccctggccagccgagagacgacccgccttgtctgctatggtgaggccttggcacctcggggggatcaggccagcctcaggggccagcttggtgactggtttccaggccctcctcaagcagcaggacagtgagtcccccgagtctcagagcccagattctagtcctgttaaagttccttacctgctgtgtaagttcaggcaagttattcttcctttctaggcctcactgtctttcctaaaaattaaagctcctagttcctctttcctaaaaattaagccctgccaatctggaggtttcagcgagaaccagtcaagcttacgggtatgctggtggccgtgactattagctagccagaccggcatgttgctttcagatattcaggatccaccactgattccaaggctaaacagagaggaagtgagtttcccacattaaagttagctaaaagaagtcagcagacatatgtgtcatgactttgacctgaatctggggtaagagccttagctccagtttttgaaggagctcatgcaagagtcagctccatatgtgtttctccttgtgagtgcatgtgtgtacttgcaggcacttaatgtacattgtgtgtttaaatgagtgttagtgtgttgatctgtacttggggtgaatgaatgggtaaatgtatgtatgtgaacatatgaacacaggtgtgttgtgggagtgcaagagaatgcatggttgagggtgcctgttagcaaacctgtgagtgtatagatgtgtatgtgtgagggctcctgtacccatagtgtagatatagggaatgccacttgtgtttga

SEQ ID NO: 277715 - DNA, 1352 bp, Homo sapiens
  misc_feature (1347)..(1347): n is a, c, g, or t
cgctagtacgaggctgggtgtaaatcggccgagggggagagtggtccctgcccttccgcgcctcgagccatcgctaccgcccttcggaaccagtgcagcggccgatcagtaaacacagagactggggatcgatcatggggctttgtaagtgccccaagagaaaggtgaccaacctgttctgcttcgaacatcgggtcaacgtctgcgagcactgcctggtagccaatcacgccaagtgcatcgtccagtcctacctgcaatggctccaagatagcgactacaaccccaattgccgcctgtgcaacatacccctggccagccgagagacgacccgccttgtctgctatgatctctttcactgggcctgcctcaatgaacgtgctgcccagctaccccgaaacacggcacctgccggctatcagtgccccagctgcaatggccccatcttccccccaaccaacctggctggccccgtggcctccgcactgagagagaagctggccacagtcaactgggcccgggcaggactgggcctccctctgatcgatgaggtggtgagcccagagcccgagcccctcaacacgtctgacttctctgactggtctagttttaatgccagcagtacccctggaccagaggaggtagacagcgcctctgctgccccagccttctacagccaggccccccggcccccagcttccccaggccggcccgagcagcacacagtgatccacatgggcaatcctgagcccttgactcacgcccctaggaaggtgtatgatacgcgggatgatgaccggacaccaggcctccatggagactgtgacgatgacaagtaccgacgtcggccggccttgggttggctggcccggctgctaaggagccgggctgggtctcggaagcggccgctgaccctgctccagcgggcggggctgctgctactcttgggactgctgggcttcctggccctccttgccctcatgtctcgcctaggccgggccgcagctgacagcgatcccaacctggacccactcatgaaccctcacatccgcgtgggcccctcctgagcccccttgcttgtggctaggccagcctaggatgtgggttctgtggaggagaggcggggtaatggggaggctgagggcacctcttcactgcccctctccctcaagcctaagacactaagaccccagacccaaagccaagtccaccagagtggctgcaggccaggcctggagtccccgtgggtcaagcatttgtcttgacttgctttcctcccgggtctccagcctccgacccctcgccccatgaaggagctggcaggtggaaataaacaacaactttatnaaaaa

SEQ ID NO: 277716 - DNA, 968 bp, Homo sapiens
  misc_feature (963)..(963): n is a, c, g, or t
aagaatatgatgagtgcaggcccagagaggactcattgaaaggactgaaaggggaggtggcgttttcttcctacccaaacttaccccccgtggcctccgcactgagagagaagctggccacagtcaactgggcccgggcaggactgggcctccctctgatcgatgaggtggtgagcccagagcccgagcccctcaacacgtctgacttctctgactggtctagttttaatgccagcagtacccctggaccagaggaggtagacagcgcctctgctgccccagccttctacagccaggccccccggcccccagcttccccaggccggcccgagcagcacacagtgatccacatgggcaatcctgagcccttgactcacgcccctaggaaggtgtatgatacgcgggatgatgaccggacaccaggcctccatggagactgtgacgatgacaagtaccgacgtcggccggccttgggttggctggcccggctgctaaggagccgggctgggtctcggaagcggccgctgaccctgctccagcgggcggggctgctgctactcttgggactgctgggcttcctggccctccttgccctcatgtctcgcctaggccgggccgcagctgacagcgatcccaacctggacccactcatgaaccctcacatccgcgtgggcccctcctgagcccccttgcttgtggctaggccagcctaggatgtgggttctgtggaggagaggcggggtaatggggaggctgagggcacctcttcactgcccctctccctcaagcctaagacactaagaccccagacccaaagccaagtccaccagagtggctgcaggccaggcctggagtccccgtgggtcaagcatttgtcttgacttgctttcctcccgggtctccagcctccgacccctcgccccatgaaggagctggcaggtggaaataaacaacaactttatnaaaaa

SEQ ID NO: 277717 - DNA, 425 bp, Homo sapiens
cgctagtacgaggctgggtgtaaatcggccgagggggagagtggtccctgcccttccgcgcctcgagccatcgctaccgcccttcggaaccagtgcagcggccgatcagatcgatcatggggctttgtaagtgccccaagagaaaggtgaccaacctgttctgcttcgaacatcgggtcaacgtctgcgagcactgcctggtagccaatcacgccaaggtggggccttcaggggagcgactgagcagggcactgggtgggcaaggcggtattggcttcctccaaatccatgaggggccccgcgctagaatgtaagccccacaagggcaaggacttgatttattttgttcactgatatatcccccgtccccaagagagagtctggtgcacagtatgtgctcaataaatatttattgattaaacaaa

SEQ ID NO: 277718 - DNA, 4445 bp, Homo sapiens
cccacctcggccacactgcttcgctcccccctccccaccttcagctggcaccgcaaacaagccttacctcgttgcatctgcgaggagaggtagcaacagcgagcctagccagccagaggcggtggagaggaggaaggggcggggtgggggggcagagagcgggccgaggccgcccttggtgggggtagcgggggcagagctgccgagcagacccggcagccgccctcctccgcccccaccctccagaagcactcttgcctgagaaccgaattattccactagtattatttcattttttattactccccctcctcactccccagccgcccccacccccacgccggcctcgcctctggttgcatggcagcgctgcccgggcgcggggctcagggctggccccagggaagggggaggaggaggaggatcatgaaggccggagtcgcgaccgccggacggcggcagcagccagaggacgagccggagcagcccccgccccggagacacccggacgccgagcagcagtcgcctccgccgccgcagcagctgcgggcgcgggccgacccggagccggaggaggagggcgaccgcgacccagaggaggaagaggaggagaaggcgaggccactcgcccgcccggacctgcccttctctcggctcttgcccctcgaccgaagggacctttgatggaaccgaggggagggcgccacggatttgccgactgcagcaggggtgggctgggggctgagataatgtaaccactcctttctcctgttctctcccacacgcccctctcctctacccctattctctgctccactgccctctcaccccggtacacacacccttcctctagccaggatcttcatgctcaggaaggaggcgcctctgcaagggttaaacgatcttttctttttctcccatcctttttccttcccaaacctctattttacctcccttctcctaattggctttcccctcttcggtgtaaccctttggctgcggaggcaaagcacaagcccctagcccagtttcacctgcaacacccctcccccacccaactgctctcttaaaagcaactctggtgcttctgggggttaattgccccagttttctgcccaggagaattaaaacttctcccaatcttctctcctcccctaccttgactcccccaacccctaccacctgagaaaaacgatcttttctctctcacacatgcagtcctcaattcttcattgagctagttttctctaagcccagctcaatccactccagatttgatttacaattgtccccacccttttatataaaagaaagatttctcactgcgtaggaatttgagaagaacccaataatcctttcctggggaacttttaaacaattcgacattgatttaaacaattcgacagaggctctagtggcccctccaccacgcttcttcaatccctctgctcctaccagtgtcctcaggtcaaaagcagaaaggagacacactgaacaaagttggaggttggggtgggtgtgtgagggcaagaaaaacttttttgttattgggctttccaggtggagttcagaaccagtgactcacacttctcagtcctgggagcaatttatttgctacttggaggggttgtaagaaaagccagtgagaaagcagactccccccacaacacagatccactgtggacccccaaaacctgtcctgtccccctcttttaagactccagccacccctcttgggctctctacttccacggggcacatgctgatgcccctgtgtgggctgctctggtggtggtggtgctgctgctccggctggtactgctatggattgtgtgccccagccccccagatgttgcgccaccagggtctcctcaagtgccgctgccgcatgctcttcaatgacctgaaggttttcttactgcggcgccctcctcaagcgcccctgcccatgcacggcgacccccagccccccggtttggcggccaacaacacccttccggctctgggcgccggggggtgggcaggctggaggggcccccgagaagtggtgggcagggagccccctcctgtgccacctccaccccccttgccaccttcttctgtggaagatgactggggtggcccagccacagagccacctgcctcgctgctcagcagtgcctcctcagatgacttctgtaaggagaagaccgaggatcgctactcactgggcagcagcttggacagtggtatgaggaccccactctgccgcatctgcttccaggggccagaacagggggagctgctgagcccatgccgctgtgatggctcggtcaagtgcacacaccagccttgcctcatcaagtggatcagcgagcggggctgctggagctgcgagctgtgctactacaagtaccacgtcatcgccataagcacaaaaaatcctctgcagtggcaggccatctctctgacggtcattgagaaggttcaggttgcagccgccatcctgggctccctcttcctcatcgccagtatttcttggctcatctggtcaactttcagcccctcggcaagatggcagcgccaagaccttctcttccagatctgctacgggatgtatggcttcatggacgtggtgtgcataggtctcatcatccatgaaggaccctcggtgtaccgcatctttaaacggtggcaggctgtcaaccagcagtggaaagtgctgaactatgacaagacaaaagacctggaggatcaaaaggcaggaggcaggaccaacccccggacctcctcatccacccaggccaatatcccctcctcggaagaggagaccgcaggcacccctgcccctgagcagggccctgcccaggctgccggccacccctcaggccctctgtcccatcaccactgtgcttataccatcctgcacatcctgagtcacttgagacctcatgaacagcgaagtcccccaggcagcagccgagagctggtcatgagagtcacgacagtgtgagagcagaggcccggaaggaaggccatgaccaccactgagggcccggagcagggtggggaggtgcagtggcacccccggagccaacagagggagcaggcagagggtgggggacctggcgggagccctggggtagtgtcagagcgggagtgaggctggtgcaggagcagttctgctatttccaatcagtcaatgccactctccacaacaacaatgaaaaccaacaccaactcaacaacaaagtgcaatacaggctgaacctggcccaacagaaaaaccctgccccaatgcacctgcaggcaaggtacccgaagaagcagaggctgagggcaggcaaagcctgtgtgactgtggcagtgccggaggccaagggggccaagaggaaaagcatctgtggtctgccctgctctcaccctgtttggttttgtttctcctggggctgtgttctgcaggcagccagaaaaggaggaggcacgggtgagctggcagggacacactgcctttggggctcctgggctcatttggatgggcaagattcgctgacaaatggctgtggggatggtggggtggatggtcagggagggatgctcagggagggatatgctggtgtgagcagccagagggagagtgtgtctccttcctgaaggaacttccaaatggaactcccgatttcaggtgggctaaaagagggcttaggtttggaaaagggtgtccttctgtgcccttgttaatttattttatagtgatttggttcaaagatgtttacaggacacacacacacacacacacacacacacacacacacccctagagaaaagtacagatttccagtggatatttcaagcacagttctgctgctgtggcttcagctttggaagctgtcaatcccggagcaactttcccaactacccaaccccaccatggccaggacatgtgcaatgccagccccttcttgtcttggcacatgcacagacccagtcccctcacggtagggcacccctgacctacgggcttccaagagagcagctgcagtggttgggaggagcttgaccagtgtgccccaaggagtggagtagagcccaatctaagtattccttgctgcttggaaccctccctgtttggaaccctccccaaagaggcagtcaggctgatgctcagtgctttgtgctccctgctccttcccgcgtagccaggtgggcccaagggtgcctggcagggagcactacccctggacccctcctgctcgctctggggaccctgccagggaaggccactgggtgttcacctgcaaagtttctggttgtcactgcacagtggtcgcgtcatccatgggtattaaaaggacactgtcaagtacttttttaaactagtttttagggttttttaaaactctctgttgtttgtaatattctcttaaaagcttgaaaataaaacttctttccctacaaaaaaagtc

SEQ ID NO: 277719 - DNA, 3893 bp, Homo sapiens
gggatctgggaagagaaacttgcggacgagggagttagagccgtggacccccggcccccgcccgggcgtcctgcgtcggaggagggtctctgggtcgggcaggggccacctcttggcccgccccttgtcgctggacgtccgaagattgggccatttcccttgccgcgcccttaccgcatatcggggtgcgcccggcccggcccggcccgccccacccagccctccgctcgcgcccggagaggaggggccgctggcgcagcgccccgggaccccgagaggccgccgcggcacatccagacctccgccgctcccgcgccctctcaaccatcctgggattcccgggcccacccgacccagcggcgcaaccctggccctccgggaccctccgctgactccaccgcgcacttcccgggacccccacacacatcccagccctccggccgatccctccctactcggtgccgggtgccccccgccctctccaggcccggatctcctcccccaggtccccggggcggccccagccaggcccccttcgaaccccgccggcggcccgggctggggcgcaccatgcggctgcggctccggcttctggcgctgctgcttctgctgctggcaccgcccgcgcgcgccccgaagccctcggcgcaggacgtgagcctgggcgtggactggctgactcgctatggttacctgccgccaccccaccctgcccaggcccagctgcagagccctgagaagttgcgcgatgccatcaaagtcatgcagaggttcgcggggctgccggagaccggccgcatggacccagggacagtggccaccatgcgtaagccccgctgctccctgcctgacgtgctgggggtggcggggctggtcaggcggcgtcgccggtacgctctgagcggcagcgtgtggaagaagcgaaccctgacatggagggtacgttccttcccccagagctcccagctgagccaggagaccgtgcgggtcctcatgagctatgccctgatggcctggggcatggagtcaggcctcacatttcatgaggtggattccccccagggccaggagcccgacatcctcatcgactttgcccgcgccttccaccaggacagctaccccttcgacgggttggggggcaccctagcccatgccttcttccctggggagcaccccatctccggggacactcactttgacgatgaggagacctggacttttgggtcaaaagacggcgaggggaccgacctgtttgccgtggctgtccatgagtttggccacgccctgggcctgggccactcctcagcccccaactccattatgaggcccttctaccagggtccggtgggcgaccctgacaagtaccgcctgtctcaggatgaccgcgatggcctgcagcaactctatgggaaggcgccccaaaccccatatgacaagcccacaaggaaacccctggctcctccgccccagcccccggcctcgcccacacacagcccatccttccccatccctgatcgatgtgagggcaattttgacgccatcgccaacatccgaggggaaactttcttcttcaaaggcccctggttctggcgcctccagccctccggacagctggtgtccccgcgacccgcacggctgcaccgcttctgggaggggctgcccgcccaggtgagggtggtgcaggccgcctatgctcggcaccgagacggccgaatcctcctctttagcgggccccagttctgggtgttccaggaccggcagctggagggcggggcgcggccgctcacggagctggggctgcccccgggagaggaggtggacgccgtgttctcgtggccacagaacgggaagacctacctggtccgcggccggcagtactggcgctacgacgaggcggcggcgcgcccggaccccggctaccctcgcgacctgagcctctgggaaggcgcgcccccctcccctgacgatgtcaccgtcagcaacgcaggtgacacctacttcttcaagggcgcccactactggcgcttccccaagaacagcatcaagaccgagccggacgccccccagcccatggggcccaactggctggactgccccgccccgagctctggtccccgcgcccccaggccccccaaagcgacccccgtgtccgaaacctgcgattgtcagtgcgagctcaaccaggccgcaggacgttggcctgctcccatcccgctgctcctcttgcccctgctggtggggggtgtagcctcccgctgatggggggagccatccagaccgaacagcgccctccacggccgagtcccccgccgctggacctggtcgggggttgtgaggcgctgcggaggccccttgtctgttcccacggacgggggctcgggcgcggactaagcaggggggatctcccgcgcaggggcggcggcggcggggaccggtcgcctggcgctgggctcagtctcctcagggtctgagaccccggcgctgccaccggaacccgccttcaggggcgcacgcgcgctgggaccatgcgtcggtcgtcgcccccgtcgttccctcccggctgccgccagggggcggtcggaccccgcctcccgagcccggggaggggcggggaggacaaggggcgggcccgcggcctcacccggagggacggcagccccggtcgcgcgctggccccgcaggaccttccttttccaggaagagccagcttttctcggagcgcagtcctgggactctccgcagccccgccccgcctggccactgcgtctggcattcctgggtcgttagaggacaggcctgactgcgaagctgtgccttgcccctctcccacccgcagtttctcaccccgttctgctcccacaaggcccccctacagtcactgccacactggtggggacctgggacccagacccggaaccagcccagatatcacccctgaggacccatgcgccacgtcctgggtggtggaatcagtggctggagggacgacccttgctctccaggctgttaaccttttccgttgctcccccgccacccacctcctcctccccaggccacccaacttgggcacctccctgggcccagaactgccttccattcaatggggaacccttctatccccaagaaccccttccctgcttgcaccctggagagaacagcttgactcccatcaactcaacgctggtggaaagacagggaccgaaccctggctcaggcctggtcattgcctcctcagcactccctcctgggaggccttagctctagagtgaggggtgggtggaacctgggggcacctcgttcaccctgtccccactccccacagttttaggatctaaatgattgcctctggaactattcttctagactatcccacatcagaatcactgggaaatttaagtttgcagatcccacactcaccctgaatcctcactcagggtggggtcaggaatctgcattttaactagtcgcggggattgtggggggcagtagctggctgtttcgtggcatttctgtggctctgcagtgttcctccaccccaggaccaatatgttcaggccacaccgatggcctgaaccccatgggtagagtcacttaggggccacttcctaagttgctgtccagcctcagtgaccccctagtgcttcctggagctgaggctgtgggcggctgtcccagcaaccaagcgaggggttgccccagttgctcatacaaacagatcagcatgaggacagaaggcaggagactttggtcagttacctgggaattctgggctgccaggaaacgatttgggcctctgtcagtttcttttccatgtatgaggagggggaaatttgtatattagaaacttattcatcccactcaggacaataaaaacgaatgtacaaaaaaaaaaa

SEQ ID NO: 277720 - DNA, 3434 bp, Homo sapiens
gggatctgggaagagaaacttgcggacgagggagttagagccgtggacccccggcccccgcccgggcgtcctgcgtcggaggagggtctctgggtcgggcaggggccacctcttggcccgccccttgtcgctggacgtccgaagattgggccatttcccttgccgcgcccttaccgcatatcggggtgcgcccggcccggcccggcccgccccacccagccctccgctcgcgcccggagaggaggggccgctggcgcagcgccccgggaccccgagaggccgccgcggcacatccagacctccgccgctcccgcgccctctcaaccatcctgggattcccgggcccacccgacccagcggcgcaaccctggccctccgggaccctccgctgactccaccgcgcacttcccgggacccccacacacatcccagccctccggccgatccctccctactcggtgccgggtgccccccgccctctccaggcccggatctcctcccccaggtccccggggcggccccagccaggcccccttcgaaccccgccggcggcccgggctggggcgcaccatgcggctgcggctccggcttctggcgctgctgcttctgctgctggcaccgcccgcgcgcgccccgaagccctcggcgcaggacgtgagcctgggcgtggactggctgactcgctatggttacctgccgccaccccaccctgcccaggcccagctgcagagccctgagaagttgcgcgatgccatcaaagtcatgcagaggttcgcggggctgccggagaccggccgcatggacccagggacagtggccaccatgcgtaagccccgctgctccctgcctgacgtgctgggggtggcggggctggtcaggcggcgtcgccggtacgctctgagcggcagcgtgtggaagaagcgaaccctgacatggagggtacgttccttcccccagagctcccagctgagccaggagaccgtgcgggtcctcatgagctatgccctgatggcctggggcatggagtcaggcctcacatttcatgaggtggattccccccagggccaggagcccgacatcctcatcgactttgcccgcgccttccaccaggacagctaccccttcgacgggttggggggcaccctagcccatgccttcttccctggggagcaccccatctccggggacactcactttgacgatgaggagacctggacttttgggtcaaaagacggcgaggggaccgacctgtttgccgtggctgtccatgagtttggccacgccctgggcctgggccactcctcagcccccaactccattatgaggcccttctaccagggtccggtgggcgaccctgacaagtaccgcctgtctcaggatgaccgcgatggcctgcagcaactctatgggaaggcgccccaaaccccatatgacaagcccacaaggaaacccctggctcctccgccccagcccccggcctcgcccacacacagcccatccttccccatccctgatcgatgtgagggcaattttgacgccatcgccaacatccgaggggaaactttcttcttcaaaggcccctggttctggcgcctccagccctccggacagctggtgtccccgcgacccgcacggctgcaccgcttctgggaggggctgcccgcccaggtgagggtggtgcaggccgcctatgctcggcaccgagacggccgaatcctcctctttagcgggccccagttctgggtgttccaggaccggcagctggagggcggggcgcggccgctcacggagctggggctgcccccgggagaggaggtggacgccgtgttctcgtggccacagaacgggaagacctacctggtccgcggccggcagtactggcgctacgacgaggcggcggcgcgcccggaccccggctaccctcgcgacctgagcctctgggaaggcgcgcccccctcccctgacgatgtcaccgtcagcaacgcaggtgacacctacttcttcaagggcgcccactactggcgcttccccaagaacagcatcaagaccgagccggacgccccccagcccatggggcccaactggctggactgccccgccccgagctctggtccccgcgcccccaggccccccaaagcgacccccgtgtccgaaacctgcgattgtcagtgcgagctcaaccaggccgcaggacgttggcctgctcccatcccgctgctcctcttgcccctgctggtggggggtgtagcctcccgctgatggggggagccatccagaccgaacagcgcccccgcctggccactgcgtctggcattcctgggtcgttagaggacaggcctgactgcgaagctgtgccttgcccctctcccacccgcagtttctcaccccgttctgctcccacaaggcccccctacagtcactgccacactggtggggacctgggacccagacccggaaccagcccagatatcacccctgaggacccatgcgccacgtcctgggtggtggaatcagtggctggagggacgacccttgctctccaggctgttaaccttttccgttgctcccccgccacccacctcctcctccccaggccacccaacttgggcacctccctgggcccagaactgccttccattcaatggggaacccttctatccccaagaaccccttccctgcttgcaccctggagagaacagcttgactcccatcaactcaacgctggtggaaagacagggaccgaaccctggctcaggcctggtcattgcctcctcagcactccctcctgggaggccttagctctagagtgaggggtgggtggaacctgggggcacctcgttcaccctgtccccactccccacagttttaggatctaaatgattgcctctggaactattcttctagactatcccacatcagaatcactgggaaatttaagtttgcagatcccacactcaccctgaatcctcactcagggtggggtcaggaatctgcattttaactagtcgcggggattgtggggggcagtagctggctgtttcgtggcatttctgtggctctgcagtgttcctccaccccaggaccaatatgttcaggccacaccgatggcctgaaccccatgggtagagtcacttaggggccacttcctaagttgctgtccagcctcagtgaccccctagtgcttcctggagctgaggctgtgggcggctgtcccagcaaccaagcgaggggttgccccagttgctcatacaaacagatcagcatgaggacagaaggcaggagactttggtcagttacctgggaattctgggctgccaggaaacgatttgggcctctgtcagtttcttttccatgtatgaggagggggaaatttgtatattagaaacttattcatcccactcaggacaataaaaacgaatgtacaaaaaaaaaaa

SEQ ID NO: 277721 - DNA, 5354 bp, Homo sapiens
gggatctgggaagagaaacttgcggacgagggagttagagccgtggacccccggcccccgcccgggcgtcctgcgtcggaggagggtctctgggtcgggcaggggccacctcttggcccgccccttgtcgctggacgtccgaagattgggccatttcccttgccgcgcccttaccgcatatcggggtgcgcccggcccggcccggcccgccccacccagccctccgctcgcgcccggagaggaggggccgctggcgcagcgccccgggaccccgagaggccgccgcggcacatccagacctccgccgctcccgcgccctctcaaccatcctgggattcccgggcccacccgacccagcggcgcaaccctggccctccgggaccctccgctgactccaccgcgcacttcccgggacccccacacacatcccagccctccggccgatccctccctactcggtgccgggtgccccccgccctctccaggcccggatctcctcccccaggtccccggggcggccccagccaggcccccttcgaaccccgccggcggcccgggctggggcgcaccatgcggctgcggctccggcttctggcgctgctgcttctgctgctggcaccgcccgcgcgcgccccgaagccctcggcgcaggacgtgagcctgggcgtggactggctgactcgctatggttacctgccgccaccccaccctgcccaggcccagctgcagagccctgagaagttgcgcgatgccatcaaagtcatgcagaggttcgcggggctgccggagaccggccgcatggacccagggacagtggccaccatgcgtaagccccgctgctccctgcctgacgtgctgggggtggcggggctggtcaggcggcgtcgccggtacgctctgagcggcagcgtgtggaagaagcgaaccctgacatggagggtacgttccttcccccagagctcccagctgagccaggagaccgtgcgggtcctcatgagctatgccctgatggcctggggcatggagtcaggcctcacatttcatgaggtggattccccccagggccaggagcccgacatcctcatcgactttgcccgcgccttccaccaggacagctaccccttcgacgggttggggggcaccctagcccatgccttcttccctggggagcaccccatctccggggacactcactttgacgatgaggagacctggacttttgggtcaaaaggcctctcagcagctggagcaggagctggcaggcggctcaccggttgatgaggagctgggcttcagccggggctggcgtgtgaatcctctgggtcctggcagtcctgagcgcctgagctgaatacagagggaagaggctgggagcaaggccgggtgctggggccggcaggctgtgttctgagagtgcctgctagaggagctctgtgttcccaaggagatggaggaagacctggggtgggggtggtacagggtagggagaggaggggcagaggctgtgaacagggagatgggggaggggggatggaggactcaagggatgtaagggatatggcttgaggagggatgggggcaggaatgagggaaggtcttgggtcaaggacatggacctacatccccagcagatgggggtggcaagggggagacgggtgggggtcgctgactatagactgtagctgggaggaggggatgctcccagggctggggctgcctgaagagaatggcacgcaccttgtaggctcctgccctcaccccaccgccctcttaagtttcttttattttctttttctttttttttctttttactttttttgagacggggccttattctgtcctccaggctggagtgcaatgacatggtcatgcgtcactgcagcctccacctcccgggctccagcgattctcctgcctccctgcctcagcctgggacctgagtagctgggaccacaggcatgcgccaccactcctggccaatttttaaaatttttttgtaagagatggggatctccttatgttgtccaggccagtcttgaactcttgggctcaagcgatcctcccacctgggactccaaaagtgctgggtttacaggcatgagccaccacacccagctcctccccctcaaacttctgtgcacaaagtgctcccttcccagaggaggggccccatcggtgtgtaaggtggcctattcctctgtgtgttctctggatcttttcagccctgtggtccagtgtccatcacagccatgctgactgagtgactggagacagggatgatggagagttcaggaagggctgggcagaggaggctggggccacctctggagggtgtcctgctgttcctgttggccccagctgcactcgcagggccttcctgtggcccctttccccaagcaggggcggccgcagctctcacccactttctcctgcagacggcgaggggaccgacctgtttgccgtggctgtccatgagtttggccacgccctgggcctgggccactcctcagcccccaactccattatgaggcccttctaccagggtccggtgggcgaccctgacaagtaccgcctgtctcaggatgaccgcgatggcctgcagcaactctatggtagggggagagggacctgccgcgaaaccatcattgccccatccagtgtcctctgcagcaaggccaggggacgcacacctgcctgactctttcctcacagggaaggcgccccaaaccccatatgacaagcccacaaggaaacccctggctcctccgccccagcccccggcctcgcccacacacagcccatccttccccatccctgatcgatgtgagggcaattttgacgccatcgccaacatccgaggggaaactttcttcttcaaaggcccctggttctggcgcctccagccctccggacagctggtgtccccgcgacccgcacggctgcaccgcttctgggaggggctgcccgcccaggtgagggtggtgcaggccgcctatgctcggcaccgagacggccgaatcctcctctttagcgggccccagttctgggtgttccaggaccggcagctggagggcggggcgcggccgctcacggagctggggctgcccccgggagaggaggtggacgccgtgttctcgtggccacagaacgggaagacctacctggtccgcggccggcagtactggcgctacgacgaggcggcggcgcgcccggaccccggctaccctcgcgacctgagcctctgggaaggcgcgcccccctcccctgacgatgtcaccgtcagcaacgcaggtggggagcgcggtgacctgcgggttactgggcctgggggtggggagagggatgtggggaatggggacatggaggccaccctgcggggatgggggtccttgggcatcagggagcggcggggcggggagggaccgggactcaagctctgctcctccaggtgacacctacttcttcaagggcgcccactactggcgcttccccaagaacagcatcaagaccgagccggacgccccccagcccatggggcccaactggctggactgccccgccccgagctctggtccccgcgcccccaggccccccaaagcgacccccgtgtccgaaacctgcgattgtcagtgcgagctcaaccaggccgcaggacgttggcctgctcccatcccgctgctcctcttgcccctgctggtggggggtgtagcctcccgctgatggggggagccatccagaccgaacagcgccctccacggccgagtcccccgccgctggacctggtcgggggttgtgaggcgctgcggaggccccttgtctgttcccacggacgggggctcgggcgcggactaagcaggggggatctcccgcgcaggggcggcggcggcggggaccggtcgcctggcgctgggctcagtctcctcagggtctgagaccccggcgctgccaccggaacccgccttcaggggcgcacgcgcgctgggaccatgcgtcggtcgtcgcccccgtcgttccctcccggctgccgccagggggcggtcggaccccgcctcccgagcccggggaggggcggggaggacaaggggcgggcccgcggcctcacccggagggacggcagccccggtcgcgcgctggccccgcaggaccttccttttccaggaagagccagcttttctcggagcgcagtcctgggactctccgcagccccgccccgcctggccactgcgtctggcattcctgggtcgttagaggacaggcctgactgcgaagctgtgccttgcccctctcccacccgcagtttctcaccccgttctgctcccacaaggcccccctacagtcactgccacactggtggggacctgggacccagacccggaaccagcccagatatcacccctgaggacccatgcgccacgtcctgggtggtggaatcagtggctggagggacgacccttgctctccaggctgttaaccttttccgttgctcccccgccacccacctcctcctccccaggccacccaacttgggcacctccctgggcccagaactgccttccattcaatggggaacccttctatccccaagaaccccttccctgcttgcaccctggagagaacagcttgactcccatcaactcaacgctggtggaaagacagggaccgaaccctggctcaggcctggtcattgcctcctcagcactccctcctgggaggccttagctctagagtgaggggtgggtggaacctgggggcacctcgttcaccctgtccccactccccacagttttaggatctaaatgattgcctctggaactattcttctagactatcccacatcagaatcactgggaaatttaagtttgcagatcccacactcaccctgaatcctcactcagggtggggtcaggaatctgcattttaactagtcgcggggattgtggggggcagtagctggctgtttcgtggcatttctgtggctctgcagtgttcctccaccccaggaccaatatgttcaggccacaccgatggcctgaaccccatgggtagagtcacttaggggccacttcctaagttgctgtccagcctcagtgaccccctagtgcttcctggagctgaggctgtgggcggctgtcccagcaaccaagcgaggggttgccccagttgctcatacaaacagatcagcatgaggacagaaggcaggagactttggtcagttacctgggaattctgggctgccaggaaacgatttgggcctctgtcagtttcttttccatgtatgaggagggggaaatttgtatattagaaacttattcatcccactcaggacaataaaaacgaatgtacaaaaaaaaaaa

SEQ ID NO: 277722 - DNA, 479 bp, Homo sapiens
gctctcacccactttctcctgcagacggcgaggggaccgacctgtttgccgtggctgtccatgagtttggccacgccctgggcctgggccactcctcagcccccaactccattatgaggcccttctaccagggtccggtgggcgaccctgacaagtaccgcctgtctcaggatgaccgcgatggcctgcagcaactctatggtagggggagagggacctgccgcgaaaccatcattgccccatccagtgtcctctgcagcaaggccaggggacgcacacctgcctgactctttcctcacagggaaggcgccccaaaccccatatgacaagcccacaaggaaacccctggctcctccgccccagcccccggcctcgcccacacacaggtgagtcccccaccaactcggagaccttgggtgaccagctgcccagcctcagtgtcctctgagatggggatggtgggggtccctgccttggag

SEQ ID NO: 277723 - DNA, 1296 bp, Homo sapiens
  misc_feature (181)..(181): n is a, c, g, or t
  misc_feature (188)..(188): n is a, c, g, or t
  misc_feature (191)..(191): n is a, c, g, or t
gcagtacgtagcgatttcgtttcccctcagtcctttagccgtgcacccggccgatggtgtgtgctcttgattctgagcgaatagagtgcccagtaaagtgcgatggtgggctcgtcaacgaattcagaagcaccgggagatacgttgagcttcatgaaatgactccgtgctgagtagaaangtgtgcngancaagtctttatctgcaaactctagtcatgatgtttgagtttgtctccctgtggagcaggggtccccagcccccgacccccgcatcggtccatggcctgtcaggaactgggccacacagcaggagttgaactgcagaaaattaatgcaaaacttcatgatggagtatgtcagcgctgtaaagaagttcttgagtggcgtgtaaaatacagcaaatacaaaccattatcaaaacctaaaaagtgtgttaaatgtttacaaaagacagtgaaggattcttatcacataatgtgcaggccatgtgcctgtgaacttgaagtttgcgcaaaatgtggaaagaaagaagacattgttattccgttgaataaagaaacagaaaaaatagaacatactgaaaataatctaagttccaaccatagaagaagctgcagaagaaatgaagaaagtgatgatgatttagattttgatattgatttagaagacacaggaggattgcttgaaccctggaggcggagattgaagtgagctgagttcgtgccattacactccagcctgggtgacagagtgagactctgtctcaaaaaaaataaaataaaaagtcaatttagaatgtgaaattctgaccaccttttggctttgagtattttccaaaagatatttgaaatcctaatgaggaaatcagaaaaagctatggaaaaatagacaaatttcatacatgaacaatataaattgtgtatattacttaacatcaaactaaacaagattcagaattgatggttgtataagaactagctcatgtaaaaataaaataacattattacattgcctcaaaaattggtcctcggtaagtgccttttgataaatgatctcaaataaatgactcatagcaaaagccctgtcgcttatgtttaatttttacaaagtaaaagcaattttttccaaataataatgtttaacaagcgtatagcaattctgctttgtatttttatatatttcatcacattttaacttttttctcgtgaaatgtacatacagaaaaagtgcatataatttatacactttataagtgtatgcattttttataataattataaaggaaagttcatgc

SEQ ID NO: 277724 - DNA, 1537 bp, Homo sapiens
  misc_feature (3)..(4): n is a, c, g, or t
ggnncgaggctgcgccgcgtggagtggcttggcttaacagcagggagggcagagcgatgctctttgacctcccagaagagtcacgtgggctgacccagagccggggcggaaaggctgcgttagtttcttccgggtcattgacagaagcgtcaattcctgggagtagttcgttggttttctttcccctcatccttttgcctgctcccggcgaggggtggctttgatttcggcgatgagctcccagaaaggcaacgtggctcgttccagacctcagaagcaccagaatacgtttagcttcaaaaatgacaagttcgataaaagtgtgcagaccaagaaaattaatgcaaaacttcatgatggagtatgtcagcgctgtaaagaagttcttgagtggcgtgtaaaatacagcaaatacaaaccattatcaaaacctaaaaagtgtgttaaatgtttacaaaagacagtgaaggattcttatcacataatgtgcaggccatgtgcctgtgaacttgaagtttgcgcaaaatgtggaaagaaagaagacattgttattccgttgaataaagaaacagaaaaaatagaacatactgaaaataatctaagttccaaccatagaagaagctgcagaagaaatgaagaaagtgatgatgatttagattttgatattgatttagaagacacaggaggagaccatcaaatgaattaatatcactgtattaaaagtctgccgggcacagtggctcacgcctgtaatcccaacactttgggaggccaaggagggtggatcacctgaggtcaggagttcgagaccagcctggccaacatggcggaaccccatctccactaaaagtacaaaaaattagctgggcgtggtggctcatgcctgtaatcccagctactcaggaggctgaggcaggaggattgcttgaaccctggaggcggagattgaagtgagctgagttcgtgccattacactccagcctgggtgacagagtgagactctgtctcaaaaaaaataaaataaaaagtcaatttagaatgtgaaattctgaccaccttttggctttgagtattttccaaaagatatttgaaatcctaatgaggaaatcagaaaaagctatggaaaaatagacaaatttcatacatgaacaatataaattgtgtatattacttaacatcaaactaaacaagattcagaattgatggttgtataagaactagctcatgtaaaaataaaataacattattacattgcctcaaaaattggtcctcggtaagtgccttttgataaatgatctcaaataaatgactcatagcaaaagccctgtcgcttatgtttaatttttacaaagtaaaagcaattttttccaaataataatgtttaacaagcgtatagcaattctgctttgtatttttatatatttcatcacattttaacttttttctcgtgaaatgtacatacagaaaaagtgcatataatttatacactttataagtgtatgcattttttataataattataaaggaaagttcatgc

SEQ ID NO: 277725 - DNA, 1057 bp, Homo sapiens
ccattgagttatgagtcttttatatatattctagatacaagtcctttatcagatataatttggaaatattttctcgctgtctgtaatgtgttatacatcaattttaagatatccttcacattaagaaactaacggtgtggataataatcctggtattgacagaggtttggactcctgaagcctgaaagtctatctgctgccacgcctgggcacatactgcatcatttacaaaactgtagagcacctgttgtgtgtgcagttgtgatttcttatagatttttagaattggaaggcatgtaaagaacacgtaatctggtacattgcttcagtaggtaagtcagtatgaacttctaagaatttttgttttcttctgtattgggtctattgtgggtatgtccaacgtgacaggggaggtaagggaagtggcatcccctgagatagtgactgaaatggctttcatcatctttaagtcaaagtgagatgccagtaataggatatatgtatgtatgtacttgtgtctctgtatgtatgtaaataaacaaacatgctggaaggaggaggtgattcaatcagggactttgtgaaagaaaaaaagaataactggaccttcctttaatgatgaaaactgtttatacagcaaaccatcaaagccaaaatgtgaattttggtattagcccgatttttcctaagaaactgttgatgtaaccactgtagttgcagagatcgttttggtatattctagaccctctttgttttgttctgtttggggtttcttccccctcaagttgctcttgtccaccactagactggctgccttttattccatagcagacagtccttaagtctttgcatatgtccttattcaaaaattaatcttcatcagtttttttctgcagaaaacagttttttaaatatcttacatgagaatgctctgcacctgcaatctctggttgatgcagtttcctttctctcttctctgttcccattggtagaataaatctgctccttcttaaatcctgagctgaaaatgtccacacttcccagaagtgtactttag

SEQ ID NO: 277726 - DNA, 1180 bp, Homo sapiens
  misc_feature (3)..(4): n is a, c, g, or t
ggnncgaggctgcgccgcgtggagtggcttggcttaacagcagggagggcagagcgatgctctttgacctcccagaagagtcacgtgggctgacccagagccggggcggaaaggctgcgttagtttcttccgggtcattgacagaagcgtcaattcctgggagtagttcgttggttttctttcccctcatccttttgcctgctcccggcgaggggtggctttgatttcggcgatgagctcccagaaaggcaacgtggctcgttccagacctcagaagcaccagaatacgtttagcttcaaaaatgacaagttcgataaaagtgtgcagaccaagacatactgcatcatttacaaaactgtagagcacctgttgtgtgtgcagttgtgatttcttatagatttttagaattggaaggcatgtaaagaacacgtaatctggtacattgcttcagtaggtaagtcagtatgaacttctaagaatttttgttttcttctgtattgggtctattgtgggtatgtccaacgtgacaggggaggtaagggaagtggcatcccctgagatagtgactgaaatggctttcatcatctttaagtcaaagtgagatgccagtaataggatatatgtatgtatgtacttgtgtctctgtatgtatgtaaataaacaaacatgctggaaggaggaggtgattcaatcagggactttgtgaaagaaaaaaagaataactggaccttcctttaatgatgaaaactgtttatacagcaaaccatcaaagccaaaatgtgaattttggtattagcccgatttttcctaagaaactgttgatgtaaccactgtagttgcagagatcgttttggtatattctagaccctctttgttttgttctgtttggggtttcttccccctcaagttgctcttgtccaccactagactggctgccttttattccatagcagacagtccttaagtctttgcatatgtccttattcaaaaattaatcttcatcagtttttttctgcagaaaacagttttttaaatatcttacatgagaatgctctgcacctgcaatctctggttgatgcagtttcctttctctcttctctgttcccattggtagaataaatctgctccttcttaaatcctgagctgaaaatgtccacacttcccagaagtgtactttag

SEQ ID NO: 277727 - DNA, 768 bp, Homo sapiens
  misc_feature (3)..(4): n is a, c, g, or t
ggnncgaggctgcgccgcgtggagtggcttggcttaacagcagggagggcagagcgatgctctttgacctcccagaagagtcacgtgggctgacccagagccggggcggaaaggctgcgttagtttcttccgggtcattgacagaagcgtcaattcctgggagtagttcgttggttttctttcccctcatccttttgcctgctcccggcgaggggtggctttgatttcggcgatgagctcccagaaaggcaacgtggctcgttccagacctcagaagcaccagaatacgtttagcttcaaaaatgacaagttcgataaaagtgtgcagaccaagaaaattaatgcaaaacttcatgatggagtatgtcagcgctgtaaagaagttcttgagtggcgtgtaaaatacagcaaatacaaaccattatcaaaacctaaaaagtgatggagtctccctctgttgcccaggctggagtgcagtggcaggatcttgggctcaccacaacctccgcctcccttgttcaagtgattctcctgcctcagcctctcgagtatagctgggattacaggcacacaccaccatgcccagctaatttttgtatttttagtagaaacaggttttcacaatgttggccaggatggtctccatctactgaccttgtgatccgcccccctaggcctcccaaagtgctgggcttacaggcatgagccactgcacccagccgactgaacatcttttcatgtgtttattagccaatcctatatcttcac

SEQ ID NO: 277728 - DNA, 802 bp, Homo sapiens
  misc_feature (3)..(4): n is a, c, g, or t
ggnncgaggctgcgccgcgtggagtggcttggcttaacagcagggagggcagagcgatgctctttgacctcccagaagagtcacgtgggctgacccagagccggggcggaaaggctgcgttagtttcttccgggtcattgacagaagcgtcaattcctgggagtagttcgttggttttctttcccctcatccttttgcctgctcccggcgaggggtggctttgatttcggcgatgagctcccagaaaggcaacgtggctcgttccagacctcagaagcaccagaatacgtttagcttcaaaaatgacaagttcgataaaagtgtgcagaccaaggtaggaacctgcctgttgcaccgtctttgactccaggaaggaatggctcactggagaggggagagaggaaatgagaggagtcggctggggcgagtgtggaccgcagcccagagttagtcttggctgcagtgcaactctttcttatttgatggtcagcacacttaactaattgcagagtgaacaggaccctaatgaaatctaaggtgcagatggggcagttacgtcgttcagcgttcccatctggatcacattagcagagggaaacgaggattgtggcatgagtggctctttcaaattttacaccaagtttatgcagctacgatttttttttccaaaaaccccaagcccatagaggaaatgtgaatgattaagctgtcttaggctgtcctcactagtattgtgtgaaatttctgttttgtaacaattgttttgaagataaaaatatttggttaatgtaaaaatacttgt

SEQ ID NO: 277729 - DNA, 1430 bp, Homo sapiens
  misc_feature (3)..(4): n is a, c, g, or t
ggnncgaggctgcgccgcgtggagtggcttggcttaacagcagggagggcagagcgatgctctttgacctcccagaagagtcacgtgggctgacccagagccggggcggaaaggctgcgttagtttcttccgggtcattgacagaagcgtcaattcctgggagtagttcgttggttttctttcccctcatccttttgcctgctcccggcgaggggtggctttgatttcggcgatgagctcccagaaaggcaacgtggctcgttccagacctcagaagcaccagaatacgtttagcttcaaaaatgacaagttcgataaaagtgtgcagaccaagtgttaaatgtttacaaaagacagtgaaggattcttatcacataatgtgcaggccatgtgcctgtgaacttgaagtttgcgcaaaatgtggaaagaaagaagacattgttattccgttgaataaagaaacagaaaaaatagaacatactgaaaataatctaagttccaaccatagaagaagctgcagaagaaatgaagaaagtgatgatgatttagattttgatattgatttagaagacacaggaggagaccatcaaatgaattaatatcactgtattaaaagtctgccgggcacagtggctcacgcctgtaatcccaacactttgggaggccaaggagggtggatcacctgaggtcaggagttcgagaccagcctggccaacatggcggaaccccatctccactaaaagtacaaaaaattagctgggcgtggtggctcatgcctgtaatcccagctactcaggaggctgaggcaggaggattgcttgaaccctggaggcggagattgaagtgagctgagttcgtgccattacactccagcctgggtgacagagtgagactctgtctcaaaaaaaataaaataaaaagtcaatttagaatgtgaaattctgaccaccttttggctttgagtattttccaaaagatatttgaaatcctaatgaggaaatcagaaaaagctatggaaaaatagacaaatttcatacatgaacaatataaattgtgtatattacttaacatcaaactaaacaagattcagaattgatggttgtataagaactagctcatgtaaaaataaaataacattattacattgcctcaaaaattggtcctcggtaagtgccttttgataaatgatctcaaataaatgactcatagcaaaagccctgtcgcttatgtttaatttttacaaagtaaaagcaattttttccaaataataatgtttaacaagcgtatagcaattctgctttgtatttttatatatttcatcacattttaacttttttctcgtgaaatgtacatacagaaaaagtgcatataatttatacactttataagtgtatgcattttttataataattataaaggaaagttcatgc

SEQ ID NO: 277730 - DNA, 856 bp, Homo sapiens
  misc_feature (3)..(4): n is a, c, g, or t
ggnncgaggctgcgccgcgtggagtggcttggcttaacagcagggagggcagagcgatgctctttgacctcccagaagagtcacgtgggctgacccagagccggggcggaaaggctgcgttagtttcttccgggtcattgacagaagcgtcaattcctgggagtagttcgttggttttctttcccctcatccttttgcctgctcccggcgaggggtggctttgatttcggcgatgagctcccagaaaggcaacgtggctcgttccagacctcagaagcaccagaatacgtttagcttcaaaaatgacaagttcgataaaagtgtgcagaccaaggtaggaacctgcctgttgcaccgtctttgactccaggaaggaatggctcactggagaggggagagaggaaatgagaggagtcggctggggcgagtgtggaccgcagcccagagttagtcttggctgcagtgcaactctttctaaaatgttattctcacgccctttctttgacctggacatgttgtctcctggtaaatatttgatggtcagcacacttaactaattgcagagtgaacaggaccctaatgaaatctaaggtgcagatggggcagttacgtcgttcagcgttcccatctggatcacattagcagagggaaacgaggattgtggcatgagtggctctttcaaattttacaccaagtttatgcagctacgatttttttttccaaaaaccccaagcccatagaggaaatgtgaatgattaagctgtcttaggctgtcctcactagtattgtgtgaaatttctgttttgtaacaattgttttgaagataaaaatatttggttaatgtaaaaatacttgt

SEQ ID NO: 277731 - DNA, 769 bp, Homo sapiens
  misc_feature (3)..(4): n is a, c, g, or t
ggnncgaggctgcgccgcgtggagtggcttggcttaacagcagggagggcagagcgatgctctttgacctcccagaagagtcacgtgggctgacccagagccggggcggaaaggctgcgttagtttcttccgggtcattgacagaagcgtcaattcctgggagtagttcgttggttttctttcccctcatccttttgcctgctcccggcgaggggtggctttgatttcggcgatgagctcccagaaaggcaacgtggctcgttccagacctcagaagcaccagaatacgtttagcttcaaaaatgacaagttcgataaaagtgtgcagaccaagaaaattaatgcaaaacttcatgatggagtatgtcagcgctgtaaagaagttcttgagtggcgtgtaaaatacagcaaatacaaaccattatcaaaacctaaaaagtgatggagtctccctctgttgcccaggctggagtgcagtggcaggatcttgggctcaccacaacctccgcctcccttgttcaagtgattctcctgcctcagcctctcgagtagctgggactacaggcgcacaccaccatgcccagctaatctttgtatttttagtagagatggggtttcactatgttggccaggccggtctcgaactcctgacctcatgatctgcctgcctcaacctcccaaagtgctggaattacaggtgtgagccatcatgcctggcctaatttgtatatttctaatgactcatgatgttgactgagcatcttttctt

SEQ ID NO: 277732 - DNA, 812 bp, Homo sapiens
  misc_feature (3)..(4): n is a, c, g, or t
  misc_feature (692)..(692): n is a, c, g, or t
ggnncgaggctgcgccgcgtggagtggcttggcttaacagcagggagggcagagcgatgctctttgacctcccagaagagtcacgtgggctgacccagagccggggcggaaaggctgcgttagtttcttccgggtcattgacagaagcgtcaattcctgggagtagttcgttggttttctttcccctcatccttttgcctgctcccggcgaggggtggctttgatttcggcgatgagctcccagaaaggcaacgtggctcgttccagacctcagaagcaccagaatacgtttagcttcaaaaatgacaagttcgataaaagtgtgcagaccaagaaaattaatgcaaaacttcatgatggagtatgtcagcgctgtaaagaagttcttgagtggcgtgtaaaatacagcaaatacaaaccattatcaaaacctaaaaagtgatggagcctgggcaacaagagtgaaactccatctcaaataaataaataaataataaattaaaaaactaaaatcatctggccaactcattgaagcattggaagtgggagtaaaataacatggacaaaacccatcttgtctgtagaaggatcttgtaacacttactatctctgaggttccctctggtggcgatggcagcttaacggaggaggaacaagctaaatgaggaagacagaagtctgtcggtggacanttggagatcgatgctgctggccctccctgtctctgttccttctctttctagttcattttccatactgctgctgtgtttgttttcctaaaataccattttctgaatgaattcctgcctcca

SEQ ID NO: 277733 - DNA, 337 bp, Homo sapiens
aaaggaaccagtgggtctctagctgatgtatttgccaatactcgaatagagaatttctctgctcctcctgatgtcactacaactacctcttcctcctcatcatcttcctcaattcgcccagcaaacattgacctgcccccctcggggatagttaaaggcatgcacaaaggatccaacaggtccagccttatggatacagctgatggtgttcctgtcagtagcagagtatctacaaaaatccagcagcttctgaacactctgaaacgacccaaaaggcctcccttaaaggaattttttgtggatgactctgaagaaattgtggaaggtagtagtaaaa

SEQ ID NO: 277734 - DNA, 446 bp, Homo sapiens
tttactctatttcagcacccaaggacctaagacaggcagctgcatttcctaatcctgattccttaaagtaaactgttacagccagttagtgtgatcctggagtgtgtccagctgcagaggcaagagctagtacctgtgtggcagaccggaaatagatttcaaaatgcacagctgcagaattcaggagtagaatgaaggcctagggtcaagccctgtttttcatcgtgggctcctccattcacgctcgttgacacctttcctggccatgctgtttaacttccatgtcaagaaaaaaccctgacaaagcctggtaatactgacacaagtggagtgtacttaagcagagagggagtgatgttcactaggctgttgttcttccccaccctttggcatttgtgtcgtgtcctgacgccttgtttgtgtcttccgccttcagtgctgttccc

SEQ ID NO: 277735 - DNA, 510 bp, Homo sapiens
cgatggatctttgtctgaaggacttctcctggagaacactgtagtagatggaaccacaggagcatcaagggaagaattctttgatggttgctacaataattccagctgtgtatacctcctgggatcataatagaaatgaacctctgaagcatcttactgaagaaggcccctacgttgactgtccagctgactgtctctacccgactgctgtcccacacaatatgggccaggcgatggtattgcctttgcaaactaaatgaagttcctcaaagtgaagctggtggcgacttcagagttaacttttcaaatggccgggcttatatagaataacctttgtaaaagtaaactatgatcatataataagatacatgtgcatttggaacgccactgcttttggaacctgtctcagtttttatcatcatacaaggttaattgtctaatgtcaattagattttatcacagtgcatttgggtcctaatctggaacaataaaagtctattaaacagcaaa

SEQ ID NO: 277736 - DNA, 6653 bp, Homo sapiens
gcgtgagcctgtgcgtgtgctcacacgcgcattttggcagggctgaatcacaagaggactcgcagttgatacccagactcaccaaaaaattgagctgtgaatttggggaggcaggtacgtgctgggaaggaagctaaaggagaacaacagctttgtgtgctgatgaagtaaacagacagttgcagatctgatctcttctgaacacctcatcgtgtctccatccctgggaatctgaccctagcaactggaccactttgttcttggaattttgggtgtcctcttttctcacctttcccttttcccttttccccttccccctcctgagaactccggaagactgtagagattgtcatggagtccagggaaaccttaagcagctcccggcaaagagggggcgagtcagacttcctgccggtctcctcagccaagcccccagctgctcctggctgtgcaggagaacctttgctctccactccaggacctgggaaggggatcccggtgggcggagagcgcatggagccagaggaggaggatgaactaggctcagggcgggatgtggattccaactccaacgcggacagtgagaaatgggtggcaggagatggtttggaagagcaggaattttctatcaaggaggcaaacttcacagagggaagtctgaagctaaagattcagaccacaaagcgggctaagaaacccccaaagaatttggagaactatatatgtccacctgagatcaagatcaccatcaagcagtctggggaccagaaggtgtcccgtgctggaaaaaatagcaaagccacgaaggaggaagaaagaagccactccaaaaagaagctcctcacagccagtgaccttgcagccagtgacctcaaaggatttcagccacaggcttacgaaaggccccagaaacattcaactctccattatgacacgggcctcccacaggacttcaccggtgacaccttaaaaccaaagcaccagcaaaaaagcagcagccagaaccacatggactggtccaccaactctgacagcggacccgtcactcagaattgcttcatcagtccagagtctggcagagaaactgcaagcaccagcaagatccccgctcttgagcccgtggcttcctttgcaaaggcccagggtaagaaaggcagtgcagggaacacgtggagtcagttgtctaacaataacaaagatctgctcttgggaggtgtggctccatccccaagcagccacagctcaccagccccacccagcagctctgctgagtgcaacgggcttcagcccttggtggatcaagatggaggaggtacaaaggagcccccagaaccacctacggtgggcagcaagaaaaagtccagtaaaaaagatgtgataagtcagaccataccaaacccagacctggattgggtcaagaatgcccagaaagcatttgacaatacagaagggaaaagggaaggttattccgcagatagtgcccaagaggcatcaccagccaggcagaacgtgagttctgccagtaatcctgaaaatgactcaagtcatgtccggattactatccccatcaaggcaccctctctggatccaaccaaccataagaggaaaaaaagacagtccattaaagcggtggtggaaaagatcatgccagagaaagccttggcttctggaatcaccatgagcagtgaagtagttaacaggatactttccaactctgaggggaataagaaggatccccgtgtccctaagttgagtaaaatgatagagaatgagtccccctcagttggccttgaaactggtggaaatgctgagaaagttatcccaggaggtgtgtctaagccgcggaagccacccatggtcatgacacctccaacgtgcacagatcactctccatccagaaagctgccagaaatccagcatccaaaatttgctgcaaaacgaaggtggacttgcagcaaaccaaaacctagcaccatgcttcgagaggcagttatggccacctctgataaactgatgctggagcccccgtctgcatatcccatcaccccatccagccctctctacaccaacacagacagtcttactgtgatcactccagtcaaaaagaagcggggacgaccaaagaagcagcctttgctcacagtcgagacgattcatgagggaacttccaccagccccgtcagtcccatcagccgagagtttcctggcactaagaaaagaaagcgacgacgcaatttagcgaagttggcccagctagtgccgggagaggacaaacccatgagcgagatgaaatttcacaagaaagttggaaagctcggcgtgttggataagaagaccatcaaaactatcaataagatgaagacactcaagaggaaaaacatcttgaatcagatcttgtcctgttccagcagcgttgctctgaaggcaaaagctcccccagagaccagccctggggcagcagccattgaaagcaaactgggcaagcagattaatgtcagcaagaggggaaccatctacattggcaagaagcggggcaggaagccaagagcagagctgccacccccatccgaagaacccaaaacagccatcaagcaccccaggcctgtttctagccagccggatgttccagccgtgccttccaactttcagtcacttgtggcgtcttcaccagcagctatgcacccactttcaacacagttaggtgggtccaatggcaacctgagccctgccagcactgaaaccaatttttcagagttgaaaactatgccaaatctccagcccatcagtgctcttccaaccaaaacccaaaagggaatacacagtggaacctggaagctgtctccacccagactgatggccaactccccttcacacctgtgcgagattggctccctaaaggaaatcacgctgtcccctgtgagcgagtcccacagtgaggagacgatccccagcgacagcggcattgggacagacaacaacagcacttctgaccaagcggagaagagctcagaatcccgaaggaggtactcttttgatttctgctccctggacaacccggaggccattccgtccgacaccagcacaaagaaccggcatggccaccggcaaaagcatctcattgtggacaactttctggcccacgaaagcctcaagaagccaaagcacaagaggaaacggaaaagcctgcaaaaccgcgatgacctccagtttctggcagacctggaggagctaatcaccaagttccaagtgttcagaatctcccaccggagttacaccttctaccacgagaatccatatcccagcatttttcggattaattttgatcactattacccggtgccatatatccagtatgacccgttgctctatcttcgtaggacttcagacttgaagtcaaagaagaagcgtggtaggcctgcaaaaaccaatgacaccatgacaaaggtgccttttttacaagggttcagctaccctattcccagtggaagttactatgcaccctatggaatgccttacacatcaatgcctatgatgaaccttggttattacggtcagtacccagctcctttgtacctatcgcacacgcttggagcagcttccccattcatgaggccaacagtgccaccacctcagttccacacaaactcccacataaagatgtccggtgcagctaagcataaagccaagcatggagtacacctgcagggacctgttagcatgggccttggtgacatgcagccttctctgaaccctcccaaggtaggcagtgccagtctgtccagtggtcggctccataagaggaaacacaaacacaagcataagcacaaggaagaccggatcctagggacccatgacaacctgagtggtctttttgcaggcaaagccacaggcttctccagccacatcctgagcgagcggctgagtagcgcagacaaagagctcccgctggtgagtgagaagaacaagcataaggagaaacagaagcaccagcacagcgaagccggccacaaagcttctaagaacaactttgaggtggacaccctgtctacactgtcactttccgacgcccagcattggacacaggccaaggaaaaaggagacttgagcagtgagcctgtggactcatgcacgaaaagatactctggcagtggcggggatggtggcagcacgagatcggagaacctggacgtgttcagtgaaatgaacccttcgaatgacaagtgggacagtgacgtgagtgggagtaaaaggaggagctatgaaggctttggaacgtacagggaaaaggacatccaagccttcaagatgaaccgcaaggagagaagttcttatgactcctccatgtctccagggatgccaagtccccacttaaaagtggaccagacagcagtgcatagtaagaacgaaggctcagtgcccaccatgatgaccaggaagaagccagccgcagttgacagtgttacaattccaccagccccagtgttatctctccttgctgcatctgcagcaacgtcggatgcagtcggctcctccctgaagaagaggttcaagcggcgggagatcgaagccatccagtgcgaagtgcggaagatgtgcaactacaccaagatcctgtccaccaagaagaacctggaccacgtgaacaagatcctgaaggccaagcggctgcagagacaatcaaaaacaggcaacaacttcgtgaagaagaggcgcgggcgtcccaggaagcagcccacccagttcgatgaggactccagagaccaaatgccggtgctggaaaaatgcatcgacctgcccagcaaaagaggccagaagcccagcctgagcccgctggtgctggagcccgccgccagccaagacaccatcatggccaccatcgaggcggtcatccacatggcccgggaggcgccgcccctgcccccgccaccgccgccgcccctgccgccaccgccgccaccacccctgcccccgccaccccctctacccaagaccccccgaggcggaaagaggaaacacaaaccgcaggcccccgctcagcccccacagcagtcgcccccgcagcagccccttccccaggaagaggaggtgaaagccaaaaggcagaggaagtcccgagggagtgagagcgaggtccttccctagggcgggtctgggcgtctgcacctggggcctagggaactgacacgtgggaagcgcagtgagccggggcgggggcggaatcccccgctgcagggacacccacgcccttctctccagaagccgggcaggcagaatccggccagacgacggggctgagccatcaggagctcttgggaaagcaaagcagggagacaccttcagaagaagcttgtctgagcttcaccgcagctcccaccacgcggcgcttcagtacggctggatcctccgcaggcgagcggaaggcccccaggaggagcaggctggtggcactctcctgacctcacgctgccaaggtgcgccctcgactcccgatttcatttgctggccaggaaaatcgaaagggaaacaccctcaattaggaaacattccaaggggagaaaagctgcaaattgctcaactggcattgctgtaacccgttccatttaattggtttttatttcttttgattttcaagctctgctaagctttggggtaccaacgtcatcttcaggtgacctgaatctttcccttaaccgtacagtttctcgatggaattgtgtgatcagaaggtggaattctagtgataggcgacctcagacccgcattcatgttctgtgtgcctcttctattgcacatacactgatttttagcattgtctattcctatttttcctttgcccattgtacttccatatatcttttcattaacttacttgctgccttttttttttcttggtacacatttaaataaagtaatccttaacctgtgctgtaaagttcacccttggcatgctgttccaagaacctgggtttgaatcccaatcgttgtgaaacatactcagtattgataaaacctttttaataagtgatgcagagcagccaaggatatgttgacccagatgtcaaccaggctatttttatacttaaaacatgtcagcagagcataggcagaataaaatggtttaaataccccacagcaaatagagtaactgacaaaccaccaaaaactgaaaccccagacccaccagaaagacaagtgtctagcaatgccttggtacctgatctttttcattcaaataattgtcataggttgttcaaaaaaaaaaaaaaaaaggaaacaaaaacacaatagaagtccattatcccttgataattatttcttaaaagcaaatgggagtaagtgttcttatctggaaaaataaataaataaaatgctcaaagggtatcaccacttcaattttatcaagccaccttggacaaagtatccaaattgtggttgccttaataaactaaaacattattgtacataatgtaattataaatctatcagtctgcatggatgcaaactgtgtgtgacaaatcgtcttttaaatggtcaatttcagctgtacatttctcatccaagttgtactctagccattggtttagcgtggacagatactccatctctattatccatttccacagcccaaataaaatatgttaagcaggctcaaa
